United States Patent Application Publication US 2008/0050393 A1 - sequence listing, part 25

SEQ ID NO: 87694 - DNA, 676 bp, Homo sapiens
cggactttccgggtcgacgatttcgtttcacaaacagtcaaacatcaacagaagatccaggggatttcactccctttgaagactctgaagaattttgtttcagtgcagaagcaaatagttttgatggtgatgatgaatttgacacctataatgaagatgatgaagaagatgagtctgagacaggctactggattacatgctgccctacttgtgatgtggatatcaacacttgggtaccattctattcaactgagctcaacaaacccgccatgatctactgctctcatggggatgggcactgggtccatgctcagtgcatggatctggcagaacgcacactcatccatctgtcagcaggaagcaacaagtattactgcaatgagcatgtggagatagcaagagctctacacactccccaaagagtcctacccttaaaaaagcctccaatgaaatccctccgtaaaaaaggttctggaaaaatcttgattcctgccaagaaattcctttcttagaaggttgtttgattagttttagcaaaagcctttcagattcaggtgtatggaatttttgaatctatttttaaaatcataacattgattttaaaattacaattttgtttatttaaaatgcctatgttttcttttagttacatgaattaagggccagaaaaaagtgt

SEQ ID NO: 87695 - DNA, 2304 bp, Homo sapiens; identical to SEQ ID NO: 72572
  misc_feature (1)...(2304): n = a,t,c or g

SEQ ID NO: 87696 - DNA, 471 bp, Homo sapiens
tcggctcttccccaggaggaccaagccctgaatcaggtgcagtgctgcctgccccactgtgccatgggccctgggctcctctgctgggtgctgctttgtctcctgggagcaggctcagtggagactggagtcacccaaagtcccacacacctgatcaaaacgagaggacagcaagtgactctgagatgctcttctcagtctgggcacaacactgtgtcctggtaccaacaggccctgggtcaggggccccagtttatctttcagtattatagggaggaagagaatggcagaggaaacttccctcctagattctcaggtctccagttccctaattatagctctgagctgaatgtgaacgccttggagctggacgactcggccctgtatctctgtgccagcagcttggatggttacaatgagcagttcttcgggccagggacacggctcaccgtgctagaggacctgaaaaac

SEQ ID NO: 87697 - DNA, 1026 bp, Homo sapiens
tcccgtctcgacgatttcgtatcttaatgtcaagggaaaaatacatttttgatatctgctagatctagttcaaaccttatcttgtccatttactagcttgtatgttcttggacaggttaacccctgaaaattcagtgtcctcatttgcaatgtgggaataatagcgcttgtcttcaaaggttgtggtgaggattaagatgatatatagagagagcctagtggtactattaaactattaaatattaaaaatattaatggtagctactatatattgagtgtttattacgtgccaggcattgttctgaactctttacaaatgcagtctcatttaagccttccagcaacctgatgaggttgatgcattataaatttcatttgataaatgaagatactgagtcagagagagtaattccctcaaggtttagtgagtgtttaggctttgggttatgggtggtagctgttggagctatttaaaagcacgtagggttcataggagcttgtttggaaacttttgaggaactcgacgacttcttgacggagtctcgctctgtcgcctgggctggagtgcagtggcatgatctcggctcattgcaacctccatctcctgggttcaagtgatcctcccacctcagcctcccaagtagctgagattacaagcgtgcgccatcacacctggctaattttttgtatttttaggacagatggggtttcaccatgttggagaacaggctggccttgaactcctgacttcatgggatccggccatcttgccctctcaaagtgctgggattatcggaatgagcccccacgcctggcctccatgacttttttttaatttattaagagaaatggatttggctccctgttttaataaagcctggcctgaaatacggagttccactatcccaccgtcacagccccccccctcttgaattacgggaataaaccccggacccgcgttccgcccctttttgcccccccccccactttcccccccccccccccccccccccttttttttccccc

SEQ ID NO: 87698 - DNA, 3115 bp, Homo sapiens; identical to SEQ ID NO: 65601

SEQ ID NO: 87699 - DNA, 5164 bp, Homo sapiens
atgaggacacttgggacttgcctggcgactttggccggacttttgctaactgcggcgggcgagacgttctcaggtggctgcctctttgatgagccgtatagcacatgtggatatagtcaatctgaaggtgatgacttcaattgggagcaagtgaacaccttgactaaaccgacttctgatccatggatgccatcaggttctttcatgctggtgaatgcctctgggagacctgaggggcagagagcccacctgctcttaccccaacttaaagaaaatgacacccactgcatcgattttcactattttgtgtccagcaagagtaattctcctccggggttactcaatgtctacgtgaaggtcaataacgggccactggggaatcctatctggaatatatctggagacccaacacgtacatggaacagggcagaactggccattagtactttctggcctaacttttatcaggtgatttttgaagtgataacttctggacatcaaggctatctcgctatcgatgaggtgaaggtgttaggacatccatgtaccaggactcctcacttcctgcggattcagaatgtggaagttaatgctggccagtttgctaccttccagtgcagtgccatcggcaggaccgtggcaggagacaggctctggttacagggcattgatgtgcgagatgctcctctgaaggaaatcaaggtgaccagctcccgacgcttcattgcttcatttaatgttgtgaataccaccaaacgagatgctggaaagtaccgctgcatgattccgcactgaaggaggtgttggaatatcaaactatgcagagttgggtagttaaagaaccacccgttcctattgccccacctcagctcgcctctgtaggagccacctacctgtggatacagctcaacgccaactccatcaatggggatgggcccattgtggcccgagaggtggagtactgcacggccagtgggagctggaatgaccggcagccagtcgattccacgagctataaaattggacaccttgacccagatacagaatatgagattagtgtgctcctgaccaggccaggggagggtggcactggctctcctggtccagctctcaggacaagaacaaagtgtgctgatcccatgcgaggcccaagaaaactagaagtagtggaggtcaaatctcggcaaatcactatccgctgggagccatttggatataatgtaactcgttgccacagttataatctcactgtccactactgttaccaagttggaggacaagaacaagtgcgagaagaagtaagctgggatacagaaaattcacaccctcaacacacgatcactaacctgtcaccatacaccaatgtcagtgtgaaactgatcctcatgaacccagagggccggaaggaaagccaagaactcatagtgcagacagatgaagacctcccaggtgctgttcccactgaatccatacaaggaagtacctttgaagagaagatatttcttcagtggagagaaccaactcaaacatatggtgtaatcactttatatgagatcacctacaaagcagtcagttcctttgacccagaaatagatttatccaatcagagtggaagagtttcaaagctgggaaatgaaacccattttctgttttttggactgtatccggggaccacatactcctttaccatccgagctagcacagctaagggttttgggcctccagcaacaaaccagttcaccaccaaaatatcagcaccctctatgccagcttatgaacttgagacacctttgaatcaaactgacaataccgtgacagtcatgctgaaacctgcccacagcagaggagcacctgtcagtgtctatcaaatagttgttgaggaagaacgtcctcgaagaactaaaaagacgacagaaatcttaaagtgctacccagtgccaattcacttccagaatgcttctctgctgaactcacagtactactttgctgcagaatttcctgcagacagcctccaagctgcgcagccttttacaattggtgataataagacatataatggatactggaacactccccttctcccctataaaagctacagaatttatttccaagctgctagtagagccaatggggaaaccaaaatagactgtgtccaagtggccacaaaaggagctgccactccgaaaccagtcccagaacccgagaaacagacagaccatacagttaaaattgctggagtcatcgcgggcatcttgctgttcgtgattatatttcttggagttgtgttggtaatgaagaaaaggaaacttggccaagaagcggaaagagaccatgagcagcacccgacaggagattgacttgtggattggtgaactcaatggaccaagaagctatgctgagcagggcacaaaacttgcgacgagggctttctcattcatggacacgcacaatctgaatgggagatctgtgtcttcaccatcgtccttcacaatgaaaacaaatacactgagcacatcggtgcctaattcctattacccagatgaaacccacacaatggccagcgataccagcagcctggtgcagtcccatacttacaagaagcgagagccggccgacgtgccctatcagactgggcagctccaccccgccatccgggtggcagacctccttcagcacatcacacagatgaagtgtgcggagggctacggcttcaaggaggaatacgagagcttctttgaagggcagtctgcaccatgggactcggctaagaaagatgagaacagaatgaagaacagatacgggaatatcattgcatacgatcattcccgagtgaggctgcagacaatagaaggagacacaaactcagactatatcaatggcaattatatcgatggttatcatcgacccaatcattacattgctacccaagggccaatgcaggaaaccatctatgacttctggaggatggtgtggcacgaaaacactgcaagtatcatcatggtgaccaatcttgtggaagtgggaagggtcaaatgctgcaaatactggccagatgacacagagatatataaagacattaaagttaccctaatagaaacagaactactggcagaatatgtgataagaacatttgctgttgaaaagagaggtgtgcatgaaatccgagagatcagacagtttcacttcactggctggccggatcatggggtcccctaccatgccaccggcctgctgggattcgtgcggcaagtcaagtccaagagcccgcccagtgcaggcccactggtggtgcactgcagtgctggtgcagggaggactggctgtttcatcgtcattgatatcatgttggacatggccgaaagggaaggggtcgtagacatctacaactgcgtcagggagctgcggtcacggagggtgaacatggtgcaaacagaggagcagtatgtgtttatccacgatgcgatcctggaagcctgtctttgtggggacacctctgtgcctgcttcccaagttaggtctctgtattatgacatgaacaaactggatccacagacaaactcaagccagattaaagaggaattccggacgctaaacatggtgacaccaacgctgcgagtagaggactgcagcatcgcactgttgccccggaaccatgagaaaaaccggtgcatggacatcctgcccccagaccgctgcctgcccttcctcatcaccatcgatggggagagcagcaactacatcaatgctgccctcatggacagctataaacagccttcagcttttatagtcacccagcatcctttgccaaacacagtgaaagacttttggagactggtcctggattatcactgcacatccgtagttatgctaaatgatgtggatcctgcccagttgtgtccacagtactggccagaaaacggagtacacagacacggccccatccaggtggaatttgtctctgctgacctggaagaggacatcatcagcaggatattccgcatttacaatgccgccagaccccaagatggatatcggatggtgcagcaattccagttcctgggctggccgatgtacagggacacaccagtgtctaagcgctccttcttgaagctcattcgccaggtggacaagtggcaagaggaatacaatggcggggaaggccgcaccgttgtgcactgcttgaacgggggaggccgcagtgggacgttctgcgccatcagcatcgtatgtgagatgctccggcaccagagaaccgtggatgtctttcacgctgtgaagacactgaggaacaacaagcccaacatggtcgacctcctggatcagtacaagttctgctacgaggtggccctggaatacttgaattctggctgatggtgtaaacagctctgcaaacaatccctttcataccacaaagccaagacgttccatggtatttgtgcaaaagagatgaagacttctcaatatgcttattttgctttgcataattggctctttttaagagcccaagaaagtgtttctaaaattgcttgcactgcccaatcccagtaatgctgctgcctgacagaaacacacacacagccacagttgccaaatcccgtactccttgccaccggcttcctagagcagcgtagacagctggtaaactgaagagcacaactatattcttatgaaggaatttgtacctttggggtattattttgtggcccgtgaccctcgttattgttacagctgagtgtatgtttttgttctgtggagaatgctatctggcattatggtaatatattattttaggtaatatttgtactttaacatgttgcataatatatgcttatgtagctttccaggactaacagataaatgtgtaatgaacaaagatatgttgtatgagtcgtcgtttctgtcagatttgtattgtttccaagggaaaagcttgggggaggactcagttcacaaaatgcaaaactcaacgatcagattcacggacccagagcttttccatgtgtttatattgtaaatatttttgatttcatcgaaattatttattcattaaaagaaatttttgtgaagcacagtgagtgacaatcatttttcttaaggcctggaaacgattttctgtatgatgttactttatgtgaattctcatctcaataaatgatgacccgtg

SEQ ID NO: 87700 - DNA, 5924 bp, Homo sapiens
tttttttccaggtatttcttaaatttattgaagaactcttagctgggagaagaaagatcacaggcttaaacaattgtaagataaaagaacaattaattgcaaataattacaaaagtaatttctgaaattttttgagccactgctgaaacaaaactttagtgcatctcaaagttcgtattttgttaagtgaacatattaaattactgaaaagcaaaaaagagttactgttacacagtacaagatcttaatatagtaactgagcacagccaaataaacagctataattattccaagctgcttttgctatgtatctggtatattaaacaagaaagtggattacttttaacactgcacaagtaaccaaaggtagcaaatccagcaatattaaaaccggatattaaatagtattcaaacattacaacaaaaacaaaataagaacttctagaactagaactctaccctatgaaaggaatgtacacagatggttaaaaaaaaaccaataaataaataaagtgacaagagtgactaattctgtatccacatcttcagagcaggaatacagtaaatgagtaaatgcttagaggagtcttgctgaaaatgagaaaaaatgcatctcactttagtataatttttctaaattctcactgaagctctaattctcttgtgctggtgacaggtggacagggtttttaaatgcaaagtattctccctacaccctgagtatggatgcatcagttgtttaaaattctgtggaaagtttccttagaaaaacataaaatttaaagtgatatactgatgggaaattgaatatattaattgtggaagaatatcagctaactaattaactaagtagacatttaaatctggactctgttgaagaatcaaggttaaactctgcattatgtgcactaatgtcagccatctaatatcaaagtcagataagtaaactatctttccctttatacatagtgcatttagtaaataaattctcttaccagcaacataaagcccttgttggagcaaaattaaagtattaagaattgaattaacttacaacaaatatctgaagggtaagtggaacatttttcaaagtataaagatgttatcacatatattcacccatgaatccctccttaaaggttttataacaccattaaattatatcaaatatcccaacagatattgtcattttcttctgtgatttataaaggaaacattccttttgtacaaatcagaagtatcttaaaaatcaaccttaacaccaaaatatacatgtaattttaacttggtttaggaaaacatgaaagaactgtcacattttggtgtgaacaaggttctgaaaaccccctatcagaggtctcattcacttttttccacatatcacttgaaggttttgaaactggtaaaaacagaattcagctcgatgtacatcaaaactttaacagttctgaaaaagacgtatttcgtaagggccaaaatgtacagcacagcaatattacaatgttacagtataaatatgtcaagccaatttgtaataaaataagacagttgtcttcaaaagagctgtttgactatagagcaaccaaatagatctagaacatctttggaaaaaccacaaagtgcctttacagaaagttaagtttagactacacttaattaaaagataatactctaaactcaaaattattttctctatatgaggaattttggacacttgttttccacaccctgcccaatattccaatatttttaactcacacttcttttcatacatctgcccaatatttaatattttattcctatgcccctgcactgaattgatgtaagtgtgaagttccactattattattaccacacatggctaatacctaataactggtctgtcattatgtaggtgggttaaataaggcaaatgctggaactcagcacagctctaggcaaaatgcaaagggaaataagaaaagcctcacctcaggaatgattacactataaacagaaataaacattttcaaacacaaagtttcacaaaataatatatcatcactttaaaagaaattcagaactccaattttggctggttgatccaacttgtggcatacactcaagttactaaacacaatttgatagttagatacttgtaaaaatgcattctaaacttaataatcaattaattcataattaacaagagcaaacattcctagtcctaacatttaaaaaaacccagtccagtgctgccacatctcaagttctgaaaagctaaaggcaggaacaattctggttatacaattcctgcatttctccaccttaaaaaatacttgaagaaactttaggaaactttatattaaggcttgctgtatttctgtatcttaaattgagaaaaatcaaaacctacgatgtaacctcgaattatttaaatagcttttggcattttttgaaaagcaaatttgaatctttcactataaaacatttctataccacaattactaattcacattaatgtgtaagtgccctcatttcctcattccctggcaggcgctatgtcttctttctacgttttgtgcagctttcagaacagtcagtgctcagaaaaaatgaaaacgtaatggagcaaaatcaaagtccccaaaaaaagtgatttatcctagattacaaaatccagtagtggaagaaccaacatttacacacccaaatacacacacacccacacatacacaggacacagcgagagatgagagagagtggggggtgggggaggtgagagacagtgggaggaggggggagggggaagagagtgggaggaggggagagagagttgcagggagggaagagagagacaaaagcaagacacaacctttgtcctctattcatgtcaacttgcagtttctggacacaaactagtaggaaatgtagagcccagaaagatcgtgtcagagaacttgacgagacagtgtagatatagtttatctgggtggggcggggtggggggaaatcccaatttttctaaaacgaacaaacaaacaaaaaaaaaaaacaccacattcttggtagaggttttttcaaaaatccaacaataaaaactactgggcttctctaaatgcatttccatattaacattaatttttaaaatttcaacatgttttacaatttaagttttcacttgtaagataagttgggaacccaaaattgtcaaaaaaaattttaattattgtcaataaaaattcttactgcacaatctttataggcgttttattttaaagcacctttttaaattttaacagtgggtttctaaaaagaaaacagtaaaataaaagagggaacaaactggcaaggttaaagtactcccttacacacacacacacacacacacacacacacacacacacacacacacacacacctttcatgccagaatgactggcagccattggcaaataatgtccaatgaaaggatgggggaaactatcacttatagtgtttatagaaacctaaaatactaatgtttctgctaagaaattaaatagtttggggaaatcaaaaagcttaccaatagctgatctatgaaatatgaaaatgaaactgatttttaaaaacaggaaagaaaggccaaaaatctactagaaatttttaaaaatcagcctcaattttattttctgatgtcagactagttattaattagataccatttgtttgcaaaggagcaaaattataactctatcactggaacctatcctcagccacttcagtgcagtttctagcagcactatttggatacaaaaagaatgtggtcagacaatgcccctgaaaaccccctggttagaccttccttcaaatacatgttcttagggtcttgacacactacacatgtgtatagaagaataaatgaaggtagtattttgacagattacaaaagtatgaactatatacaccgagtgataacacaaagcgctcagaaagctatatttacttgcctcccaactgacttacgatgttaatattcactattcaaattttatcctaaacatctttattggcttgttcccctccccaaacaaatactaaaatatactggtttggggtttgctctatgcattttccaagagccaatcaaccagcgacgttgcatctctcctcactggaagctttttccatcacttcatagtattgaagcacagcctgcaggaggtctcccactttccatcctttctcttgtaattgttttgaaagtagcataaactccttatttgcagagtcatgaaaataaagttctgcaacttcagcctcagaggcaatgagccactgaagaataatccttagctgggggtctaccgtgcatggctccatgtcaatattcgtaattagcagtgtctttccatcttgccccaaaccttctacttcgtcctcatgctcttcatctttatcatctggtccatcactgtctgatgttggaaaggataaattgtcctcatacaaatctccttctaaaccaagactgctccagctactgctgttaccatcactttcacttagatgatgaaaactgctgctttcatcttggtgttcatcttcaaaacttaaattggaccagctaccagtgctgtcatcaccaatactgaggttcatctgctggctactgacagactcggttgactgaaagtcttctatttcttttgaactgctaacagcatgcccaacatttgtgacagctgctgtcatggtttctgtggcaaggctttcagcaaagctggcaccctcctgtccgatcccactgtcggctgccaggctggtactgctcagctctcgctcagctttttcaatggcttcagcaactatcttctcagcaagcactgccttcttatcaagattaacatgaatctgagggacactgagatgaaaaatcctagatttctgatagcggctgctaaattttggattagaagctggcttactactggcgagagaaccctgtctgaaaaagtgctgagatgaatttccagtgcaattgtggagttctttaaggtcacagtatctgcaagcttgacctgtaagaggtgacaacttttctgcataagtgaccctgtctgctgattttgtggtctcagacactcggaacactgtagatcctagagttagctctagagtgtcatccactacttttttggcatactgttctacagcttgaacaacattgtctccacaaccatatccatttaaactgccagtgctgtggtaaaacctgtgattttgtgaggaaggctgaagagacttaggcaattctggtgtaacgtgacactcattatcttcttcatatccagatttttcaaacaagcaagaatctgttaaggattttggtaggccaactagagaggctgtcaactcttccttagcatcttttgttatgctgtgaaccagagaggttgaaaaactatacagttgggagacctcatttctatatggatccagggtcctttcacaagtttgatttttacaaaagtaaccttcatttcttttactttgtctctttttgtctgcttcttggtggtgctctttgtttgaaaacattaacagttccttgtttgttttcacttgtgaacttggcacagggaacattcttgagttgcactgcactttggttgtcttagctgcttcctgtaatcctgatttaacagatcggtaggcaagcctattggcatactgatccattatcaactcactattaccaccttcctgttttagtatctgaataaggtgacctgcatattcatctgtcacactttcacagctgggatacttatacatcagacctgacatacaagaacttggtggtaatgaaagaataaacggatccacttctcttgggtgcactacagcctctatatccaacttctcttctactttataatcttcgtcaccatcagcataacaac

SEQ ID NO: 87701 - DNA, 4188 bp, Homo sapiens
aatgctggtgggccagggcgcggggccgctggggcccgcggtggtcaccgccgcggtggtgctgctgctgagcggcgtggggccggcgcacggctcggaggacatcgtggtgggctgcggtggcttcgtcaagtcggacgtggagatcaactactctctcatcgagataaagctgtacaccaagcatgggactttgaaataccagacagactgtgcccctaataatggttactttatgatccctttgtatgataagggggatttcattctgaagattgagcctcccctagggtggagttttgagccgacgaccgtggagctccatgtggatggagtcagtgacatctgcacaaagggtggggacatcaactttgtcttcactgggttctctgtgaatggcaaggtcctcagcaaagggcagcccctgggtcctgcgggagttcaggtgtctctgagaaacactgggaccgaagcaaagatccagtccacagttacacagcctggcggaaagtttgcattttttaaagttctgcctggagattatgaaatcctcgcaactcatccaacctgggcgttgaaagaggcaagcaccacagtgcgtgtaaccaactccaatgccaatgcggccagtcccctcatagttgctggctacaatgtgtctggctctgtccgaagtgatggggagcccatgaaaggcgtgaagtttcttctcttttcttctttagtaactaaagaggatgtcctgggctgcaatgtctcaccagtgcctgggttccagccccaagacgagagtctggtgtatttgtgctacacggtctccagagaagatggctcgttctctttctattccttgccaagtgggggctacactgtgattccgttctatcgaggggagaggattacctttgatgtggcgccttccagacttgacttcacagtggagcatgacagcttgaaaatcgagcccgtgttccacgtcatgggattctccgtcaccgggagggtcttgaacggacccgaaggagatggtgttccagaagcagtagtcaccctgaataaccaaatcaaagttaaaacaaaagctgatggctcattccgccttgagaacataaccacagggacatacaccatccatgctcagaaagagcacctctactttgaaacggtcaccatcaaaattgcaccaaacacacctcagctggctgacattgttgcaacagggttcagtgtctgtggtcagatatcaatcattcgcttccccgacaccgtcaagcagatgaataaatacaaagttgtcctgtcatctcaagacaaggacaagtctttggtcaccgtggagacagatgctcatggatcattttgttttaaagcaaacccagggacttacaaagtgcaggtgatggttcctgaggcagaaaccagagcagggctgacgttgaaaccccagacatttcctcttactgtgaccgacaggcctgtgatggatgtggcctttgtacagttcttggcatcagtttctgggaaagtctcttgtttggacacctgtggtgacttgctggtgactctacagtccctgagccgccagggtgagaagcggagcctccagctctccggcaaggtcaacgccatgactttcacctttgacaacgtgctccctggaaaatacaaaattagcatcatgcatgaggattggtgctggaagaacaagagcctggaggtggaagtgctggaggatgacgtgtctgcagttgagttcaggcagacgggctacatgctgagatgttccctgtctcacgccatcactctggaattttatcaggatggaaatgggcgtgagaatgtggggatttataacctctccaaaggagtcaaccgattctgcctgtccaagcctggtgtgtacaaagtgacccctcgctcctgccaccggtttgagcaagcgttctacacctatgacacgtcttcacctagtatcttgacattgacagccattcgccaccatgtccttggaactatcaccaccgacaaaatgatggatgtcactgtgactatcaagtcttccatcgacagtgaacccgccttggtcttaggccctctgaagtctgtgcaggagctgcggagggagcagcagctggctgagatcgaggcccgcaggcaggagagggagaaaaacggcaaagaggaaggcgaagaaagaatgaccaagcctcccgtgcaggagatggtagatgagttacaaggccccttctcgtatgatttctcttactgggcgcggtctggagagaaaatcactgttacaccgtcatctaaagagctgctcttttatcccccttcaatggaagccgttgtcagtggagaaagctgcccagggaagctgatcgagatccacgggaaggcaggcctgtttttagaaggccagatccaccccgagttggaaggagtcgagattgtcatcagtgaaaagggggcaagttcaccgctgatcacagtctttactgatgacaaaggtgcctacagtgttggccccctgcacagtgacctggagtacacggtgacctcacagaaggagggctatgttctgactgcggtggaaggaaccatcggagacttcaaggcctatgccctggcaggcgtaagctttgagataaaagctgaggatgaccagcccctcccgggagtcctcttatccctgagcggtggcctgtttcgttccaacctcttgacccaggacaacggaattctgacattctcaaacctgagccctggccagtattacttcaaacccatgatgaaggagttccggtttgagccatcctcacagatgatcgaggtgcaggaaggccagaacctgaagatcaccatcacggggtaccgaaccgcttacagttgctatggcacagtgtcttccttaaacggagagcccgaacaaggggttgccatggaagcggtgggccagaacgactgcagcatttacggagaagacaccgtgacagacgaagagggcaagttcagattacgtggattgctgccgggatgtgtgtaccacgttcagctcaaggcagaaggcaacgaccacattgagcgggcgctcccccaccatagggtgattgaggttgggaataatgacatcgatgatgtaaacatcatagttttccggcagattaatcaatttgatttaagtggaaatgtgatcacttcctctgaataccttcctacattatgggtcaagctttacaaaagcgaaaacctcgacaatccaatccagacagtttcccttggccagtccctgttcttccatttccccccactgctcagagatggcgagaactatgttgtgcttctggactccacactccccagatcccagtatgactacatcttggcctcaagtttcttttcaccgcagtggggctaccataaacacaccaccttgattttttaaatcccacgaggaagctgcctgaacaggacatcgcacaaggatcctacattgccctgccattgacgctgctggttctgctggccggttacaaccatgacaagctcattcctttgctgctgcagttgacaagccggctacagggagtccgcgcgctcggccaggcagcctctgacaatagcggcccagaagatgcaaagagacaagccaagaaacagaagacaaggcggacttgaggaggaaggggacagttgcagtctcacttgggacaggccacagccaggggtccggccactacccgcccgtgggataaaagccaaaagcatgcgtcagctaacttcagcctgtgctgctgggcccgcaccccatgtcccttgtcactgtgacatcctgcacccatcctcacccctccgtagagcccctcgtgcaatgcaatgaatggaccctcctgtcactctgctgaacagaatttattttctgagtcaaatataatttattattattttcgtcaaagaagtatttaagctgtgctgtggtgtgagaatgtcattcttgatcttcagccttcgtttgcaaggagagttccagttgacgtggtgtttggttccatggcggggtaccctggggattcatctgttttcttcacttccctttgcatctgagatcctgttggaaaccacagcaacctgtattcattattaggaaataaaaatcgaaaaaaaggttcattcttttgtgttgtagttttg

SEQ ID NO: 87702 - DNA, 501 bp, Homo sapiens
  misc_feature (1)...(501): n = a,t,c or g
tcctcggtaccggtccgnnnnnncgggtcgacgatttcgtcaagggcggcaaacagcagctagtcctgcctctcactatgactcccggagctgcacctacaacatgtaccggcaataccggtacctgaccaccgcaggcgctgtcacccagtgctaccgcgccagggcccactccatccagatcactccaccagatgaaggtggaggtgatcgcagccagcaagtgccgccggccggctgtcaagcagttccacgactccaagatcaagttcctgctgccccaccgggtcctgagccgtcagcacaagccacgcctcaccaccaagaggcccaacaccttcttctaggtgcagggcccttgcctgggtgggccccaaataaactcaggaacgccccggtgaaaaaaaaagacataaactgtaaatgcttagacaattggtcatgcctgttggcaagaacacaacccccgctcatgaagaaaccaaaaataaattctaagcc

SEQ ID NO: 87703 - DNA, 542 bp, Homo sapiens
ttcgacaccgagttcgtcaacattggcggcgacttcgacgcggcggccggcgtgttccgctcgccgtctgcccggcgcctacttcttctccttcacgctgggcaagctgccgcgtaagacgctgtcggttaagctgatgaagaaccgcgacgaggtgcaggccatgatttacgacgacggctcgtcgcggcgccgcgagatgcagagccagagcgtgatgctggccctgcggcgcggcgacgccgtctggctgctcagccacgaccacgacggctacggcgcctacagcaaccacggcaagtacatcaccttctccggcttcctggtgtaccccgacctcgcccccgccgccccgccgggcctcggggcctcggagctactgtgagccccgggccagagaagagcccgggagggccaggggcgtgcatgccaggccgggcccgaggctcgaaagtcccgcgcgagcgccacggcctccgggcgcgcctggactctgccaataaagcggaaagcgggcacgcgcagcgcccggcagcccaaaa

SEQ ID NO: 87704 - DNA, 5305 bp, Homo sapiens
gctggcggcgcccggctccgtcctgcccgcggccggcccccgcgtctgctccctccccgcccgggcccctgtcggccgccgccagtccccgccccgactgtgaatgaaaggcgggcgccgccgagggctggctgggaacgccgcagcgacgccggcctctcgagaggcgcgcgccccgccgagatgtacggtgtgtgtggctgctatggtgccctacgccccaggtacaaaaggctggttgacaacatcttccctgaggatcccgaggatggtctggtgaagaccaacatggagaagctgaccttctatgccctctcagctccagaaaaacttgatcgtattggcgcctacctctctgagaggctcatccgtgacgtgggtcgccatcgatatgggtacgtgtgcattgctatggaggctttggaccagctgctcatggcctgccactgccagagcatcaacctcttcgtggagagcttcctcaagatggtggccaagctgctggagtcagagaaacccaacctgcagatcctcggcaccaactcgtttgtgaagtttgccaacatcgaggaggacaccccgtcctatcaccggagctatgacttctttgtgtcccgattcagtgaaatgtgccactcgagccatgatgacttagaaatcaagaccaaaattcgaatgtcaggcatcaaaggcctgcaaggggtggtgaggaagacggtgaatgatgaactgcaggccaatatctgggacccacagcacatggataagatcgttccatcactgcttttcaatctacagcatgtagaggaggcagagagccggtctccctcacccctccaagcacctgagaaggagaaagagagccccgcggagctggctgagaggtgtcttcgggagctgctgggccgggctgcctttggcaacatcaaaaacgccatcaagcctgttctcatccatctggataaccattctctttgggaacccaaggtgtttgccatccgttgctttaaaatcatcatgtactcaattcagccgcagcactcacacctggtcatccagcagctcctgggccacctggacgccaacagccgcagcgctgcgacggtgcgcgcgggcatcgtggaagtcttgtcggaagccgcggtcatcgctgccaccggctctgtggggcccacagtactggagatgttcaaccacgctgctgaggcagctgcggctcagcatcgactacgcgctgaccgggagctacgacggggcggtcagcctcggcaccaagatcatcaaggagcacgaggagcgcatgttccaggaggccgtcatcaagaccgtgggctcctttgccagcacgctgcccacctaccagcgctccgaggtgatcctcttcatcatgagcaaggtcccgcggccatccctgcaccaggcggtggacacaggcaggacgggggagaataggaaccgtctgacccagattatgctgctaaaatccctcctgcaggtatccacaggtttccagtgcaacaacatgatgtcagccctgcctagcaacttcctggaccgccttctctccaccgccctcatggaggatgcagaaattcgactctttgttctagagattctcatcagtttcattgatcgtcatggcaaccgccacaagttctctaccatcagtaccctcagtgacatctctgtcctgaagctgaaagtggacaagtgctctcgacaggacaccgtcttcatgaagaagcactcccagcagctctacagacacatctacctgagctgcaaggaggaaacaaacgtgcagaaacactacgaggcgctctatggcttgctggccctcatcagcatcgagctggctaacgaggaggtggtggtggacctcatccgtctggtgctggctgttcaggacgtggcccaagtcaatgaggagaacttgcctgtctacaaccgctgtgccctctatgctctgggcgcagcctacctgaacctcatcagtcagctcacaacagtgcctgccttctgccagcacatccatgaggtgatagagaccaggaagaaagaggctccatacatgctccccgaggatgtgtttgtggagaggcccaggctgtctcagaatcttgatggggtggtcattgagctcctcttccgccagagcaagatcagtgaagtcctgggaggcagtggctacaactcggaccggctctgcctgccctacattcctcagctgacagatgaggatcgtttatccaagaggaggagcattggagagaccatctccctgcaggtggaggtagaatcgaggaacagtccggagaaggaggaggtgagtgtccgtgccaccgtcctggggcagccccacctcctgtagattggacgctggactccaggctcccctgcctgcatagtgagcttaaggctgcatggaaagcaagcttctcgagtaattccacacttgtactgactctccccacgtatgcgtcatagatacttcccttcggaaaaattgttagggtcctccctgctcccatgaggatatcataaaactcactcttgaaaggcctggctggggatggtggctcacacctgtgatcccaacattttggaggctgaggcaggaggactgcttgagcccaggagtttgagatgatctggggcaatataaggagaccccatctctacaaaaaataattgaaaaatcagccaggcatggtgacgtgcacctgtggtcccaggtactcaggatgctgaggtgggagaatcacctgagcctgggaggtcaaggctgctgtaagccatgatggcagcacggcacttcagcctaggtgacagagtgagacctcgtctcaaaaaaattaaaaagaaaggcatgctggtcatcattccccactcacagggggaccgatatgctctgggttggaaactagaagacttaactggagagataagggtgagaacagctttcatagtgttgcttccgtatgtatcaataaagaatctttttttaaatttacactatttttaaagcaattttagttacagcaaaattgagaggaaggtacagagatcgccctttgccccctcccctcccctgacacatgcacagcctcccctcctatccatatcccccagcagagtggtgcatttcttacagttcaacctgccttaacacaacagtatcatctgaagtctgtcgtttacactggggttcgccctcagcgttgtacattctgtgggtttggacaaatgcgtaatgacatgcatcccccaccagagtaccatacagagtcatttcctgccctaaaaccccctgtgctccacctcttcatctctcccctaaccactgacagccaagatgttttttttttttttttttaatgctgactgttacagttcacaagaagtatggaggacacacatctgggtgggaccgggacagaaagatttacatggtcctcaggcatggacaggctggcattccccagcctctctgcccattagggctgatatagacatggaggacagctttgacatcaagcctttccccagatgcaatcagaggtaggagaagtctctaggggtcaggatcaagcctccccctaactgtgccctcgaccacttcatttattggggcagatctctaccccagggccctcaaagcttatccagaaccttcccacggaaggaagctctgacttgggctaattggacaagtaaaatgaggttgaacgaggcatcctccatggcccttccagctccaaggactgggaacctccaatgcgttaggcatcggggtgagttggctgctctctccccatagtggcgattctcccttcccaagaggtaagagaccctcgggaattgaggagtgaagtgactcagaagcgcaaggcgaaatgcttacacagctacagagccacctcctcactagtggcctcctgggccaccagtatcagttccttcctcccttcaagagtcagcttagcccagaggtagcttggtggcaaagcaggggtgcaggggccttcatcctgtgcccttctgccatgccacaactctctccactctcagccatcagtgccagtccagagtcccacggtggttcctagggccgtactgcccagccttgccgcaggggtgaataaatgcttgtttggtcaaatctgaatcctggtgcctggcattcccagccatgcatagtctgggctctgccatttcatttttccccacctgctctggcccgtatccactgtcccactctggtggggctgctctcgatctctcccacgctgcgctccgccatctccaggcctttgctagtgcagaatgccacatctgaaccacccttccctccacactggtgcagctgagcgcctgtgaactgtctgttctccagcgcccggcccctgttcagtttcctcataaacttctctctccctgctcttgcccagggagcatcccttctctcttgcccagagagcggcattttctttgactgttgccaccacacagttccctagcaccctgcaggtgaatatccaatgttgctcggtgctgacagtggatgaatggatggacgtacagaggataagtcctcagagcgagttaaagccgagcatagctctctcttgcatgtaattcctatgctagcaaattgtgcagtttctatagactcacctacagtcctgcatgtagttggtgctcacttaatgtttgttaaatgactttatctcatacatatacttctgtcctctcctactcaaacaaaaatgccaaacaaatcaaaaaatgcacgactcagtgaattttcataaagtgtgtatgcccacgcaaccacgcctggatgagagagtggaacactgtcatcatccaggggccctgcctctgtgccccctcccctaagggagctcccagcctgagttgcgttacttctggaactttatatcaatgaaatcattctgttctgtgtctgctgcttttgcttaagattatgtttaaatgatagagcatgaggctgggcgtggtggctcatgcctgtaatctcagcactttgggaggccgaggcaggtggatcacctgaggttaggagttcaagaccagcctgatcaacatggtgaaaccccgtctttactaaaactacaaaaaattagccgggcatggtggtgggcacctgtaatctcagctactcgggaggctgaggcaggagaatcacttgaacccaggaggcaaaggttgcagtgagccaagatcacgccactgcactccagcctggatgacagaatgagactctgtctcaaaaaaaaaa

SEQ ID NO: 87705 - DNA, 871 bp, Homo sapiens
tttcgttggccaccttgcgagcgctcgggttgagtttcccgggcttccctgactcggctacctgttctggaggtcaggctttgggcccttgcagaggtcgccgaggggcccgcgccgccgccagagcctgggcccagtccccagtcttcagagacgccctcgaccttcctgctccgaagagctggcctgatgtcctcgggtcgcgctccgcaggttcttacttttccaaacctagagggcagtgcatgaagccaggggtcatcagccatgctccagacagtgtggttccagggcttgggcaggaacctgttgtttcaggagccagtaacctttgaggatgtggctgtgtacttcacccagaatgaatgggccagcctgcaccctacgcagagggccctatacagggaggtgatgctggagaattatgcaaatgtgacttccttgttttcacttctccgaaccctgaggcagtgtgtgaagctgggacgccagccatgttccagaccgcttggcgccaaatggagtcttgctctatcgacaggctggagtgcagtggcgcgatcctggttcactgcaccctccccctctggggttcaagcgattctcctgcctcagcctcccgagtagctgggactacaagcacgcgcccccacacccagctaatttttgtatttttagtagagaccaggtttccccatgttggccaggatggtctcgatcccttgacctcgtgattccccccccttggcttcccaaagtgctgggattacaggcgtgagcccccgtgcccaccctctctttgttaatgtggtgaattacatgatttttctttcaaatattaaaccacctctgcggtgggataaaaaaaaaa

SEQ ID NO: 87706 - DNA, 790 bp, Homo sapiens
cttcggaattcccgcgtcgacggtttcgcgcgggcgggagaccgtcccctcgggagtgggcccggaagggcgggcgagtgactgactgcctcccttggggagtggcccctgggcgggcccctgctgggcagggctgagtcggaggcagtggttccgcggtctcccggttgctttcaggccggggcggaggttttgcttccgtggcttcctagcccaaggggtgaggctgttagctgcagtgagcccgttttctcttcactcggcctgtcaaagcggcgcaggggccgcgattagcttcctgccccgcgacagctgcacttctggcttgccggggcgaaccgaggggctcggagaccttcagccacgcgaggcccgccagtgagcagtcagaaatcacctcggctttggcccacgcctgctccccggtgacagtcgtccgccctatccgcgtctagctggcgacaaccgcaggggttcacttttggccgtcaggtgccacccggagcagaaattaggggaaccttgtgggattggatcacggtgaagggtcggggcaggaattggaaggccagcctttatagtgcagaaagggagaaaaagcagcataaacgaaaaaaaaaattcttgtggatagcaagtatttacttagaaaaccatcaacactttggtcaaaaggagttacccctcccttacaaacacacacccacacattcatcctagacgaaaaagttaaatgtttctcagccagggcagaatttatggatgtttacccacaacaggtcagcagatt

SEQ ID NO: 87707 - DNA, 2225 bp, Homo sapiens
tttcgtcctagagcgctgggtgggcgcgttctgcggcctgagcagggacgggtagtgaagcggttacgccccttcttcgcgtcttggcgggagcctgacgccccgcttctcccctaacgaggtgtcccaccggcgcccgccgaggcctaggcctccgcagccgccctccgtctcctcagccccgacgctgcgccttgggccttgtgcgcatttttttcgggggaaaactgaggctcggagtgcgaaagtcagccgaggtcgccccgcccaggacagagaagggctgtggtcggctgatccgcggcattcccgggatggcggcggcgtggatggctccggcgcaggagtctgtgaccttcgaggatgtggctgtgacatttacccaggaggagtgggggcagttggacgtgacccagagggccttgtacgtggaggtgatgctggagacctgtgggcttctggtcgcactgggtgacagcacaaaacctgagaccgtagagcctatcccttctcatctggccttgcctgaggaagtctcactccaggaacagctggcacagggagtcccaagatactcctatttggggcaggccatggatcaagatgggccatctgaaatgcaggaatactttttgagaccagggacagacccacagagtgagaaactccatgggaaaatgagccttgaacacgaaggtttggcgacagctgatggtatttgttcaatgatgatacagaaccaagtctcaccagaagatgctctctatggatttgactcatatggaccagttacagattccttgattcatgaaggggaaaattcctataaattcgaggaaatgtttaatgagaattgcttccttgttcagcatgagcagattctccctcgtgtgaagccctatgattgcccagaatgtgggaaagccttcggcaagagcaaacacctccttcagcatcacatcatccatactggggagaagccctataaatgcctggagtgtgggaaagacttcaaccgcaggtcacacctcacacggcaccagcggactcacaatggagataagccctttgtgtgcagtgaatgtggaaggaccttcaatcgcgggtcgcaccttacacggcaccagcgggttcacagtggagagaagccttttgtgtgcaatgaatgtggaaaggcctttacctaccgctccaattttgtcttgcataacaagagccacaatgagaagaaacccttcgcatgcagcgaatgtggaaaaggcttttatgagagtacagccctcattcaacacttcattatccatactggggagaggccctttaagtgccttgagtgtgggaaggccttcaactgcaggtcacacctcaagcagcatgagcggattcacactggtgagaagccctttgtgtgcagtcaatgtggaaaggccttcactcactattccacctatgtcctgcatgaaagagcccacactggagaaaagccttttgagttcaaagaagtgtgtgaaagccttgagcattcgaaaaagcctcattagacggttctacatccacactggagagaagccctatgagtgttgacagtgtggaaagggttttacccgcatgtcagggctcacaaggccccagtggattcatactggagagaaaccgtatgtatgcgtccaatgtgggaaagccttttgtcggaccgcaagcctgattcgacactttagcatccacactggagagaagccctatgaatgcgtggagtgcgggaaggccttcaaccgcaggtcacccctcacaaggcaccagcggattcacactgcagagaagtcccacgaacccatccagagtgggaacgtttcttgtgagagcacagatctcattcaacactccatcatccacactgagagtagcccagtgagtgcagtgaatatggaaacgccttcaattgccgctcattcctcctcactcgacatcaacggattcatagtggaagaaaccctaccattgtaacagatgtggaaagactttttacgtacacttcagtcaacatccaagaattcctattagcgaaatagttttttaatataaccactgaagaaaatctgtggtgagaggaaacatcttaccatctggtcattcatactgaagagaaactccataagtatcatctctgtgggaaaacctgttttagatcatcatttgtcatctaaacaattatgttagaaattgac

SEQ ID NO: 87708 - DNA, 775 bp, Homo sapiens
gggtgcaggaagtaacaggcatcttagaaagaggcagcccttcgtagcgtatcatgaaaaatactaaaggggagaaaggaatatctggggaggagagcccgtttccggttctctatggtgcccgaaggcagggaccacagaaacccacccctgtggcataaacctggcagctgacagccgtgcctgtagtcccagctactcgggaggctgaggtgggaggatcgcttgagcccaggagttctgggctgtagtgcgctatgccgatcgggtgtccgcactaagttcggcatcaatatggtgacctcccgggagcgggggaccaccaggttgcctaaggaggggtgaaccggcccaggtcggaaacggagcaggtcaaaactcccgtgctgatcagtagtgggatcgcgcctgtgaatagccactgcactccagcctgggcaacatagcgagaccccgtctctactaaaaatacaaaaaaattagccaggcgcggtggctcacgcctgtagtcccagctactttgggaggctgaggcaggaggatcacttgaggtcaggagtttgagaccatccctggccaacatggtgaaaccctgtctctactaaaaatacaaaaattagctgggtgtggtggcgggcgcctgtagtcccagctactcgggaggctgaggcaggaggatcacttgaacccgggaggcggagcttgcagtgagcagagatcacaccactgcactccagcctgagcaacatagcaagactccgtctcaaaaaaaaaa

SEQ ID NO: 87709 - DNA, 4348 bp, Homo sapiens; identical to SEQ ID NO: 65234

SEQ ID NO: 87710 - DNA, 391 bp, Homo sapiens
agacaggggtacaaagattatttttaaaaatattaataactttccagtcttctttggaaagaaaactttccaaaacttgagaaagatatacatttccaggtacaggaaggtcagagaacaacaaacagagttgacccaaatatgattaccccaagtcatataataaactctcaaaggtcaaggaaaaagagaggatcctgaaagcagtaagagaaaataaacaaatggcatttaaaggagctctaattcatctggcaacagacttatcaatggaaaccatacaggacaggagggagtcaaatgacattttagaagtgccataagaataaacattgccatccaagaataccctatccagcaaagttagctttcaaatatgaaagaaaaagtt

SEQ ID NO: 87711 - DNA, 499 bp, Homo sapiens
atagggagacaacagtgggtccagggggaccggcactcagcacacctaggacctgcaccggcaccggcctctgagttccctcagtttttattgattatgattatcattattacagcacaaaggaatgcagtaggggagcagggtgataataaggggaagttcaacagcaacaacaaaaacaaacacgtgagcaaaagaatccatatcattattaagttcaagggaaggtactatgcctggacgtgcacgtaggccagatttatgtttctctccacacaaatatctcagcggagtaaagaataacaaggcagcattactgccaacatgtctcgcctcccgccacagggcagcttttctccgggctcagagttgaacaaatgtaaggtcgggctttacaccgagacattctagttccaggggcaagcaggggacagttggctttctccatctgaactgtaagaggcgtctctctttttgatatccacctcaggacaaaccc

SEQ ID NO: 87712 - DNA, 1459 bp, Homo sapiens; identical to SEQ ID NO: 65370

SEQ ID NO: 87713 - DNA, 979 bp, Homo sapiens
  misc_feature (1)...(979): n = a,t,c or g
ttttttttttttcattttatttttatattatttatttattcttccttagtttcttgagattatcatccgctgagggtggaaggggagtgaagcagacacactcaggaggtgtcttgcagattatcatccgctgagcgtggagctgagggtggaacgcgagtgagcagacactccggagctgtcttgagattatcacccgctgagggtggaaggggatagagcaggcactcgncaaggtgtcttgagattatcatccgctgagggttaaagctgagggtggaaggggagtgagcagacacactcggaaggtgtccttgagattatcaatccgcttgaanggtggagctgagggtggaaggggatagagcacacacttcggaaaggtgtcttgaggcctcagggagttatcaattatagaatgttgttgagttggaggaggtggctggtggcccatcctgttttttaaagtttcagctgtgaggtagggccagtagggcaatcctgaagaatgacgatgctccactgccgccattctgacccggttgcaaagaggctttcttgcagaaggggtgattttgcatctgtagtagtcctctgcccgccgccgcaacgcttgcgcacgttgaaacatttccatgtaggtgtgtatttctttcatatccaatttcccattttcctctgcctctgacacctgcctctccttttctccgtgctcacgttctttcatgcttagtttcctcagatgttctttggcggtcttcctctttccattgattttgtcatgacggttgacttttgttgtcaccttcatcttacggattttagctcgaaccttggtttccacctgtctccataaagtaaagatgtcttccaggacaattttaattccttcctgtctacggcggttggacctcctggctctctgctgtacatccgtggatccatcatgtccattttgagacgggaagatagtcttcag

SEQ ID NO: 87714 - DNA, 4104 bp, Homo sapiens
gttgaatggtcaggaagtggaattgccttttttccatccttcggggaagctggaaatttatcgaaacaaaaacagtacgacagtggagtccaagggcgtggtgactgtccagtactcagacataggtctattgtacatccggctgtccaccacatacttcaattgcacagggggcttgtgcggcttctacaatgccaacgccagtgacgagttctgtctccccaacggcaagtgcacggacaacctggcagtgttcctggaaagctggacaactttcgaggagatctgcaatggagagtgtggggacctgctgaaggcctgcaacaatgactcggagctgctcaagttttatcgaagccgctccaggtgcggcatcatcaacgacccctccaacagctccttcctggagtgccatggggtggtgaacgccactgcctactaccgcacctgccttttccgcctgtgccagagtgggggcaatgagtcagagctctgtgactctgtggcccggtatgcaagcgcctgcaagaatgcggacgtggaggtggggccctggcggacctatgacttctgcccactggagtgcccagagaacagccactttgaggagtgcatcacatgtacagagacctgtgagacccttaccctgggccccatctgcgtggatagctgctctgagggatgtcagtgtgatgagggctatgctctactgggcagccagtgtgtcacgcggagtgagtgtggctgcaactttgaggggcaccaacttgccaccaatgagaccttctgggtggacctggactgccagatcttctgctattgcagtggcacagacaacagggtccactgcgagaccattccctgcaaggatgatgagtactgcatggaggaaggtggcctgtactactgccaagcccgcaccgacgcctcctgcatcgtctcaggctacggccactacctcacctttgatggcttcccctttgacttccagaccagctgcccactcatcctgtgcaccacaggaagcaggccaagctcagactctttccccaagtttgttgtcacagccaagaatgaggaccgggacccgtcactggccttgtgggttaagcaggtggacgtgaccgtgtttggctacagcatcgtgatccaccgagcttacaagcacactgtgctggtcaacagtgaacggctctatctgcccctgaagctggggcaagggaagataaatatcttttcctttggcttccacgtggtggtggaaactgattttggcctgaaggttgtatatgactggaagaccttcctgtccatcacagtccctcggagcatgcagaacagcacctatggtctgtgtggccgctacaacggcaaccctgatgatgacctggagatgcccatgggtctgcttgcatcgagtgtcaatgagtttgggcagagctgggtgaagagggacaccttctgccaggtgggctgtggggaccgctgtccgtcctgtgccaaggtggaaggtttctccaaagtgcagcagctgtgcagcctgatccccaaccagaacgctgccttctccaagtgtcacagcaaagttaaccccaccttcttctataagaactgcctgtttgactcttgcatcgatgggggcgcggtgcagaccgcctgcagctggctgcagaactacgccagcacctgccagactcaggggattacggtgactggctggaggaattacacgtcctgcactgtcacctgccctccaaacagccattacgagagctgcgtgagtgtctgccagccccgctgcgccgccatccgcctgaagagtgactgcagccactactgcgtggagggctgtcactgcgacgctggctacgtcctcaacggcaagagctgcatcctgccccacagctgcggctgctactccgatggcaaatattacgagcccaagcagctattttggaacagcgactgcacgcggcgctgccgctgtttccgtcgcaacgtgattcagtgcgacccgcgccaatgcaagtcagacgaggagtgtgcgctgcgcaacggggtgcgcggctgcttcagcaccaagacctcctactgcctggcggccggcggcggcgtcttccgcaccttcgacggcgccttcctgcgcttcccagccaactgcgccttcgtgctgtccaccatctgccagaaactgcccgacatctccttccagcttatcatcaacttcgacaagtggtcggcccccaacctcaccatcatttcgcccgtctacttctacattaacgaagagcagattctcatcaacgaccggaacacggtcaaggtgaatggcacacaagtgaatgttccatttataactggtttggcaaccaaaatctacagcagtgaggggtttctggtgattgacaccagcccagacatccagatatactacaatggtttcaacgtcattaaaatcagcatcagcgagaggctgcagaacaaagtgtgcggtctctgtggcaacttcaacggggacctaacagatgattatgtgaccttgcgagggaagccggtggtaagcagcgtggtgctggcccagagctggaaaaccaatggcatgcagaagagacctcttgcccccagctgcaacgagctgcagttctcacagtatgcagccatgtgtgacaatgtgcacatccagaagatgcagggtgatggctactgcctgaagctcaccgacatgaagggcttcttccagccctgctatgggcttctcgatcccctcccattctacgagtcctgctacctggacggctgctacaaccacaagaagttccagctgtgcggctccctggccgcctacggggaggcctgccgctccttcgggatccttagcaccgagtggattgagaaggagaattgctcaggagtggttgaagatccctgtgtgggggcggactgtcccaaccgaacttgcgagctgggcaatggcagggagctgtgtggctgcatcgagccacccccctatggaaataactcacatgacattatcgatgcagaggtgacctgcaaagcagcccaaatggaagtgtccatatctaagtgcaagctcttccagctcggttttgagagggagggcgtgaggatcaatgacagacagtgcaccggcatcgagggggaagattttatctcctttcagatcaacaacaccaaagggaattgtggaaacattgtgcagtccaatggcacgcatatcatgtataaaaacacactctggatcgaaagcgccaacaacactggcaacatcatcaccagggaccgcacgatcaatgtgggaattttcatgtgcttatgagctggatatcaagatctccttggattctgttgtgaagcctatgctaagtgtaattaacctgacagtttccaacccaagaaggcagcttcatcaccaagatggctctctacaaaaacgcctcctacaaacatccttaccgccagggtgaagtagtgttgacgactcgagatgtgctgtatgtaggggtttttgtggttggagctgacgccacacatttaatcctaacactcaacaaatgctatgccacacccacccgagatagcaatgataagctccgatatttcatcattgaaggagggtgtcagaacctcaaagataacaccattggcatcgaggagaatgcagtctccctgacctgtcgctttcacgtcaccgtctttaaattcataggggattacgacgaagttcaccttcactgtgcagtgtcactctgcgactcagaaaagtactcctgtaaaatcacttgcccacacaattccaggattgccacagattacacaaaagagcccaaagaacagatcatttcagtgggacctattaggagaaaaaggctggactggtgtgaggacaatggagggtgtgagcagatttgcacgagccgggtggatgggcctctctgcagctgtgtaacaggaaccctgcaggaggacggcaagagctgcagagcctctaattcttcaatggaacttcaagtctggacgcttcttctcatcatgatccagatttcattatggcattttgtctataaatcaggcacgacctcataa

SEQ ID NO: 87715 - DNA, 635 bp, Homo sapiens
tttttttttttaaaaacctacagtttttattattagattccatcaatcctaccagaaaggggatcccggcactccataggctcatgggtcacagggaccacaagcaagcatacggtcaacagcttcaagcggcagctctgggtgtgatctgtaggtgcctgagtgggatcctggggcacctgggccgggcccaagacatgcctgaagtgagattcagccagggttctctgaatccagtctgtgtagcttagcacctgggtgtagacaccatggccggaaagcgggggcacagccgaatccccagctcacaatgccggcttggatccacgtatcattgatggggcagaccagcggccccccggagtcaccctggcaggagtctttcttgccctggacagagccagcacagagcatgtcgtcctggatgaggtgctggccagccaggctgggctctcctaggtggtacatcagctcacacatgttcgagttccaggagggcacagccacctcctgaaggacactcgccacgggctggatgtgatgtgggggccagcctgagcccacctcaagcctcgtccccatcaggtgagcctctgccctctcacctgtgatggtggcagcctgcacctcctacc

SEQ ID NO: 87716 - DNA, 3836 bp, Homo sapiens
ttttttttttaactcttaaaaaaaatcattttattgatcctttaccatacaaaatttattcaaattacacccatttgaagtggtaagatcacagctagagaacaggtcaccctgtaacaaatctatttacaaaatccatcataaaagcttttttttgtttttttttacattatattacatattttcttttttaaactagcatacaacacaaagctaaactgattagtagtttgcctactcccaattttgggagaaatacttcctttttacaaaatcacgtaccccgtaggaaaagaaattcccacaccctgacaattgccacccgacttactctgcaagccatcttccttcatatccctccttctcatacacacgagttgtcatgcacacactgaattcttattttctttttcctgaaagcttaagctttaaatactgcaattttatttacagatctacacgtacaacaaaaatgaaaacaagagccacaacaaagaacagaaaaacaaaaacaaaataacactcttaaaaaattacaaagcagctagaaagtattctggcagtgtttacaaattaattgctatttttgtacaaaattgctaaataatgaaaatgtgagtagactacatatcaacttaaataaaacgattgctatgcacaactctgtacatataaacacactcctaacactgtttgacagctcatgtgttgccctttatacattttattttctaaggctcacgcagtcataatttgcacacttgtaacttttagccatttcgtgtgtgagctttaatagcagcaactcaatggtaccaggaaacctgcatacttagtacttaaagtaacgcaaatactgtagtactaacccactttgtgtgccggatactaagtcaaaaagaaaattacttaatgcaaacaaaatacagtatggacatctaattaatgtacaccagttaagcccagtaactggaaaaaaatcttatgcatgaaggaacttttaagacttattagtattcctttcattttaaaaacaataaatacggcattacattatgaaaaaattcaacaaaacacacaacaatctagccaggtgagctcagtctttagactttggaaaaaatcagctttgtgcagctggcaaagagaattacacaaagctggaagcagaggcagctaacccagatgagattaaatatgggaaatggggaaaagcttggcataaatggtttccccataacaggaaaaaacccccacagtgcatttccagtaggcacttaacacaaagctccctctccctcccccaccccaatgcttcatctaggaccacaccgacattttgtaccaagtccagtgtgtgtgaggggaggaggccagggatggaggctgaagaagaaaaaaaaggaagatagtctgcacctttgtttttcttcccaaacatacacccacgcatacccacacaaagagtttaaagtgctggtgtcatctgtcttgaccccaccaccactttgcatattgtggaaatctacctggagtaaactggctggggctcttgtggttttttgtgtgttttttttttttcctaagggatattttcaattcaattaaacatatgagttgagtgcctactatgtgcctaccattgggtcaggcacatagcatttcaatttaactgttcgtttcgaggtttgttctttatctgactccctcattcccgcagtccttagcatccaaggaactggacccggagattactaccgccatatttcccagtgggaggatggccgctgccacctgcccgaggggaaagccattcttggacataactggtagggatttgcagctgacacaaagcctccaacttggggacacccattcctgaagagtaaagcgggagacaccctggcattgttttgcttcattttttacgtccccgacttcccttggtccaacttattccttcatagaggaaggggaacggggtctggccagaactattccagcccccgacacagggctgctccctgttcctgccagcttaaggaaatgccactcacacaatggggatgtctttctccctagaggtctctccatctgaccccatcctgagaagtggtctccctgagtgcggtgtaagagagccctttcccctgtcacaggggcccgggaagcccaaggatggagggacccatgcctgctgctccttggggctgttacatcatctgacctggttctcctttccaatgggccacccatgtcagcaagccccaggactgactcgctccaagctccccctcctgggaatggaagcacgatgggacaaagctccttgcagaggctgataaaccttagatcacacaggtttagatgctctgatcagtagaggttctctccctctgcttaagtaatatgaatttgcaaaaaccgcttcaaagtaaacaattaaattgaaatggtgatgggtgccacaggaatgcttaaatggcagctaaaaaaattaaaagtctagaacaatccacaaagaactaagtaggcatttgctacaaatcaactggaaactcacaaacacattggggacgggggaatgggagtggttcatggagacaggaaaatccacaacagcttagagtggcagaactctactagtcttctgtatctgcaacaagtatatttgaaaacaggttcttcatccagaaggctgtggaggttttcttgacctcctactgggacacacagttcatagcttaaactgaattatgacagtaatttaaatattcctaagaagagctgaagaaatccatttcatacttttgcatgacttcaagtttgcatttgctgcagttccattccatattagcagacctcaaagacatgcattctgcggagaaggcacggcttgaaatgctattaaggaagattgctgtttcccagcaggccaggtggccagaccccattctacagcccatccgtcaggcacagcaagccaatccggggaggaaggaggaaggacaattcggggtgagagacacctgattgcacattttctcacttgctgacttagccaggagatcttggagcctggagcaaagcagggctttcccaagggagcctgcaactgtgcgtttagacaatttgtttattaattttttaaaaaattcattaaaatgtcagctttcttctgaagtttgtagtttacttcatgatactctcttggaggaagaaggtaggaagggacaacactgcatgacagatgttctggttccatgataaaaaaatatcggtttttaaggagagttcacacgaagcataatcaactacacatgaagtcttccaccagtgggagcttttccaaatcgtaagcatcgaagagatcgctgatgccttcctcctccccgaggctcaggagatagtcctcttgcagcaggggaggcagtaagttcacaaacggtccttctaggttggaaggaatttggtcctcagtctgctgtaagaggttggctggggaggccagaggagaaaggtttcccatagaaactgagcaatcgctatgtcctgagttgggttgaagccaagtctttggaagcgggtttagggatattcccattgtggtcttggttgtttgttttcattggactgtgtgtttcagtctcttctggacataagtaaacctcaatgggcccttgggtacttgccaaatgtatttgtaggctctctattgagtcaggcacttcaagtcttgtttctggaggggctttcacaactataacagtttggtctttaaggccactaatttttcgaatatcttgatatgtaacataagctaacctttgattctc

SEQ ID NO: 87717 - DNA, 742 bp, Homo sapiens
  misc_feature (1)...(742): n = a,t,c or g
gggccccagtggctgctcatcctggtgctggaagccctgtgntggngcttgacattcctcctgccagtccctgggtgccctactggttatcttggtcctgggggcattggagattttggcaagtatccaaattgcactggaggagctgcaggctacatcgaccgcctgctgctgggagacgatcacctttaccagcacccatcttctgctgtactttaccacaccgaggtggcctatgaccccgagggcatcctgggcaccatcaactccatcgtgatggcctttttaggagttcaggcaggaaaaatactattgtattacaaggctcggaccaaagacatcctgattcgattcactgcttggtgttgtattcttgggctcatttctgttgctctgacgaaggtttctgaaaatgaaggctttattccagtaaacaaaaatctctggtccctttcgtatgtcactacgctcagttcttttgccttcttcatcctgctggtcctgtaccagttgtggatgtgaaggggctgtggacaggaaccccattcttttatccaggaatgaattccattctggtatacgtcggccacgaggtgtttgagaactacttcccctttcagtggaagctgaaggacaaccagtcccacaaggagcacctgactcagaacatcgtcgccactgccctctgggtgctcattgcctacatcctctatagaaagaagattttttggaaaatctgatg

SEQ ID NO: 87718 - DNA, 460 bp, Homo sapiens
  misc_feature (1)...(460): n = a,t,c or g
cctagtacagtgcggaggaattccaggagcgaccggaaatggccgcactcctccggggtcagcagctctgtcagacggacggctgcgtgagggcccatagcgggcacggcccccgccggagccagcgcccaaacccagagcgccaggaccaaggcgctcgccagagtccgcgccgccatccctggcgggaaccagggaccgaggactgtgcggggacggggacgtggacgggctccgcgccggtgatgggggaggggttccgaacgcccgcggattgtgggagggaggaggctccgaacagtcggcaagcctagtggaggaggggactggggacaagggggctgccaacacccagcgacggagacggggactccgacatggcacttgttggagggtctcacgaaactcaggaactggggtaagagggcttgcaacacccaggaagggggttctcagcccn

SEQ ID NO: 87719 - DNA, 1963 bp, Homo sapiens
ttttttttttttaaattctgcacccagtctggcaaacatttattgactgctttctctgcatagaacaaccggccagcccctggactccagaggcccaccatcattgttaagagacctacatgcatgaaccaatcacacacgtgctatgagaatagagaaaagaaataagtaattctcacagacactgacaaactggaaaaaacttctttcatcccaggtactttatggctgggatcaaaggggtgactcacttgtttgcacaggaaacaaaaggcaaaaggaagtgttggcatcagttttccatctgcacatataacccccattcctccatgaattgcatgagataggtttcattttctcctggtggcctgtctggagccggctcctcatagagtctagatagaagaccctcctctccgagcccatccccctcagaaggctcgcagccctctgaatcctggtcgaagctggacagcgaaggaatacacagcctgccagtttggggatcccagtcgaccagggtcgtcgatggctcttcctccggcccctcctccgagtctgtgtgctcctgcgccagggggtctaagtcttggagctgaggggtgtatgagtactgtaacgtttgcgggcccaagactgccaacgctgcctgcgactccaataatgttccttgtgtggacacctcctcctgcaaactgagctcctgctcttcaggccccgcacaaatgtcagtggttctgacatcatattcatattcaatgactgttttatccgggggtattgttctgctgagggactcttgctgggtgaaagaagtaccttccggtgttttcttcagagtcacaaaaaatttccatcaaatgcgaagcataccctaaatgtttcacctcctcttcctcctgagggggcctcaggttcccgctgggctgaggatcattaaggctggatacatcactgctttttcccagtaaactcatatcctgatgagaaattttagaatcatcccgagatattgagggtgaataaagttaatccacgattttttccagcaggcacaaagaatcttttgtcaaattcatttcccataaatcaaaatcaaatttgcctgggtgtttctctttgcccaacgtggatatatcggtagatggaatagcccatcacagaaaaaagaaacacggtaatagatatgggcaaaacataccagaagatgattttagccttgaactctgatgattgatctttcaaagtcctggcacactgcttctcagaaggctgagcacggcgagggggccctgggacgaaggactccacgtgtacgcagtaaagagtgttcggctccagcccaggtgagcaccagcgtgtggttggtcacacactgggaccacgttctgtttgatttagtattcaacacagacacgttatacttcagattggagtatatttgttgcatggaaacaggaaggtcttctggatttctcttccacttctctggagctgtcaggacaacagaaatggacttctcatctgtagtcagtgccacctctggtgggccaatttgtgtttctaaaaaaggatagaaccgtccactttcagcccatttggaacactttgttccccaaatggccttaactttggcataatactggtgttcgtagtcagaagtttcagcagaaagatcacagtaggttctattgatatttctgcattctgatttattcagccatttcttttgcccatatatgaaatactgcacagtgtaagtaactttaactccttgaagaccctctggtggagtccattgtaggacattcttcatgttgatggataagaaggtgatgtttgcaggtttaggcaaaccaccagagacacagggaactgcccgtccccaaggcgaagacaggagcaacagcagcagcggcggcagcggcagcggccgcagggccgggcggccgggagcccgcat

SEQ ID NO: 87720 - DNA, 967 bp, Homo sapiens
cgcagtgcccagaaggagaagactgcagccaaggagcagcagggggagaagacagaagtcctgagcagtgatgacgatgccccagacagccctgtgatcctggagatcccctccttgccaccctccactccaccctccactcctacctacaagaagtccctccgcctctcctccgatcagatccggcgcctgaacctgcaagaaggtgccaatgatgtggtcttcagcgtgaccactcagtaccagggcacctgccgctgcaaggccaccatctacctgtggaaatgggacgacaaggtggtcatctctgacatcgacggcaccatcaccaagtcagaatgctttgggccatatcctgccccagctggggaaagactggacacaccagggcatcaccagtctctatcacaaaatccaactaaatgggtacaagttcctgtactgctcggcgcgggccattggcatggcggacctcaccaaggggtacctgcagtggagaggtgatcgagaagaaaccagaggtgttcaaggtcgcctgcctgagtgacatccagcagctgtttttgccccacggacagcccttctatgctgcctttgggaataggcccaatgatgtctttgcctaccggcaggtgggcctgcctgagtcacgcatcttcacagtcaacccccggggagagctcatccaggagctcataaagaaccacaaatccacgtatgagcggcttggtgaagtggtcgagctcctcttcccacctgtggcccgtggccccagcacagacctggccaaccctgaatacagtaacttctgctactggcgggagccactgcctgctgtggaccttgataccctggactgaacctgccctggctggctcctcctccctggcccggcccaggactggctaggctgtgggttcggcttggcctgctccccgtccggctgctggcgctgcctctctacaga

SEQ ID NO: 87721 - DNA, 818 bp, Homo sapiens
  misc_feature (1)...(818): n = a,t,c or g
ttttttttgcatgtaaatgaaaaatttttaatactttccgaacaatctgggtaacaggaaatgaaatgtatttgaatgtctcttctaagtgctgaaggtattttcaaatccaagttcaactatgaggctggcatctggacatttgtttcccagagctggttttagattcttggttctgcaactgaacggttatgaaacttggagaaacaaagaaaatatgcctttcatcgctccggggctcgattttttccatgtgaagcatggtaaaatactctttctgaagcctgtttttgctctaacaccccccgatttgattagtgctttagctctctgccttttgttttcctatttatataaaaagaattttatatcctttggcctcccaggatcaattagtcaatggatccattagtgaagaactttcaaccttgaagtgctaagtagttctgttattggcttgtagagcaagctgatcttggctgcatgtgatgtaaaactgctgcgacttctaaaatcgttggtgagtctttaagagaacaagattacttattgaatccaaaaggccactctgtctcagcactctggcctgtggggttgaagataggcaggtgtttgggaagggaatgtttgggaaggaggtgttgtggaaggaggtgttggggaagggggaagcaggtgttgggaaggaggtgttggggaaggaggtgtttgggccaggggtttgggaaggaggtgttgaaaaggcgaaaatgggaaggaggtgtctgggaaggaggtgttgggaaagaggtgttaattccaccgantgtactagtgtc

SEQ ID NO: 87722 - DNA, 957 bp, Homo sapiens
cgtacagtgcggtggaattcgtggaacaagcctcggggatctcagactggtggaatcctgccctgcggaaacgcatgctgagtgacagtgggctggggatgatagctccctattatgaggactcagatctgaaagatctcagccactcccgcgtgctacagtcaccagtctcttcagaggatcatgcaattttgcaggcagtaatagctggtgatcttatgaagctaatagaaagctataaaaatggaggcagtctgctaattcagggaccagaccactgttcactccttcactacgcagctgaaaccggcaacggggagattgtgaaatatatccttgaccacggaccttccgagttattggatatggcagacagtgaaacgggtgagactgcactgcacaaggctgcctgccagcggaaccgggctgtgtgccagcttctggtggatgcaggagcatctctgaggaaagacggactccaagggtaagacacctcaagaaagagcacagcaggcctggggacccagacttggctgcgttaccatagaaagccgtcagaactataaggtcattggccatgaggacctggaaactgctgtttgaccctggtattcgggcaaaagaggacatgagcaagcgtatcacatctgccctccctgcaattgggcagctcccctggaagaagctgatggaattcatatatctgtctctctcctgcaagattctacctgagaccatgccactagcttttaagggctaccaagatgtacaacagaacatgatagcccattgagaaggaggcaggatacctggagatttgtggaatacagtacgagttccacaaaatttgatccttattgcttccagcaagtagcatgaacttctgtgttcacctgtataatttattttaaagattcaaaggatgttcgtataaatggcactgctccatcctccaaa

SEQ ID NO: 87723 - DNA, 416 bp, Homo sapiens
cggagaaacgcgcttccgacacgagctgacccatcccagccaccgcctcccgcagcatgttgagaagcctgcccagggcaccccatgcggggagcgctccctcccagtggacagcacgcaggctcgccggtgccagcacagccgggaggggccggcctcttggagagaaggccgcggggcctccagcagtgtgcactcgggacagaaaccaggctcgcgcctgccccaggaggggaacagccaccaggaaggggacacggaggcgctgcagcatggcgcagaggggccctgctcctgctcggagtgtggcgagcgctcccctatgagcgccaggctcgccagcccctgcagggcgcatactggagaaaagcccttccagtgtgcgcattgcaccaagcgcttccgcctgcgccgcg

SEQ ID NO: 87724 - DNA, 435 bp, Homo sapiens
  misc_feature (1)...(435): n = a,t,c or g
ggggcagcgcaaagccngtnggatttncgcaatcccacctccaccttgtgctggctggggccgaggtgaggaggctctgttttctcagtgaagatttcctgtaaggcttgggggggcagcttcactagtcatattgtgacctgggtgcgccaggcccccggccaaaggcctgagtggatggggtttatcaacgctggcgttggtaatacaaaatattcagactatttccagggcagagtcaccattagcagggacacatccgcgagcacagtctacatggagctgagccgcctgggaactgaggacacggctgtctactactgtgcgagagtgaattatgatcatcaattggatacacggggctacttatacgcttggggccagggaaccctggtcaccgtctcgtcagcatccccgaccagccccaaggtcttg

SEQ ID NO: 87725 - DNA, 604 bp, Homo sapiens
tctcaaggaacttggtggagtagagggaggtcgctgagggccaccctcacccgccgtgctgtgtgccaagcccaggagcagccggaactctagcatcggtcagtggggtggaggggccaggcaggcagagggggatctctgggacgccgactgcacgaaacccctgctggaccattcttacggtgagagctggagcatgggccaccctgggggactctgccacaccttatgcaatctaggtcccatgagggcccacagtctcaccccctgggggaggctctgtcccctcatgggaatttttttcccaaggggatccttagccccattctctgatggaaatcccacccctttatgggtattttgtcccgggaggagcttcagcccaggcagtcctctagtggtaactcttgggcctggtgaaaattccatcccaggaggatcctgagccctgccccagtggagactccacctgcctaaggacattctctcctaggaagatctcagtcatgtcccaggtggaaacctcctcggtgtgaaacttttgccccttaagcctctagcaggaagagacagagcctgcccctgggatgacatttgagtgagg

SEQ ID NO: 87726 - DNA, 867 bp, Homo sapiens
attctatcccggtccacagtttaggaaccatggacaaaagtccaaggaccagaggcatggagttttcattagaaggttctgaattcatctaatggctggttatttttacagatgccaagtttacaaaacatacaagtgcacagacaggtgtgggaggtagctcgaaacatacagagtgttcgcaacactagagacgtcttctggctgccatcaggggactcggaggtagggtaggcttggtgaggcccgtggcttgtgtccgtggcacagcctcctgcaaaggggctgccctgctcccctgttcccatggtgccaggccgtgctccccaggtgcctccggggtgctgaagatcttttcatagtactcgatcagcagttcagtgaacatgttcaggggcacaagggcactcagggaggagaccccctgggatggccagatcaaattcagcccgaagacacaggccaggttagagctgttcattttgttgaagatgctctcccgggacaccgcatgcaggaaggtagaaaataagtgagaaacacagaattttagtgctggaaactttagaaattgtattcaggagttgcaaactaagtgtcttaaagggttgggtgggtaggcaggtaatgtaaaagtagatgaagctggtggttaactacagttgctgagttctgtgaagcagtcagaacaatctagattatgctgcagtaacaaacaacttccaaaccttagggacttagactatgacatgccattgtaggtcaacaagaaaagtggctccatgtctccttactcccatatccagactgatgaaacggtccctattcataatgcttactgttgctggaattccaccacgctggact

SEQ ID NO: 87727 - DNA, 2685 bp, Homo sapiens; identical to SEQ ID NO: 87518

SEQ ID NO: 87728 - DNA, 1969 bp, Homo sapiens; identical to SEQ ID NO: 65332

SEQ ID NO: 87729 - DNA, 1132 bp, Homo sapiens
ggaggctcgccctaccctgcctcgccgctgctgggccgccccctctactacacgtcgcccttctacggcaactacacaaactacgggaacttgaacgcggcgctgcagggccagggtctcctgcggtacaactctgcggctgcggcccccggcgaggccctgcactaccgcgccaaaggcggccagcgacgcgggcaaggcgggcgcgcacccgctcgagtcccactaccggtccccgggcggcgggctacgagcccaagaaagatgccagcgagggctgcaccgtggttggcgggggcgtccagccctacctatagaagggccgagcacagcaatgcaagtaagtgggcaccctggtgcttcccagaccctgtggagcctcccagcaccaacttgcttaatgtgtttttcttgcttctggtcatggggttagaagacagagcatttcaatcttgtccagcttttctttccttaagggggaaactatattttctgttttatagattccctctttttggcacaagttctatcactcctttacctagggaaggaaaaaaaaaatatatatatatatgtgtgtgtgtgtgtgtgaatatatatatgatatatatatatatatagtacatgtatatatatagtacatgtgtatatatatattacacactactgttgttttcttttggaaccaatagattattaaaatctgggcatttatatgcaatttagagccatttttactatgctagacacataatagacacatgctttgatgagcttgggctaccaaaacttggagtagcaaaaacctttatagatgatgtttgcaaaataagactgaagagacacgaggcgtactagtcttttatcaaccctgtccaacctcccctccacccatgtccaagtggacaggactctgacattctcccggggctcacaacagtatctcaaaaaatatgttgctttgcaacgagtcagaattactaatcatagatcttgaagataagaaagatttggaaccacttcagatcaactcgtttttataatggtgttgttgtggaactgaaagattggggatgatttggttttttccttggtccacaggtagatgtcacaattgctttgaaaaaaaaaa

SEQ ID NO: 87730 - DNA, 922 bp, Homo sapiens
atggggggtctaaggccctggtcccgatacgggctcctggttgtggcccacttgctggccctggggcttggggctgtggtgttccaggccctggaggggcctcctgcatgcaggcttcaggctgagctcagggcagagctggcagccttccaggcagagcatagggcctgcctgccacccggagctctggaagagctgctgggcactgccctggccacccaggcccatggggtctccaccctgggcaacagctcagagggcaggacctgggaccttccctcagccctgctcttcgctgccagcatcctcaccaccacaggttatggccacatggccccactatcgccaggcggaaaggccttctgcatggtctatgcagccctggggctgcccagcctccttagctctcgtggccaccctgcgccattgcctgctgcctgtgctcagccgcccacgtgcctgggtagcggtccactggcagctgtcaccggccagggctgcgctgctgcaggcagttgcactgggactgctggtggccagcagctttgtgctgctgccagcgctggtgctgtggggccttcagggcgactgcagcctgctgggggccgtctacttctgcttcagctcgctcagcaccattggcctggaggacttgctgcccggccgcggccgcagcctgcaccccgtgatttaccacctgggccagctcgcacttcttggttacttgcttctaggactcttggccatgctgctggcagtggagaccttctctgagctgccgcaggtccgtgccatggggaagttcttcagacccagtggtcctgtgactgctgaggaccaaggtggcatcctagggcaggatgaactggctctgagcaccctgccgcccgcggccccagcttcaggacaagcccctgcttgc

SEQ ID NO: 87731 - DNA, 2619 bp, Homo sapiens
cggccgcccttttttgttggttttttatgggttcaaagcctttattgggtcagggcttgctccagagctcaggggccaggtaggtcaggagccttgggatggctgcagggggagggaggccgggcagcctgcggagggcctggggagacctggggctgggcgggggccggggctacggggaccccgtgggaggagctggagaggtgcaggcccagggcgtcgtccgagtgagcagcggtgctggccgtgtgggacccgggcccgcttagcaccatggacggggtgggctcacgaccctcgactgcggggcccgggcggcggcgctagcagatccagcggatgaagcggtcgaagaagccgggttgcgccaggctgtcatagtccttctcgtggaacacggcggcgcggtcacccaggctgagcgtggtgagcacgtccatgtccacgtcgctgcccaaggccagcacggtgggtaccacgttctgcttgcgcatggagtgcgccgactcgtgcagactgtcgttgcccgtgacgccgtccgtgaggaacacgaaggacagctctgcgtgcctccgggccccgccacgcgggctgcgcacgatggcattgatggcgtgcaccacgcctgcgcccacgtgcgagaaggagttcaggtattgtgtggtctccagcgcctcgtggatggccgtgaggttgtggctcagcgggaaggccacctgctgctcgccggggccaccaaactgcagcagcgccacgcgtgcgttgagagggtcgtcgtccctccgggccagcgtcagccgccgcgccacctgctccacgaagcgccgggccttgtggaagttctgctcacccagccgctcggagccgtccagcaggaagacgatgtccacgggccgctgcgtgcactgtgccacggacagctctgtttggcagggaaggtctgggcacacgatctgagggtccgggcagaggacgtcctccatgtcatcgatgaacttctcagcgaccaggtcggagaacagcgtcatgttgcgcacctgctgtggcttgtcgcaggcgatggagtagaggttttcactctcgtgcttctcgtggaacatgtccccgatgccgatggccgtcactgtgacgtcgcggtcgcacagcgcccgcaagttgaggtcatcgtcccgagggtcgtggcgcccgtccgtgatgaccaccgcaaacacacgtgtcttctggcgccggctctccttgatgaggcggtcgtaggcaaacttgagggctgagggtgtccaggtgccgcccgcaatccactcgaggttcttgacagcctccttgaagctcgacagggagtcgatacgttcgtcgtccagctggatggcctcaaaggtgccctcgtggctgtactgcaccacgcccacacgcgtccctgtctcggacttggggtccttagcgatggcacccagcctgttgaccacgttgatgacgaagttcttctccagtgtgaagttggtgtacccaatgctctcggagctgtcgatgacgaagaccacgtccagggcgccacagcgcttctcacagtcgcagcacccgcaggtctccctcacgtaggtcatgacgtcacactccgtgagaccggggtctccaggggggccgggctcaccctcgggtcctgggactcctcttggcccccgagggcctggctcaccagggggaccaggatccgcaggctctcctttctctcctttcctcccaggttctcctttcaagccaaagtcgcctcggcctccctcggggccgcgtgggccgggctcgcctttttctccgggtgctcctcggggtcctgggtagctgaatccaggcctgccggggtctcccttggggcctggctgtcctgagtctccacggggtcctgcatcaccggggtctccccgagatccctgctttccgggctccccaagagctccctgggggcctctgggtccaggcaagcctcggtctcccttggctcctttgttgccaacctctccagccaggccgcggggcccctcagggccagggtcccccttctcccccttggggccatcgctgcctgggctgcccttggtgccggggtctcccctgcgccccggctcgcctttgggtccgcggggcccaggcccgcccttggctcctttcacaccaggacttcctggggctccattgttgccttgataccccttgcttcccttggccccgatttctcccgggggccctctgcgtcctcgggggccaggggtcccccttgccgccttggtctcctcgctcccctggactccctgcttcccccgggtaaccgtcggggccccggtttccagggtctcccttgcagccaggaggtccgatgcgccccagcttgcccttctgtccatcggtcccgttcttgccagccaggccaggggcccccttgcgaccgtcggctccaaattcacccttctctcctttgaagccaggaacgcccttggggcctgggaatccaatggggccctcgatgccccggtctccctgtcttcccttctggccaggctctcccggctcacccatgttgcccttggcacccttctgtccacggtagcccttgggcccagagggccc

SEQ ID NO: 87732 - DNA, 2423 bp, Homo sapiens
gattctgcttcaggaaaaaaggaattgtctacttatgcagctggaagaagccacccgcttaacatcctacctccagtcccagttaaaaagcctgtgtgccagcaccctgacggtgtcctcggggagcagccgcgggtccctagcctccagccgtgggtctctggcctccagccggggctccctgagctcggtcagcttcacggacatctacggcctcccgcagtacgagaagcccgacgctgagggcagccagcttctacgcttcgacctcattcccttcgactctctggggcgagatgctcccttttcagagcccccaggcccctcgggcttccacaagcagaggcggtccctggacacgccccagtccctggcatcgctgtcctcccgctcctcgctgtcctcgctgtcgcccccaagctcgcccctggacacgcccttcctccctgcctcacgggactcgccgctggcgcagctggcggacagctgtgaggggccaggcctgggcgccctagacagactgcgggcacacgcctcggctatgggggacgaagacttaccaggcatggcggcccttcagccacacggggtccccggggatggggaagggccgcacgagcgaggacccccaccagccagcgctcccgtgggtggaacagtgactcttcgagaagacagtgccaagaggttggagaggagggcacgccgcatctccgcatgtctgtcggattattcgctagccagcgacagtggggtgtttgaacctctaaccaagaggaacgaagatgccgaggagcctgcctacggagacacggccagtaacggagatccccagatccacgtgggactcctgcgcgacagtggcagcgagtgtctcctcgtgcacgtgctgcagctgaagaacccggcggggctggcggtgaaggaagactgcaaagtccacatccgagtctatttgcccccactggactcgggcacgcccaacacttactgctccaaggctctggagttccaagtgccgctggtgtttaacgaagtgttcagaatccccgtgcattccagcgcgttgacactgaagtcacttcagttatacgtgtgttcagtgactccgcagctgcaggaagaactgctgggcattgctcagattaacctggctgactatgacagtttgagtgagatgcagctgcgctggcattccgtgcaggtgttcaccagctctgaaccatcaaggacgcgggaggctgggtgtgcaggagagagctccgcccgggaccctgcacacaccatctccatctccggcaagacggatgcggtgacggtgctcctggccagaaccacggcacagctgcaggcggtggagagggaactggccgaggagcgggccaagctggagtacacggaggaggaggtcctggagatggagcgcaaggaggagcaggccgaggccatatccgagcggagttggcaagcggactcggtggatagcggctgtagcaactgcacccagaccagccctccgtacccagagccctgttgcatgggtatcgactccatcctgggccacccatttgctgctcaggcagggccttacagccccgagaaatttcagccctcgcctcttaaggttgataaggaaaccaacacggaagatctctttctggaagaagcagccagcctcgtgaaggagcggcccagccgccgggcccgagggtcgccttttgttcggagtggcacgattgtccgttcccagacattctcgcctggagcacgaagccagtatgtttgcagactttatcgtagtgacagcgacagttcaacgctgccccggaagtccccctttgtccgaaatactttggaaagacgaacccttcgctataagcagtcatgcaggtcttccctggctgagctcatggcccgcacctccctggacttggagctggatctccaggcgtcgagaacacggcagaggcagctgaatgaggagctctgcgccctccgtgagctgcggcagcggttggaggacgcccagctccgtggccagactgacctcccaccctgggtgcttcgggacgagcggctccgtggcctgctgcgggaggccgagcggcagacaagacagaccaaacttgactaccgtcatgagcaggcggctgagaagatgctgaagaaggcctccaaggagatctaccagctgcgtgggcagagccacaaagagcccatccaagtgcagacctttagggagaagatagcattcttcacaaggccaaggatcaacatacctcctctcccagccgacgacgtctgatggagtgcattgtgcacatgaagtatttatccacctgttttattttcatgaagttcttagactagctgaatttgtctttaaaatatttgtgcaaagctattaatatacacattttgta

SEQ ID NO: 87733 - DNA, 891 bp, Homo sapiens
ttttttttttttgctctattaacttctttataggcacacggggagttacaggctgaggacaaatggggacttcacactacattatcttcctttgttcaaatagctttttcagggggagtgagtgcactctatatgatggaggaagaggacattggtgcctgtggggtacttcagcaaccaggcttggtaaagcacatactcctctgtaacaacagcccccgcataacaaaatctgggtttgaaaaataccagcctgcacgtgtcccaaataaggaagacgcagtggttttcctttcccagtaacagtggggtcatgggccccatgcattttgtcccctgaagctcgcagtgcaggccggggcacatcaggccattctcagtaagattggtcaagggaacagacaaaaaggcactgttgcagccgtcgctcgttgcagcagaaggagctggttaccatgtggtccttggggcccatggtggtggatataacgccggagtagcagtcctgatgacctgatgcagcccttgtaggtgtgcaccaactccttgccctcagacaaaaaggcactgttgcagccgtcgctctggcagcagaaggagctggttaccatgtggtccttggggcccatggtggtggatataacgccggagtagcagtcctgggacctgatgcagcccttgtaggtgtgcaccaactccttgccctctgtgggatggggacaggcagggacagtgctggctgaccactccctggcttcaacccctgcctcaaggtcttgcctaaccctaggcctccccaaccccacaacttcctgggatggtctcagcctgctggatgtggtcccttccaccccaccccaccccacccacggccacccctctctccctgtc

SEQ ID NO: 87734 - DNA, 3429 bp, Homo sapiens
tttttttttgacaagtaatattttttattattgaaaaatacacaaaggtgaaaggttgctgagcagctgattttccatagtacaacagagtattataagaaagagggaaatgtatctgttatatatggcagtttacatttctaaggcatttaggcttaagagcactaggtcttgcacagctaggtgcattgtcttgagtttaaatatactgaggcacaccaggcaggcaaaggattcaaaactatacattaaaaccttgttcatgcattggtgtcttaggattttattccctaccctccttattcatttttttcccacaatggggttttggagttgttcatagaacactggaaataatccgactcttcaagagtttgtttacaatgacaacacccaatgggacacaccaaacagaactacttcacagatacattctggtctcttaccaaaatgaagctcccagtaagaaaaacactggatttgcaaaggcacagtggagacaggtttaatgcattaaatataacatgaatcattcacaataacaagtttcgtgtttcagggaacttttgttaatacaacacagttggtcacacaaaatacaaatgcttctgttgatttgtcttggcaactcagatacatcaacagtgctaacagtttaacagctttgttctcatctgacagaaaataatggcagttctgcaaggcaaatgttaaacctgaccgtatgtatttattagttccacagtgttttgacagattataggagatggaactcagaggatgctgacacgctcaccgagggctttcatttctgtttcttcagtctcaggagtgtcactgtggctagcacttggattgatcaggtgtgtggggtactgcagcccctgctcgcctgcatacttctcccacctcaggtcatcactttcatgggtgatgtagcgctccccgattttgcattccagctctcgcaaatctaaccaggtctgatagtcctgtagccaagggtggctcaaggtcttatccacactgtagcgctttctcatttttacttgcagcaaattgttgataagatcaatggcttcatgagatatttccttccagggatttggtggatacatgaaagctgcattctgaatttggtcgtgtatgtcttcatcttcattaaatgggaatgtgccgcttaggcttacatagatgatgaccccaacagaccacatgtctagagagcgattgtagcccttgttccttaggacctcaggagccaggtaagcgggggtacccaccactgacctccggaaagacttctctccaatgatccgggcaaaaccaaaatcacaaagtttcacctgaggaaaaggatcagctgaggctagcaacacattttctggtttgaggtcacagtgaacgatatttttaaaatgaaggtgccgcaaagccacgagtatctgagtaattaaaaacttcgttatgtgctctggcaacctgcccttttcacttgacaagatcatttccagcatgtctccatggagtttttccataacaacaaacactctttcaggcgtctcaaacatacactccaaatttacaacaccagggtgatgaaggttctgtagaattgcaacctcattacgaagctggctttcttgttttgttggaaatcgtaatttgtcaatgattttaatagctacatctcttcctgttttacgatgttttcctccataaacaattccaaactgtccagaacccagtacttcatcaggaaaaatctgatatactgtgctgatgtccacattttcttgaatctggcaatttgatactgaaatactcacagagatatctctgtgcaagttggttcctgtacccacggaggagcccttgggaatgacgggcataagggcatgctggatggctatctcccacatcctggccacatctgcaccaacgccactggtgagaacactgttatttggtgatgggctggaaggattgaccacattttctcccacataatacactacatttgccgtagtgatttcgaaacaatgaggattggccccattaggaattaaagctgaagtttttactggttccagagacaaaatttcagataaaggaatttccttgtagtacctgcttcctgtgtcattctgaaagagggtaatacatttgctatccaatctccaatagtgccgtttccgcagcgtgtccttgctggtgtagtggaccatccatccttctttcatgactgtgctgcttttcctcttcgtgtgtttgacagactgcactaccctcatgagtgggatattgttgcttgttgatggactgatggttctgttggcgtcctcgtggtctgggtctggatcttgcatctcgccactgtcgttctggcactctgccattgccatctctgcatcttggaccattgcttcttccatatcatccatgagcccactgttcctttcactatcattgtcatcactcccttcttccatgaccacatcagactctgccccagggctaagcaaatctccattaatggtcacttcgccaaggcagttgtttggtactttcggtgcacaacgtttatggcagttgaatctgcaatctttgcactgcaagccctgcctgaaaagccccttcagaagcttcttgcagtactggcacactgtgggccgggtgtaggagtggatgacaaatgtgtgcggcactttaactttagacatcaaaatcttgtcaaggtgaattggtcgtccaatgtatgattgagaatttgacctcttctctcgaccaataaacgactctgatggtgatttttgcagaaggggctcatcaggggcacttgtagagagttcagcagatgatgtgcggatggtgctgaccccagtgagggaaacgtttgagagccttctccgcctcacaccgctgcaattgttgggtattttaaatgcacatctcttatggtaattcagaccacacccttcacatttaagcccttgacggtacaagcccccacagcatttctccacagtgatcacagaaagctggagctctgtatgaatgaacaaagagagcgtggggacgaatctgaaagtcttcaaaggtggcggaagctgacaagaccacttcaataagatcgccttcctggatatcactggccgctttcaccagctgaaggatgttttcagaggtagggtcatggcgaaaaagcaggatcttatcatacattccgtagaaaccacattcagggaacttctggtcgacaatggagcaagccatctcgcggacgtgcgccaggctgtagtccccggacgagtcctgcagcagcagcaccggctcacggctcaggccgatctgcagatggaacgagatgcccccgaccggggccgcgacaggagccaagaacggcgcgggcccgggcccggaccctgg

SEQ ID NO: 87735 - DNA, 746 bp, Homo sapiens
gcggccgcggagtggcctaccggggaccctcccccagaggtaccggcccggggcgggtgagatgaacggcttcaagcacggaggaaggacagccggggaggggccccccgcggcccaagctgcggcggccccgggctacggccaagagctgctgcctcaatcgaggacggcgagcgctgcgtccggcccgcgggcaacgcctccttcagcaagaggggtcaggaagagcatctcgcagaagaaactcaagctggacatcgacaagagcgtaaggcacctatatatctgtgattttcacaaaaatttcatccagagtgtccgaaataaaaggaagaggaagacaagtgacgatggcggagattctcccgagcacgacactgacattcctgaggttgatctgttccagctgcaggtgaacaccctacgacgttataaacgacactacaagttgcagaccagaccaggcttcaataaggcccagttagcagaaactgtgagtcgacacttcaggaacatacctgtgaatgaaaaagagacccttgcctacttcatctacatggtgaagagtaacaagagtagactggaccagaaatcggagggtggcaagcagcttgagtgaggatgaagcacatcttaaaggaatgaagtgtaatgcttgatgcacaggtgatatctactacatttaagcccataaagactgttaaatattattgtaaataaaaaagtttgaatgatgaaaaaaaaaa

SEQ ID NO: 87736 - DNA, 6115 bp, Homo sapiens
ggcgcggtcgaggcccggaggcggcggcgcaggaggaagcggaggaggtcgggcgctcggggcccgggaggcgggccgcgcagcgccgcagccccgggctcgccatgctcctggcctcggccgtggtggtctgggaatggctgaacgagcacggccgctggcgtccctacagcccagcggtgagccaccacatcgaggcggtggtccgcgccggcccccgcgcggggggcagcgtggtgctgggccaggtggacagccgtctcgcgccctacatcatcgacctgcagtccatgaaccagttccgccaagacacgggaactctccgcccagttcgccgcaactactacgacccctcctcggcccctgggaagggcgtggtgtgggagtgggagaacgacaatggctcctggacgccctacgacatggaagtgggcatcaccatccagcatgcctatgagaagcagcacccctggatcgacctcacttccattggctttagctacgtaattgacttcaacaccatgggccagatcaaccgtcagacccagcgccaacgccgcgtccgccggcgcctcgacctcatctaccccatggtcacagggaccttgcctaaggctcagtcctggccagtcagccctgggccagccacctcgccccccatgtccccctgctcctgtccccagtgtgtcttggtgatgagtgttaaggcagccgtggtcaatggcagcactgggcccctacagctgccagtgacccgcaagaacatgccgcctcctggagtggtcaagctacccccactgccaggctctggggccaagccactggacagcacaggcaccattcgaggcccactgaagaccgccccatcgcaggtgatccggagacaagcctccagcatgcccactgggacaaccatgggctctcctgccagtcccccaggaccccaacagcaagaccggaagggtcggccctggccaccttgaatcgtaccaacctgcagcgactggccattgcccagtcccgggtgctgatcgcctctggggtccccacagtcccagtgaagaacctaaatgggtccagtcctgtcaaccctgccttggcaggaatcactgggatcctcatgagtgcagcggggctgcctgtgtgtctcaccaggccaccaaagctggtcctacacccaccccccgtcagcaagagtgaaataaaatccatcccaggggtttccaacacaagccgcaagaccaccaaaaaacaagccaagaaaggtaaaaccccagaggaagtgctaaaaaaatatctacagaaagtccggcacccaccagatgaggactgcaccatctgtatggaacgcctcacggccccctcaggctacaagggcccgcagcctacggtaaaacctgacctggtagggaagctgtccagatgcggccacgtctaccacatctactgcttggttgccatgtacaacaatgggaacaaggatggaagtttgcagtgtccaacctgcaagaccatttatggggtgaagacaggcacccaacctccagggaagatggagtaccacctcatcccccactccttgcctggccacccagactgcaaaaccatccggatcatctacagcatcccccccggcattcagggaccggaacacccgaatcctgggaagagtttcagcgcccgaggcttcccacgacactgttaccttccggacagcgagaaagggagaaaagttctgaagctgctgctcgtggcctgggatcgccgcctcatttttgccattggcacctccagcaccacaggcgagtcagacaccgtcatctggaatgaggtccaccacaagacagagtttggctctaatctcactggccatggctacccagatgccaattacctggataatgtgctggctgaactggctgcccagggcatctctgaggacagcactgcccaggagaaggactgaggccagaaaagctttgaggtgggaggggccatggagactgcaggacaggaagtgaggagagtgagtcaatgtagaagaagttggtgtcctgccctcccaactttctatcctcccctcctgccctgtgtccatccctcatccctcccaaccacagtgggagccagactgaatatagcgacatcattcataaatctcatccaacacaaagggagatgggatgagggccatcctgggtctgttcccatggagtttttggtgctgggtaggcaggaatcccctccctaccccacctcccaagtaggggcatggtcagcacaccgtagggtatgggcagtgcttaggcactccatatcctggctttgggaagccggggtttcttgcctcagccggcttcttgctacttccactctgctttgagactggagtttctgctattctccctctgctggaggcagggagctctcactgtgcaaggttggggggtgggcaaaggggtgaatcactaaactgctgtgacatcagaaactgatgccttggtgtagagcaaggaagcacttcttcccaagagggtcggagaaggaaaagcctctgggagcacattctgctgtcatcacagtccttggcttctctgggccctcctctcctcctcacagctctcacctgtccaaagaggcatctggttctctcatgtggatggatggactctggggttcctctttggagtggcatcccatgatgctgtttctagaccctctctgatcaaaccagagcctgcatcccactgagcatctgaactgtcctcagggagaggagcccacagccttcttcccaactcattctagaccagctcaaagattccatgagtttcatcgagtcactgtgagtgggagcccatgctgggctctgtgccctctgtgtctgtgcatgcgcgtgtgtgtgtgggcgtgtgtgcattgctgggccagcttgaagggaaggcccgtcatgtccctgcactctgttttgcaagatgccaaaccccagttctgatggggctccaacagccaggctgtggtcctttgacgttcctcacctgttgccaacctatcccgtagtgaactgaaaccccaatgaagacagaactgtgcctgggggagatgcaatgaggtgagggctgaactcatccttttatatttcttttcaagattggattcagagctcatctccatccagtcttgtttctatggaaggcttcaattctgtttccatgcaaatttgctaatcagagcccagagcttgctgggtccctcatcttccctcatcttatttttaggttgacttacagcagggagagaatctctttagctcattcctaatggggttgggatcacaagatgggtctgggtccaatctgcatcttgttgtgtcccaagaccctatctcctccccaacattcttattgcctttggctcccagtaaggaacgaattgggggccagggaggagaacaggggggatcaaggaaggggaaacccaattccccctttggaaagtggggtgtctttggaactattgtgtttgggggggaagttcctctggatactaatttgaatttatatacctcatgttttgggggtttgacgtatatatatatatatatatatatatatgcatatatatttcataatatttggaaggtttttgatgctagaaaaatggaaacaagagaaccttcaaaaatggtacttagatgggaactggaggccaatctttcataaagccagccccatagctgcttgctgttaggcctccagccattttgacattggggtggatagtcgattcacctgcctgtcagtcgattcacctgcctgtcacccagttctgtggatgtgctggtgctgagcctttgctctctttccaaatggttacagggatgttgatcagctccaccagagggagctctgatgggaggaattgctctgccatccttgtccctgtgtctcctgtcggcaggcagccattgtatctcaccagcagaccaggagactggtcccaaggttactgcaccacagggcaatttcctgccatagttaagaaggaaacacctgaactaaatggaagagacatccctgcggtgtttaatatcacacccatgccctttgtcaggttaccatgtacagagattacttggagagcctcatgccgtctctaccttcgcacactggtcaagtatctgctgagcttcttggccgcaaggatgcagaaataggctgagggtccatgggaagaaagacacaatgaggcagtaggaggtggggaagaaaagaagacagactttcaaaatggaattaggcactggggagagatcagtttccccacatcagggagaagaaggtataggtggggaagggggtggccaggagcagaaggaagaagactcaagatggaaagggagccgctgtgcctgtggcaataccacttggagaggtcgacttcataccttcaagccttttcccctgggcttttgattgtgtctgtgccccctttcttgtcctctctgcagatgcccagtaggggctacctcatcctcgtgctgttcttgtgtggctttctgggcagtagggatcttgaatttcctttctaacactgtgcccggcaaggcggggagcattcctctgccctttgtcttgtgccaacctggaaaggtgcagtctagatttcagtgagaaccctgccagctgagccctgtgcatctactaccttgacacagagtgttttcccactagaagctctgctctgctctcctggcccaagtaggggattccatgccttccctttcatggtcttagcaccagcagcctagtttctcccttccagagtctccagggatgacaaattggattggagacaaacctcgtcagatgctcatcccctaaaaggttaattgtgtatttgtggctgcgtgtgcctttgtgttttcattctcttcccatttttgtacattttggtcttctctgtggttttatacttggtcaaaagtactcgtcttggtattgcactgttgtgtgcatgagaaaactgggggaaggctcactggtacaagaaaggacccctgacccctttccttctctgtggtccccggcattagattgggggttctgggagaggcaggtgaatgtcctaagtgaattgttctgtttgtaactggaatgtttttgaagtctttggtgttgctccgtgaaaggacatcgccacctggtgctcatgaggtgtctttgcagaacaataaatggcaaatgaacaaccacaaaattgttactcttgttggccttctgctgtttgtagattagtgcacctatctgtgagggatttgggttacctccctgagtctgtaagcaaccacaagccctgccactgggtgggggaagtccctccccaaccacttaaaaacaaattttccacatattacccacccacacatttgacctggctagactttgtttgcctaaaggaacagaccacattgctgggaaaatgagtaagtgaacgtgtgggagaaaaacacttttagaatcacgaatattcacttttaaaggtctctttgcctggctgcaatatagtgtgtgtttaaattatttacaggctgttgtttctcaaataaatgtttaatattaatcattcccaaactgacaagaacacaaaaataaaatgcaaatacagagccagctttgtcacccaaatctgtgtctatttctgatagtccatggaatgtggttttcttggaagccagggttggtctccccacagaccccaggctaaggtcaccagttaggaacccaggacttggaaggcagagcctgtgagctcttccatcagggatctgactccgcaaaacgacttgatgaatgcaattggcaaactcccatgttcggacttcatatgcatgagccgttggacagagggtttcttaggtatatacttttaattgcatggtttatgttgcaattcttgtttagtggggtatacaagtttgtgaaggaacttctcatttcaatagggcagttaatgtaatgcattaaaagcctgggaatttgggggtatatttttcctttctgactcaataatcttcaaagaattcaaaggaaagtcagtacttgcagacaagtgg

SEQ ID NO: 87737 - DNA, 847 bp, Homo sapiens; identical to SEQ ID NO: 65241
  misc_feature (1)...(847): n = a,t,c or g

SEQ ID NO: 87738 - DNA, 5020 bp, Homo sapiens; identical to SEQ ID NO: 72414

SEQ ID NO: 87739 - DNA, 545 bp, Homo sapiens
cgcgcggcgccgtatgaacctgcataacaatgaggccggcaggaaggttctagaggaccggatgcagctggagtgcaagtgccacggcgtgtctggctcctgcaccaccaaaacctgctggaccacgctgcccaagttccgagagtcggccacctgctgaaggagaagtacaacgcggccgtgcaggtggaggtggtgcgggccatccgtctgcggcagcccaccttcctgcgcatcaaacagctgcgcagctatcagaagcccatggagacagacctggtgtacattgagaagtcgcccaactactgcgaggaggacgcggccacgggcagcgtgggcacgcagggccgtctctgcaaccgcacgtcgcccggcgcggacggctgtgacaccatgtgctgcggccgaggctacaacacccaccagtacaccaaggtgtggcagtgcaactgcaaattccactggtgctgcttcgtcaagtgcaacacctgcagcgagcgcaccgaggtcttcacctgcaagtgagccaggcccggaggcggccc

SEQ ID NO: 87740 - DNA, 1414 bp, Homo sapiens
ttttttttttttgcctgtaaaataaccgtttttttaatagttaaaaaaaaaaaaaactccagtgataaatgtcgttaccgatggtcagcataaagtgccaatcgcaatataacgcccggctcttggctggctgctccctcgcagtgtcgcggcagcggaggccgggccccctgcagaccccaggcccgaggtccccgtcccgctctcctagtcccggagcccacggccgccagctgagctgcaagagctgggagggggctgccccgcggtccctagggcaggaggctgaagcagatacagggattacacttttgcaggctccgggggtgggggcaggggcgggaggaggaggtgggagctgccagtgctaaggacttcgttgcctctcctctctccactcactctccgcagtcagagttacaagcttatatggtcaaagacaaaaataaaaaagaaaacgtataaaataacaatagaaaaagtaatacttctgggagaggcgccgctgcggctccgcggagctttcgttctttttttaatgcagtttcccttccgccacgtgagtaccgccttttggccaagagtttagccgcgtcctaggggagcagcagggacggtcggggtcgcggccccgggcggggctctgaagtgccgcgtgcgccagggacccaggggacaatgttggagaggtggaaggtcccgagcgagcgcctctcccgctgcccgccagagtcaggcttctggtccctatggaggagagggccgctgggcctagggtccttgtgacccacaggttctatttagcatttgatcttggaggttttgagctccttcacctgtgagtgtagcgtcttgtggacagcgagagtcctggactggcagaatcctttcccacactcttgacacttgaagggcttctctttggagtgaatatatctgtggtctcgcaggtggtcttgcctccggaaggctttgtggcagatgtcacaggtgtagggccgctcgtcggtgtgcgtccgctcatggataagtaggttgtaggacttggtgaagtggcggccacagaacttgcagacgaattccttcttggtcttggaaggcagacgtccccttgtgggcttcttttctggagacagcttggtcacgtcgaggagggcacccagcccacctgcaggggagcctgggccctccccgcgaccgagcttggccggatcttcttgcgttgctgccaaggccaggttggcaaaatcaaagcgcggcttggtcttgagcgctggaacgctgcctccagcggtgatctcgggcttgggttgaatgacatgagggaaccagggaaaggcgggcagctggaagcgcgcatccaccaagctggactccgtgcccaaaacttgaaaaaagaagagcgcggcaagtg

SEQ ID NO: 87741 - DNA, 414 bp, Homo sapiens
cggttctttcctccagggccgcatttctctgcctctctctcctgccatgtcgtaccactctttccagccaggctccaggtgtggcagtcagagtttcagctcatactcggctgtcatgccccggatggtcacccactatgcagtgagcaaggggccatgccggcccgggggtggtaggggcctccgagctctgggctgccttggctcacggagcctgtgcaacgtgggctttgggaggccccgggtagcctccaggtgtggaggtaccctgcctggcttcgggtaccgactgggagccacctgtgggccttctgcctgcatcacccctgtcaccatcaatgagagcctgctggtcccactggcactggagatagacccgactgtgcagagggtaaagagggatgagaaggagca

SEQ ID NO: 87742 - DNA, 5530 bp, Homo sapiens; identical to SEQ ID NO: 65560

SEQ ID NO: 87743 - DNA, 1919 bp, Homo sapiens; identical to SEQ ID NO: 72647

SEQ ID NO: 87744 - DNA, 1967 bp, Homo sapiens
gcggccgcaaccgcggcggcgtccagcgtgtggagggcaagctgcgcgccagcgtcgagaagggcgactactacgaggcgcaccagatgtaccggaccctgttcttcaggtacatgtcccagagcaagcacacggaggcccgggagctcatgtactcgggagccctgctcttcttcagccatggccagcaaaacagtgcagcagacttgtccatgctggtcctggagtccctggagaaggcggaagtggaggtggctgacgagctgctggaaaatctggctaaagtgttcagcctgatggaccccaactctcctgagcgcgtgacctttgtgtccagagccctgaagtggtccagtgggggctccgggaagctgggccacccccggctgcaccagctgctggccctcaccctgtggaaagaacaaaactattgtgagtcgaggtatcattttctgcactcagcggacggggagggctgtgccaacatgctggtggagtattccacgtcccgcggcttccgcagcgaggtggacatgttcgtggcccaggccgtgctacagtttctctgtttaaaaaacaaaagtagcgcatcggtggtcttcacgacgtacacccagaagcacccgtccatcgaggacgggcctccgtttgtggagccgctgcttaacttcatctggttcctgctgctggctgtggacggtgggaagctgacggtgttcactgtgctgtgtgagcagtaccagccatccctccggcgggaccccatgtacaacgagtacctcgaccgcataggacagctgttcttcggcgtcccgcccaagcagacgtcttcctacgggggcctgctcgggaaccttctgaccagcctcatgggctcctcagagcaggaggatggggaggagagccccagcgacggcagccccatcgagctggactgaactggccaggccacgtggagacaccacggtcgacgacggctggagggacgtttcagaggcgagtcctgggtggctcctcgccttgggggctcctggccctgaggctggcggtggccgcatgccggcgcgtgtctgtttctgtgcggcggctcagggtggcacggctgctgctcactgtgctgctgggacccaagagtggggcgtcgcccctgctggccgccgcgtcccccgagattgacccacaataaagcacaggccttaccgcggcgtcaccctctcccactcctttgttctgggtcctttcgggagggctgatgggcagcacaggaggcccgtcctcggggggctgcgcacatcacgctccttgccgggcgtccggcacagctgcggtcaccaaagcaggtgctggccctcggacctgagagcccagccagggcccatgtggtctgcaaatgggagcggctgtttttgaacacggggtcattctgcagtcaggacgaaccggtccccgtcgcagacggagtgcacgtgccctgcgccacatcctcacgctcggtggagggacgcgtgcggcgggacggtgcctacgggtacttgcagctgtgtcccatgtggcatcccagagctgcgccctgctggtctctgtgagcgccacgctgctgtgctggaaatgccgctttaaaaagggataccgtgggactctgcccgtctctttcataacgcaatatttatttgtattgggtgacgattgattctttcgacctaacattttgggttttaaccaaataaccggtccaggagtgagcagctccgttctgtcagatgctactccaaatgttaccagaacgatgacaaaaggggagacgctctattttttcacagttaaatgacagttgtagattgatacgcagttgtgcatgggaaggggaaacgcacagctttatttactgtaaagtggaatttcaggaaggcttgtgtgaaccgttgcgcataaataaaccctttctaccgggctgtgcaaaaaaaaaa

SEQ ID NO: 87745 - DNA, 1135 bp, Homo sapiens
ttttttttttttctcgagacagagtctctctctgtcacccaggctggagtgcaatggcatgatctgggctcattgcaaccaccacctcccgagttcgagtgattctcctgcctcagcctcccgagtagctgggattacaggcacacaccatcacacccagctaattttttgtatttttagtagagatggggtttcaccacactggccaggcttgtctcgctcgaacttctgacctcatgatccacctgcctcggcctcccaaagtgctgggattacaggtgtgagccaccgcacctggcaaaagagaatcttacagaacctattcactgggaaggaagccctcattataatgattttcattcttatgtgtgtttcaggacgactgggtttggattcagaagaggattattatacaccacaaaaggtggatgttcccaaggccttgattattgttgcagttcaatgtggctgtgatgggacatttctgttgacccagtcaggcaaagtgctggcctgtggactcaatgaattcaataagctgggtctgaatcagtgcatgtcgggaattatcaaccatgaagcataccatgaagttccctacacaacgtcctttaccttggccaaacagttgtccttttataagatccgtaccattgccccaggcaagactcacacagctgctattgatgagcgaggccggctgctgacctttggctgcaacaagtgtgggcagctgggcgttgggaactacaagaagcgtctgggaatcaacctgttggggggaccccttggtgggaagcaagtgatcagggtctcctgcggtgatgagtttaccattgctgccactgatgataatcacatttttgcctggggcaatggtggtaatggccgcctggcaatgacccccacagagagaccacatggctctgatatctgtacctcatggcctcggcctatttttggatctctgcatcatgtcccggacctgtcttgccgtggatggcataccattctcatcgttgagaaagtattgaattctaagaccatccgttccaatagcagtggcttatccattggaactgtgtttcagagctctagcccgggaggaggcggcgagggcggcccggacgcgtgg

SEQ ID NO: 87746 - DNA, 531 bp, Homo sapiens
ttttttttttttgagacggagtctcgctctgtcgcccaggctggagtgcagtggcgggatctcggctcactgcaagctccgcctcccgggttcacgccattctcctgcctcagcctcccaagtagctgggactacaggcgcccgccactacgcccggctaatttttttgtatttttagtagagacggggtttcaccgttttagccgggatggtctcgatctcctgacctcgtgatccgcccgcctcggcctcccaaagtgctgggattacaggcgtgagccaccgcgcccggccgaggatcaatcttagaaatgttatttactcatttgccgtaacttattgccttaattacatatcacttgcaatgtcatccaccctaaagctaagctttcatgtactgtctggatcttagtttatcagaacacattaatatctataaacttatccctttgcacttgatcttttaataatttgatctcttctgaatgaagcacgaaatcgtcgacccggtaattccggagcggtacaacg

SEQ ID NO: 87747 - DNA, 1556 bp, Homo sapiens
  misc_feature (1)...(1556): n = a,t,c or g
caaatgccaggtgacacgagctttgagagggccagcctcctctgagcctccaggcagagtgggtgatgcctgtctgaccaggcccagctcaggggcctgcttccatctggtgttgagtgttcctctggggactgaaggttgcctttgaagtaattcacacacatctcccattttcaggctctggcatcctgctgtttatcttccatgcaaactttttgggtaaagaagttattgctcggctctgtggaccgtgtagtgtacaagctgtagttcagcggcagcactcaaatctagttgactgtaatggctgtagcagaaagtacattccacgtccttttgtctgttacagcaaagttgggatttctagacgtctccttccaggttcggaaaagcctcactaggcaagtggcaagactgtgaagacaatgaaggttcagaattcagtcaaatggaaacaagatcaggaaacaagatcaaggactcatctgtccgcctggcaacactttagttttgaaggtgacgccaccacgcatccccgcagcacacactccttcctgtgccgactcccgctatttgcttgcctgagccagttcatgtttcagtaagaacgatttttctcccaacagtgccagttttcttattcccaattttgagagttgacccaaaattgtgggctatgagggatggtttttaaaactcctctaatggttcccaggcacagagcgttgaaaaggagggatttcttggctattctgaatttgtgcattgctgccatactacttcccaacacgaaccagcaagaccaccacaccaaggagtgggtaacatcttgatttaatttacaaataaaaagccaaaaccctcaatgcaaaggaaaactgcagtttacacttattctggagatcatttttaaccacagaaaatgtgcccctgtagcatgtttttaaatggcaagtgctatgattgcccagacatccataaactgcttgtatggagtaagaaattcataaatgaagaaagatttttttttctgtcttggttctcctaggtcacgaacaggatatttcccacaaaatgttttgacctgaaaggaaggtatgattccagtacttctggtcttaactcttctgaattacactggcaagctggaacttcggggtaacctttcagccacatttttctttttattcaccattttccatggtagtttgggctttaaagccctcttggctgtcgcctcagttcctcctgttctctgtgtcggatcatttcttcctcacgccgccgatgctcctcttcatgtcttagttgtatttgcttccgtttttgcaactcttggtttctgagttcttccaagcgtctgagttcttcttgacgcctcattagatcttgcctcattagcattaattggtgtcatgcctagctgcttncatttctgcctgcagtttctctttggcttctctgatgtttctatcaacctgctcacgctggagcttgtccattgcatcaagagccttccatcgagatgcatactcaaattcaaatgcnccaggttg

SEQ ID NO: 87748 - DNA, 3801 bp, Homo sapiens; identical to SEQ ID NO: 60579

SEQ ID NO: 87749 - DNA, 697 bp, Homo sapiens
cggcacgaggctaatatgaattatgacatacgttcatgactttattggttattaagtgtacttcattaatctataacttggtggtggtgccctatttctactatatttgagcttttccaccttcttctaattcctttcgtgtttttactcagaccttagttgaaacgtcttcatctggtatctatccataatttcctgtctcttctcagtaagatacgtggatgtaacatcttatttggaaagggaaatgtagattttaaatttaaaaatacagctttctataatagcatgtaatttggagtcccaaatacgtaaaataaaattgcagttcagatagaagttactttaaagaaacactgtcagcttttgcatatctaattttcttatactggactaaaatgacatttccattcaaacaaagtaatgtttaaaacaagcaaatttcaggccaggtgcagtggctcacgcctgtaatcccagcactttgggaggccgaggcgggcggatcacaaggtcaaaagatggagaccatcttggccaacatggtgaaaccccatctctactaaaaatgcaaaaattagctgggcatagtcacaggtgcctgtagtcctagctactcaggaaggctgaggcagaatcgcttgaactcgggaggcagagggtgcagtcagtgagctgagatcacgcccctgcactc

SEQ ID NO: 87750 - DNA, 1891 bp, Homo sapiens; identical to SEQ ID NO: 60597

SEQ ID NO: 87751 - DNA, 357 bp, Homo sapiens
cacctaagctgcacttcaagttcgacacgacgccctggatcctgtgcaagggggactggagccgcctccacgctgtgctccctcccaacaacggccgagcctgcaccgacaaccccctggaggaggagtacctagcacagttgcaggaggccaaggagtactagtgacggggttgctgaacagacactgcagggagagggcaggcggctgctgctgttgcacgggagaactttcctcacccgcccctgcccagacagggtgaggaaagggctcccccagtgaggttggtccgaggctgtgtgccctcttgcagcgaccccgagcagatatctcagtgggggtagtgagaaggttgat

SEQ ID NO: 87752 - DNA, 429 bp, Homo sapiens
gggttgaggaaattaactcgggtcgtggtgctgaaagaggccagttggtggtggatctcctgaaggggactcatgggtgagccccaggggggagagctgctgccttcagccaagcagaacctccaatcttcacactactcagtccctgacctgctgttcttcctgcccactgtccacagcccagccgaggcactgaccgcctggatctacctgtcactactcgctctgtccatcgaaactttgaggaccgagagaggcaggaactggggagccccgaagagcggctgcaagacagcagtgaccctgacactggcagcgaggaggaaggtaagagccgtctgtctccgccccacagtccacgagggggaaaccctggcggggacattgaacctaacggttagtgctagctggatacagggcctttggctg

SEQ ID NO: 87753 - DNA, 405 bp, Homo sapiens
tgtgagtctaggtactccaattatgaagccagaatggatttataaagcttgggaaaggcggaatgaacaggatttctatgcagcagttgatgactttagaaatgaatttaaagttcctccatttcaagattgtattttaagtttcctgggattttcagatgaagagaaaaccaatatggaagaaatgactgaaatgcaaggaggtaaatatttaccgcttggagatgaaagatgcactcaccttgtagttgaagagaatatagtaaaagatcttccctttgaaccttcaaagaaactttatgttgtcaagcaagagtggttctggggaagcattcaaatggatgcccgagctggagaaactatgtatttatatgaaaaggcaaatactcctgagctcaagaaacg

SEQ ID NO: 87754 - DNA, 161 bp, Homo sapiens
cccacgcgtccggtggtggcgggtgcctgtaatcccagctactggggaggctgaggcaggagaaccacgtgaacccgggaggtggaggttgcagtgagctgagatcgcgccactgcactccagcctgggcgacagagcgagactccgtctcaaaaaaaaaa

SEQ ID NO: 87755 - DNA, 2542 bp, Homo sapiens; identical to SEQ ID NO: 61115

SEQ ID NO: 87756 - DNA, 335 bp, Homo sapiens
cggaggggcagcctctttgggactaactcatgaagaacaagggtgctaagcagaagctgaaacgaaagggagccgccagcgcgtttggctgtgacctgacggagtatctggaaagctcgggacaggatgttccatacgttttgaagagctgtgcagaatttatagagactcacggcatcgtggatggaatctatcggctttcaggagtcacctcaaacatacaacggctaaggtaagctaaaagaatagccctaaaagaattctcccatgattcctcctgtgtccatgcctctgtccatcggtgtccagagtattaaaaacccaaaggaactgag

SEQ ID NO: 87757 - DNA, 366 bp, Homo sapiens
cgggccctggctcaggaacagggacagcacctcatcccctggatgggggaccacaagatcctcatcgacaggtcggttcctctccccacccgtcgatccttcccttccctcacccgcttgatctcgtctgatgttgacttgactgcaaggactgcagagagttttctggagccagcggggatctgggggacaccccctcccctgtccccacctcctcctggtgttctggtggggagggggacggtgaaacctgccctaaggcactggctggaattgcgtgccgcgtccgtctccggagggatcgtctctggtcccgcagcccctctcgacccctcaccctgtcgctgggctgcaggtggcgattcc

SEQ ID NO: 87758 - DNA, 477 bp, Homo sapiens
  misc_feature (1)...(477): n = a,t,c or g
cccactatgtcaggctgcagcagcaaagagttatcctctacaagagcggaaaagtgcctcctgtgatgaaccagttcacccaggccctgggaccaccaaacagctactcaactacataagctggcccataatacagaccagagacaaagcaagagaagaggcagagacttggcccaggctgagaagaaagctgttggcaaaggggatgtccccactaagagaccacctgtccttcaagctggggttaacaccgtcaccaccttggtggagaagaagaaggctcagctggcggtgactgcacatgacgtggatcccatcaagctggttgtcttcctgcctgccctgtctcataaaatgggggtccctgactgcgctgtcaagggaaaggcaagactggttcacaggatgacccacaccaccatcaccttcacacagattaactcggaagacaaaagggctntggctaagatggtggaa

SEQ ID NO: 87759 - DNA, 388 bp, Homo sapiens
aagcaacctcccacttaccggctttgcaaatccaaatctattaagtggctccactgtcacaggaagtatttcattgttgattagaccaggcattcttaaagacataactattttaatattattaagttgcttaaagagtcactgaggtacatggttctgggtgggggtctggagagtgcagcagccatggccagccacattgtgctcaacaatggcaccaagatgcccatcctggggctaggcacctggaattcccctccaggccaggtaactgaggctgtgaaggtggccattaatgttgggtactgccacatcgactgtgcccacgtgtaccagaatgagaatgacgtgggggtggccattcgggagaagctcacggagcatgtgg

SEQ ID NO: 87760 - DNA, 448 bp, Homo sapiens
gaaccctcttcataaatcaaactcagaagacagctctgtaggaaaaggagactggaagaagaaaaataagtatttctggcagaacttccgaaagaaccagaaagggataatgagacagacttcaaaaggtactgcaatgcagctggcggacagtaggtccttttagctctaacatgggaagaatcctatgcggctaatctcagtggatgctataagttagcgtaactcaccgcatgtgcccataagatgttcaacttttctgacatttctgttattactttaagactttgttccagtgattttcttttgttttaagtcaaagaaaacaaaaggggacaaggtcacagttctttcctttcatagatctgacagcagaggccgaaactttcgtttcctcagttgcaccaacctcagaaagatctttactcttctctcgtcaagatctagc

SEQ ID NO: 87761 - DNA, 482 bp, Homo sapiens
  misc_feature (1)...(482): n = a,t,c or g
cacatgtgtgccaaacaatcccacattcctagtcctcaccacttttcacagcctcgcttaacttggcttacaggaagcataaagccaaagtgtttggttttttattgcaacatggcctggccccgatataaattagataatgacagccaatggcctgaaaatggggttctttgactttcaaattctcagggaccttgagaactttataaccagaaatgtcaaatggcaagaggttctctatattcaggctttcttctaccttagatcccgaccctccctgggtcaagcttgcacccctcatgaaatccttcttcttaatgaaaaccctcccctcgtctctccttgctccaaaatgccttccttagaaatcccttcctccaaaacccctttgaccctatgcacgaacccnctccatattctaatacccttgcatccgctccttgcctgccagaaccctccgccacagtggtccttcgtacctg

SEQ ID NO: 87762 - DNA, 1699 bp, Homo sapiens
cttgttttccttttagctgagagcacttgttcttccaatgtcctatttctttacaataagcacactgattacgctgcaagctctgacagccaggctgagtttctttcccggggccccccttcccttgcctctttggggggtcccctctgattgctgcagctaacagatcagcgtttcgctgggcctgacgttcattctctttctggttttccttacggcttactgcatccctgtttacaaacacctggttagctatttctaataactgtgatgtgttcatccttgcaaacccagcctgtttctgcagttttcttctaatgtcttctgtgctttgaataactaaagccatgttaatcatgcactgattttcagggctattgggatcaaagggagtatacatacgataggcctcacacagtctctcgtagaattgtgctggactttcttcttttctctgaatgacctcagagaccttgttaatgtttgtggccttctgggctcccctctttaatccttccaagagagcttccctgtatcggtttagcctttgcatatcctgtctttcatttgggtcccactgggggtaggttcccagtaactgggtccttacatcctcttgggggtttttgtaatcagtcggtgcatgttcctctagccacttagttgctgcttggagcactctccgcctttcatctgtgttaaagaggaacatgagcaactggtggcaatcagccctagtggggttatgggtctggataatagtttggagcaaatcaattagagcttgtggcttttcagtataggatggggtattgcttttccagttgagaaggtgggcagaggtgaagggctggtacccaaaaacacgcctctccaccacgtgaccatactcatctattccagtatactgctgctctctcaggggcatttgtatcccagttttgtgtcttaaacgagctgccaagggaggggtttctcccgaggcttcacctcctctcttgtctactgtgggtggcctaaggatatgtttgtcttgcggaggtacaagcactgtggaatcaaaagtggggagcccctctccctgtgtggctctgttgctgtagccactgctgggtgcccggggagccccgttggagccattgtacccaggggacaataccacaccggagcagatggcccagtacacagctgagctccgtagatacatcaacatgctgaccaagcctaggcatgtgccatggacaaggagagagatcccagcccctgggaccctgggcccactccacattcctggccacaccctatccccagcccaagccccatctccagccccagtcccagccccttccaggccactcttggggaaacagagcatctgtgctgaccaggcctgggcccatgtgccctgggcaagagggtgcctacaggcggatatgaaaccggtgggctggcacctgggcacagtgctttccaggtatggagaaagagacaaagaggacacgctggccttcttcagagtgggggtcttcccatgcttgttgcccccagagagttcagcccgctggacttgtaacactacctcccgccccctaccactccacgggcagtgccagcccagctctcccctccacactgttggctctggccgaagctcactccctgttcctgcacaggctcaataaagcaagtcaaagcacaa

SEQ ID NO: 87763 - DNA, 698 bp, Homo sapiens
atttgaaatcttaagctctcccaaagaaagttatcagatattcgaaaatgtgaacttagtgtaaaaatatggtgataatttcctttcaggagcaaacaactactttgggaaatacatttgattagaaaatttttcaagctaaagacaacatttcttttggataaattgcatggctaaattttataacttggcaaacctgctttgctgatagcaaataagtaagcttttcctacaaataatgcttttgtattcaacacagtggatttttagtccaaattaggaatgctagtttttagaaaatgttacatggtaagtttatatatatatatgcacagacatacacataaagtgaacattaaactgaatcatagaaatatatttatgggctgggtgtggttttatatttaaattacatgcctgtaatcccagcactttgggatgctgaggcaggcagattgcgaggtcaggaatccgagaccagcccggccaacgtggtgaaacctcggctctactaaaaatacaaaaattatccgggcctggtggcgggcatttggaatcccagctacttgggaggctgaggccgagaattgcttgaaccccaaaagtggggataggtggaagagccccaaatatggccattggttttaactgtgacccaaagaaagggtctcctttgggccaggggttataaaaacttc

SEQ ID NO: 87764 - DNA, 745 bp, Homo sapiens
ttttttttttttggcagttcagaaattttaatgctgctttgaaaaatacttctgtacaatattatctttctcataatgaaaaaaagaaatgacatctggtatgtcaatggtttgctgaaagcacagatattttttgtttccttgttttaggtcttccaaaaactctgctttgagctggttaagttcttctgctagaagcttcaagttgtgaggaagcacttgttcatcttttgcttccttcattgtctgagatacaatcccttcggagtgtctgatcagttttatgaagaatgttagttgaacaaataattctgtctgtgtccttttgttccatattgtcctcagcatattttactggattttccaaagcagtgagcaataaatcagtcacttccaggctggcctccgaagcacatgctggactcggaattgtgaggctgttgtgttcccaagcatttttctcagggttgggcttttctagctttcttcgcatcaggtggatggtctcaggaggcagtgcctgtggtctctggccattcctctgtaaacaggtctcaagaggacaatctaaaaagagctggcaaaagcccaatgaatatttccgagccagctggtagacttcatatctcatactctgataataaaaattgtcatccaaaaccaaaaacaaaggtctagaaacagcagtttttgttaagaggtagcaagactgggcctcaaatgctgcagaaaatatcagatcttg

SEQ ID NO: 87765 - DNA, 417 bp, Homo sapiens
cacatcgagcgagtgcaccagaagaacaagcttctctgccgcttctgcaagaagaagtactctgaggggagaacctcatcaagcacatgcgagacgcgcatgacccacaggacaagaaggtcaaagaggccttggacgagctctgcctgatgacgagggagggcaagcggcagctgctctatgactgccacatctgtgagcgcaagttcaagatcgagctggaccgcgaccgccatatgctggtccacggagacaagtggccttttgtctgtgagctctgtggccatggggccaccaagtaccaggcgctggaactgcatgtcatgaagcaccccttccggtacgtatgtgccggctggcgaaagaaagtcgtcagctacatcaggctgcgcacccacatcacaaaggtgcacgggg

SEQ ID NO: 87766 - DNA, 6316 bp, Homo sapiens
gttcctagaaaatggagctgtcttggcatgtagtctttattgccctgctaagtttttcatgctgggggtcagactgggagtctgatagaaatttcatttccaccgctggtcctctaaccaatgacttgctgcacaacctgagtggtctcctgggagaccagagttctaactttgtagcaggggacaaagacatgtatgtttgtcaccagccactgcccactttcctgccagaatacttcagcagtctccatgccagtcagatcacccattataaggtatttctgtcatgggcacagctcctcccagcaggaagcacccagaatccagacgagaaaacagtgcagtgctaccggcgactcctcaaggccctcaagactgcacggcttcagcccatggtcatcctgcaccaccagaccctccctgccagcaccctccggagaaccgaagcctttgctgacctcttcgccgactatgccacattcgccttccactccttcggggacctagttggggatctggttcaccttcagtgacttggaggaagtgatcaaggagcttccccaccaggaatcaagagcgtcacaactccagaccctcagtgatgcccacagaaaagcctatgagatttaccacgaaagctatgcttttcagggcggaaaactctctattgtcctgcgagctgaagatatcccggagctcctgctagaaccacccatatctgcgcttgcccaggacacggtcgatttcctctctcttgatttgtcttatgaatgccaaaatgaggcaagtctgcggcagaagctgagtaaattgcagaccattgagccaaaagtgaaagttttcatcttcaacctaaaactcccagactgcccctccaccatgaagaacccagccagtctgctcttcagcctttttgaagccataaataaagaccaagtgctcaccattgggtttgatattaatgagtttctgagttgttcatcaagttccaagaaaagcatgtcttgttctctgactggcagcctggcccttcagcctgaccagcagcaggaccacgagaccacggactcctctcctgcctctgcctatcagagagtctgggaagcatttgccaatcagtccagggcggaaagggatgccttcctgcaggatactttccctgaaggcttcctctggggtgcctccacaggagcctttaacgtggaaggaggctgggccgagggtgggagaggggtgagcatctgggatccacgcaggcccctgaacaccactgagggccaagcgacgctggaggtggccagcgacagttaccacaaggtagcctctgacgtcgccctgctttgcggcctccgggctcaggtgtacaagttctccatctcctggtcccggatcttccccatggggcacgggagcagccccagcctcccaggcgttgcctactacaacaagctgattgacaggctacaggatgcgggcatcgagcccatggccacgctgttccactgggacctgcctcaggccctgcaggatcatggtggatggcagaatgagagcgtggtggatgccttcctggactatgcggccttctgcttctccacatttggggaccgtgtgaagctgtgggtgaccttccatgagccgtgggtgatgagctacgcaggctatggcaccggccagcaccctcccggcatctctgacccaggagtggcctcttttaaggtggctcacttggtcctcaaggctcatgccagaacttggcaccactacaacagccatcatcgcccacagcagcaggggcacgtgggcattgtgctgaactcagactgggcagaacccctgtctccagagaggcctgaggacctgagagcctctgagcgcttcttgcacttcatgctgggctggtttgcacaccccgtctttgtggatggagactacccagccaccctgaggacccagatccaacagatgaacagacagtgctcccatcctgtggctcaactccccgagttcacagaggcagagaagcagctcctgaaaggctctgctgattttctgggtctgtcgcattacacctcccgcctcatcagcaacgccccacaaaacacctgcatccctagctatgataccattggaggcttctcccaacacgtgaaccatgtgtggccccagacctcatcctcttggattcgtgtggtgccctgggggataaggaggctgttgcagtttgtatccctggaatacacaagaggaaaagttccaatataccttgccgggaatggcatgcccataggggaaagtgaaaatctctttgatgattccttaagagtagactacttcaatcaatatatcaatgaggtgctcaaggctatcaaggaagactctgtggatgttcgttcctacattgctcgttccctcattgatggcttcgaaggcccttctggttacagccagcggtttggcctgcaccatgtcaacttcagcgacagcagcaagtcaaggactcccaggaaatctgcctactttttcactagcatcatagaaaagaacggtttcctcaccaagggggcaaaaagactgctaccacctaatacagtaaacctcccctccaaagtcagagccttcacttttccatctgaggtgccctccaaggctaaagtcgtttgggaaaagttctccagccaacccaagttcgaaagagatttgttctaccacgggacgtttcgggatgactttctgtggggcgtgtcctcttccgcttatcagattgaaggcgcgtgggatgccgatggcaaaggccccagcatctgggataactttacccacacaccagggagcaatgtgaaagacaatgccactggagacatcgcctgtgacagctatcaccagctggatgccgatctgaatatgctccgagctttgaaggtgaaggcctaccgcttctctatctcctggtctcggattttcccaactgggagaaacagctctatcaacagtcatggggttgattattacaacaggctgatcaatggcttggtggcaagcaacatctttcccatggtgacattgttccattgggacctgccccaggccctccaggatatcggaggctgggagaatcctgccttgattgacttgtttgacagctacgcagacttttgtttccagacctttggtgatagagtcaagttttggatgacttttaatgagcccatgtacctggcatggctaggttatggctcaggggaatttcccccaggggtgaaggacccaggctgggcaccatataggatagcccacgccgtcatcaaagcccatgccagagtctatcacacgtacgatgagaaatacaggcaggagcagaagggggtcatctcgctgagcctcagtacacactgggcagagcccaagtcaccaggggtccccagagatgtggaagccgctgaccgaatgctgcagttctccctgggctggtttgctcaccccatttttagaaacggagactatcctgacaccatgaagtggaaagtggggaacaggagtgaactgcagcacttagccacctcccgcctgccaagcttcactgaggaagagaagaggttcatcagggcgacggccgacgtcttctgcctcaacacgtactactccagaatcgtgcagcacaaaacacccaggctaaacccaccctcctacgaagacgaccaggagatggctgaggaggaggacccttcgtggccttccacggcaatgaacagagctgcgccctgggggacgcgaaggctgctgaactggatcaaggaagagtatggtgacatccccatttacatcaccgaaaacggagtggggctgaccaatccgaacacggaggatactgataggatattttaccacaaaacctacatcaatgaggctttgaaagcctacaggctcgatggtatagaccttcgagggtatgtcgcctggtctctgatggacaactttgagtggctaaatggctacacggtcaagtttggactgtaccatgttgatttcaacaacacgaacaggcctcgcacagcaagagcctccgccaggtactacacagaggtcattaccaacaacggcatgccactggccagggaggatgagtttctgtacggacggtttcctgagggcttcatctggagtgcagcttctgctgcatatcagattgaaggtgcgtggagagcagatggcaaaggactcagcatttgggacacgttttctcacacaccactgagggttgagaacgatgccattggagacgtggcctgtgacagttatcacaagattgctgaggatctggtcaccctgcagaacctgggcgtgtcccactaccgtttttccatctcctggtctcgcatcctccctgatggaaccaccaggtacatcaatgaagcgggcctgaactactacgtgaggctcatcgatacactgctggccgccagcatccagccccaggtgaccatttaccactgggacctaccacagacgctccaagatgtaggaggctgggagaatgagaccatcgtgcagcggtttaaggagtatgcagatgtgctcttccagaggctgggagacaaggtgaagttttggatcacgttgaatgagccctttgtcattgcttaccagggctatggctacggaacagcagctccaggagtctccaataggcctggcactgccccctacattgttggccacaatctaataaaggctcatgctgaggcctggcatctgtacaacgatgtgtaccgcgccagtcaaggtggcgtgatttccatcaccatcagcagtgactgggctgaacccagagatccctctaaccaggaggatgtggaggcagccaggagatatgttcagttcatgggaggctggtttgcacatcctattttcaagaatggagattacagtgaggtgatgaagacgcggatccgtgacaggagcttggctgcaggcctcaacaagtctcggctgccagaatttacagagagtgagaagaggaggatcaacggcacctatgacttttttgggttcaatcactacaccactgtcctcgcctacaacctcaactatgccactgccatctcttcttttgatgcagacagaggagttgcttccatcgcagatcgctcgtggccagactctggctccttctggctgaagatgacgccttttggcttcaggaggatcctgaactggttaaaggaggaatacaatgaccctccaatttatgtcacagagaatggagtgtcccagcgggaagaaacagacctcaatgacactgcaaggatctactaccttcggacttacagctttgagggcctcattgatgtaagtccgaaggtagtagatccttgaggccctcaaagctgtgcaggacaaggtggaccttcgaggatacacagtttggagtgcgatggacaattttgagtgggccacaggcttttcagagagatttggtctgcattttgtgaactacagtgacccttctctgccaaggatccccaaagcatcagcgaagttctacgcctctgtggtccgatgcaatggcttccctgaccccgctacagggcctcacgcttgtctccaccagccagatgctggacccaccatcagccccgtgagacaggaggaggtgcagttcctggggctaatgctcggcaccacagaagcacagacagctttgtacgttctcttttctcttgtgcttcttggagtctgtggcttggcatttctgtcatacaagtactgcaagcgctctaagcaagggaaaacacaacgaagccaacaggaattgagcccggtgtcttcattctgatgagtaccaactccaagttctatgaagcacgcctagtttcttcatctatctgtaccggccaccaaacaaccttagggtcttagactctgctgatactggacttctccataaagtcctgctgcaccgttagagatgactttaatcttgaatgatttcgacttgctgagtaaaatggaaatatctccatcttgctccagtatcagagttcatttgggcatttgagaagcaagtagctcttgcggaaacgtgtagatactggtctagtgggtctgtgaaccacttaattgaacttaacagggctgttttaagtttcagagttgttaagggttgttaagggagcaaaaaccgtaaaaatccttcctataagaagaaatcaactccattgcatagactgcaatatcatctcctgcccttctgcaagctctccctagcttcacatcttgtgttttccagaaaataaaaacagcagactgtcctttc

SEQ ID NO: 87767 - DNA, 456 bp, Homo sapiens
  misc_feature (1)...(456): n = a,t,c or g
gcgtacagctctgaatttccggtcgacncacgcgtccgtaaaaacataattccctttataattttaatttctgattgttcactgccagngcatagaaatacaatggagtttacattttgttcttggatgcactggcagtgaacaatcagaaattaaaattaaaaagagaattccctttataataacgcgagagtacacgatgcttaggagcgaagctgacagaagcgcgaccaaggcttgtacactgagaactacaaaacactgcttagaaaagttaaagatctagataagtgtacagatataccacgtttatggttcagaagattcaatactattaagaggtctattatcctcacattgatgtatagattgaacactatctcaatcatgtacccagcacacctcttgtcaaaatcgacaagctgatcatatacttcagacgaacaggccaaagaa

SEQ ID NO: 87768 - DNA, 917 bp, Homo sapiens
  misc_feature (1)...(917): n = a,t,c or g
ttttagtttcacatcagttttattaggccccagaaagttgctctaatggatagtccatttttctaacaacctgccaggcagacggggacttgagtcttctcagctccctcccatgggccctattcttcctccttccagcctaggaccaggagtcagcctccccccacaaacccacagtccagaactgagccccctcattcccctaggaaccaggatttcaggcctctagaccctcctcctcctcttcagtggcctcactttaacttccagatgaagttgggggacacatttgggctcagcggggtgtagacaggcgccggcattcatgcacccggtaggcgcacatgtagaaaatccctgcgaagaacgtcatgagcactgccacccagcgaaggccatgatgcccatgatgatgccggagatggcgcatagggcagacaggatcatgaaggcccgggtggcattccagtatgcgatgctgtctgtctgcaggtagcacttgttgcccaggcagtaccgccacangccctggtgggcgaaggaccctgacagccggtactgcatccagtggtctgttgccatggccaccaccaggaggatggtccccacccaggcacagaacaggccaccacccatgaagctgtacatggtgatctgagtggcagagcctgcccgagccctccttctgccacggcccctctgtgcagactgagctgagcctggtcactggcctctttgcccccttaggttccccaaatcccttaagcctccctacacaatggtcccactacccagcagcttccagcaggcagaaatgcagcggtggcagaggcctcaaatggaattcgctgaagcaggcatccagggggctccccccacccactcactgacctctgtgaccctccccggaacccaat

SEQ ID NO: 87769 - DNA, 414 bp, Homo sapiens
caccattttacccgagaagattcaggcttgggcacagaagcagtgtccgcaaagtggagaggaagcggtggccctggtagtgcatttggagaaagagactggaagactaagacagcaggtcagcagtcccgtgcaccgggagaagcactccccacttggagcagcgtgggaggtggcagacttccagccagagcaggtggagacccaacccagggcggtgtctcgggaggaacctggaagcctccactcaggacaccaggaacagctgaaccgaaagcgagaacgtcggcccttacccaagaatgctcggccttctccctgggttcctgcccttgctgatgaatggaataccctacatcaggaagtgacaaccacacggcttcctgctgggtcccaggaaccagtgaaagatgt

SEQ ID NO: 87770 - DNA, 520 bp, Homo sapiens
tcttggtagacccacgcgtccgtgctgtgtttctgcagctgctaccgctgctgctctctagggcccaagggaaccctggggcttctctggacggccgccctggggaccgggtgaatctctcctgcggaggagtctctcatcccatccgctgggtctgggcacccagcttcccggcctgcaagggcctgtccaaaggacgccgaccgatcctgtgggcctcttcgagcgggacccccaccgtgcctcccctccagcctttcgtcggccgcctacgctccctggactctggtatccggcggctggagctcctcttgagcgcgggggactcgggcacttttttctgcaagggccgccacgaggacgagagccgtacagtgcttcacgtgctgggggacaggacctattgcaaggcccccgggcctacccatgggtccgtgtatccccagctcctgatcccgctgctgggcgctgggttggtgctcggactgggagctttgggcctggtctggtggctgcacag

SEQ ID NO: 87771 - DNA, 771 bp, Homo sapiens
attaatttgctttgcagaaggaaccctgcggtcagttctcttaattctgatttcttgtgaataaaaccttgtgttttaccaaaaaatctatcaataaaggaatacctgcatgttccctctccgtttctgtgtgcagcattgcttgctggctgagatacaagcctgccgtctggtcagctttgtttctggagttggggcccagtgctgcttctgactttttcctctccattttaggttgcagaattgtcggagtgcataggctcagcactgatacagaagggcttcaagactgccccagatcagttcattggcatctttgctcaaaatagacctgaggtatgaaccagtaggtacttgctatgcatgattttgagaattctcagatataagagcctaacttctgctagagaccagattttgtagtctgatttctactaaaagtatagctttacgttacaccttagaaagttacacatatgaaaacctcaaccagggccgctgggcacagtcgtcacgcctgtaatcccagcactttgtgaggccaaggcgggtgggtcaccagaggtcgggagttccagaccagcctgaccaacatggagaaaccccatctctactaaaaatacaaaattagccaggctggtggcacacatctgtactcccagctactcgggaggctgaggcaggagaatcgcttgaatccgggaggcagaggttgcggtgagccaagattgtgccattgcactccagcttgggcaacaagagcgaaatccg

SEQ ID NO: 87772 - DNA, 429 bp, Homo sapiens
ctactgtgtctgtttttttgatttggaaaacagaacactgataggtgaacttttatgaaaagttacgtggacttaataatcaaacatcacttggacaattttgaaccaaagttattaataacgaacttactcttccactttacgttgggcttgcttccaagtggtactagccattttcaacttcctgtcccatgctttaaaaaaattacctgtgagggaatatttcatatgaaatcctaaaaacaggtcttccatgtttgcttcaaatattagaaatagtccacatatctgtgaagcatttcccagaatgtgatcattaacatagcctacagggtataatcacatgattatgcattatggtttactatctgatctataccttggaaaccccagcattcttggagtcctgacgactcatgggaaagggaa

SEQ ID NO: 87773 - DNA, 3809 bp, Homo sapiens
gggctgcaggaattcccccacagagggagcatgacttcggcaacttcacctatcattctgaaatgggaccccaaaagtttggaaatccggacgctaacagtggaaaggctgttggagccacttgttacacaggtgactacacttgtcaacacaagcaacaaaggcccatctggtaaaaagaaagggaggtcaaagaaagcccatgtactagctgcctctgtagagcaagccactcagaatttcctggaaaagggtgaacagatcgctaaggagagtcaagatctcaaagaagagttggtggctgctgtagaggatgtgcgcaaacaaggtgagacgatgcggatcgcctcctccgagtttgcagatgacccttgctcgtcggtaaagcgcggcaccatggtacgggcggcaagggctttgctctccgcggtgacacgcttactcatcctggcggacatggcagatgtcatgagacttttatcccatctgaaaattgtggaagaggccctggaagctgtcaaaaatgctacaaatgagcaagaccttgcaaaccgttttaaagagtttgggaaaaagatggtgaaacttaactatgtagcagcaagaagacaacaggagctgaaggatcctcactgtcgggatgagatggcagccgcccgaggggctctgaagaagaatgccacaatgctgtacacggcctctcaagcatttctccgccacccagatgtcgccgctacgagagccaaccgagattatgtgttcaaacaagtccaggaggccatcgccggcatctccaatgctgctcaagctacctcgcccactgacgaagccaagggccacacgggcatcggcgagctggctgcggctcttaatgagtttgacaataagattatcctggaccccatgacgttcagcgaggccaggttccggccgtccctggaggagaggctggagagcatcatcagcggcgcagcgctgatggccgactcctcctgcacgcgagacgaccggcgcgagaggatcgtggcggagtgcaacgccgtgcggcaggcgctccaggacctgctcagcgagtacatgaataatactggaaggaaagaaaaaggagatcctctcaacattgcgattgataagatgactaagaaaacaagagatctaaggagacagcttcggaaagcagtgatggatcacatatctgactctttcctggaaaccaatgttcctttgctagttctcattgaggctgcaaagagcggaaatgaaaaggaagtgaaagaatatgcccaagtttttcgtgagcatgccaacaaactggtagaggttgccaatttggcctgttccatctccaacaatgaagaaggggtgaaattagttcggatggcagccacccatattgacagcctgtgtccccaggtcatcaatgccgctctgacactggctgcccgggcacagaacaaagttgctcaggataacatggacgtcttcaaagaccagtgggagaagcaggtccgagtgttgacagaggccgtggatgacatcacctcaatggatgacttcctctctgtctcagaaaatcacatcttggaggatgtgaacaagtgtgtgatagccctccaagagggcgatgtggacactctggaccggactgcaggggccatcaggggccgggcagctcgagtcatacacatcatcaatgctgagatggagaactatgaagctggggtttatactgagaaggtgttggaagctacaaaattgctttctgaaacagtgatgccacgcttcgctgaacaagtagaggttgccattgaagccctgagtgccaacgttcctcaaccgtttgaggagaatgagttcatcgaggcctctcgcctggtgtatgatggcgttcgggacatcagaaaggctgtgctgatgatcaggaccccagaagaactagaggatgattctgactttgagcaggaagattatgatgtgcgtagcaggacaagtgttcagactgaggatgaccagctcattgcagggcagagcgcacgggccatcatggcgcaactaccgcaggaggagaaggcaaaaatagctgagcaggtggagatattccatcaagagaaaagcaagctggatgcagaagtggccaaatgggacgacagcggcaatgatatcattgtactggccaagcagatgtgtatgatcatgatggaaatgacagacttcacaagaggcaaaggcccattgaaaaatacatctgatgtcattaatgctgccaagaaaattgccgaagcaggttctcgaatggacaaattagctcgtgctgtggctgatcagtgtcctgattcagcatgtaagcaggatttattagcctaccttcaacgaattgccttgtattgccatcagcttaatatctgcagcaaggtgaaggcagaagtgcagaatctgggaggagagctcattgtgtcagggacaggagttcagagcactttcactaccttttatgaggtagattgtgatgtcatagatgggggcagggctagtcaactttctacccacctcccaacctgtgctgagggagctccgatcgggagtggaagcagtgattcctccatgctggacagtgccacatcgcttatccaggcagctaaaaacctgatgaatgctgttgtcctcacggtgaaagcatcctatgtggcctcaaccaaataccagaaggtctatgggacagcagctgtcaactcacctgttgtgtcttggaagatgaaggctccagagaagaagccccttgtgaagagagaaaagcctgaagaattccagacacgagttcgacgaggttctcagaagaaacacatttcgcctgtacaggctttaagtgaattcaaagcaatggattccttctaggacgataggttttaacaagaaagctttttctttcttttctttctttctttttctttttaattccatttttgtatgcatacctgccagctcgtatgcctctggcatggggaaattaagggaacagtgtctgtttgcatgtaagatgagatgagatcaatactactgatccatctgtagcctgggaaggagacaggacattcctgtactaaggtggcacagagctgtcctttgcaacattctcataaaattgggcacagagttcgcattggcgcaatatttatgggagtgggagggatggggaaaataaacttaactctacaaaagcaaactctaatgcatgcaagaatcattaggttggcaggtatatgcataagtgaaaaatctggaagtgtaatggtagaacataaaacttgtattgcttctgtttcagtgcaaaaatgtactagccaatacgcttaagtgtgtggcccatgaattgaacaatttaaccttgaagtctatatccgtgatattatgtcgatttttaactgaggggaaattaactagtccagcctaaaatgcttcttttaatctgcattctgtttcctcttctagttgtgccattactagtgatcatgtttttttcccccctttaatgaaaacaataaacatctatttgagacaattaaaatcctttctgggggccactggaagccacaatacggtgacccaatccttgcctttccatttttttttccttttttaatttgaacccatgattttgctagaaatagaaggcccagtggtggaatattagagggaaggaaactgacaacgtgtgaaagttagaggcaaatacataggtgtagcttggagtgctggtatctaatataccattgtattcactaactaactcaaaataaacacatttaatcttg

SEQ ID NO: 87774 - DNA, 488 bp, Homo sapiens
ccggggaattcggcacgagctgcccgctcgcctaccgttcaggctgctgagccttttccttcgtggatccgctcccacggcagcgcgccatggcctccgggagccgctcctggagaggaggtgcgctgccgcctcctccttccagcactcatcgagtctgggacgcgagcttccttatgaccccgtggacacggagggctttggagaaggtggtgacatgcaggagcgttttctgttcccggagtacatcctggatccggagccgcaacccacccgcgaaaagcagctgcaggagctccagcaacagcaggaggaggaggagcgacagaggcagcagcggcgggaggagcggcgacagcaaaacctacgggccaggtcccgggagcacccggtcgtggggcacccggacccggcattgccgcccagcggcgtgaactgctcgggctgcggagcagagctgcactgccaggacgccagagtgcccggct

SEQ ID NO: 87775 - DNA, 2944 bp, Homo sapiens
ttttttttttttgacctgtacaataggcactttattagtggttggaatgcagttacacgcaggggtgtgcagacgcaatgggggcagggctggtgcaggcacaggaaacgggagacccccccctctttcccctggggccaggggttctccctctccaggatcctgggacagtgctgatgagcagagacatgaagtctgagggggacttggaatatggcaaaggggcaactgggaagccagttcccctgagtttgacaagtttggcaaaaggatcaagtgaggtgtgtgggcagaggggcccggtttgcccaggacatctgccctccacctctccccctgaaatcatcccttgggtgggtttagtttctttcctctcttacaaagagagctgtgtcaataactggcagaggaagtcgggaaattcagcctaactccctccagcccagcaggtttccattaaacagctattagccatctcctctccagcctgctctccactgccaacccccgcaaaactctccctccctttccctccttcccagccaggagacacccccacctgggcacacacactcccacccgtcactcccagctaggagggagcaaaaggaaggcactccttggcggccccatctcagctgttgagacagacggaaagaaagctaatagaccctttaatgcatgtccaggttaaaaaataataataataaagaaatgcttctggtggcccttgagccaactgttcaggtgtggagaaggggttcagtcctggccggagcaggcaggaataaacgtgggtgttcactgtggccagcagctccctcagacacaaacaccgtccttcccgtggtctggcccgttgtcgtgtaagcgggggacaggaagcatgagggagcttgtggaggtcgggccacgtgccatcccagacatcaagaggccccaatgggtttttacttgtttctcgcagtctggaggggcagccatgaaaactccaagcgccccttggcataagaaggagatgccccagactctccacgtccagaaactggtgggatctggctcatggggaggggcagagcggcagtgataggacttcaggtgagcccaaggggctgggggaacagacccagctactgagcaccctgcggcatgagactccttgagaggtggggagcacggggccttcaggactccgctgccttcttgttggtcttgttcaagagtttcttgagggtggaagacatgaagtaaggcctctcggccgagccgtcattcctctccaggtcctccaagaagcagaggaacagcgtgtccacacacatgccatagacgctgaagaaaccgtgtgcaatcaagtaggagccaacgatcaccgtcagtataggaacccagtaataattgaggggtggtgctgtatcctgcacgatcctgatacggtgggtgaagaagaagaaagccaggatccccacactaccaacgatcagaagtttgcccaacaggaagaggaagtcagtaactttatccaggacagccactctgatgatgtttctcatgagcaggaagaaggcattcctggccgaggtgcagaaattggtgccgtagatggcaatcatgatgtaggcattcctattaaggaatttgatgaacttctccaggcaccagaagcagcatttgagacaggtcatgaggcacttggcaaacttgttctctgcagctttcagccgctgatccaggtactcgagtatcacacggatgatctgcacaatggccaggatgagcgcgccaaaggccagggagcctgtgtggtacctgagcgcccggccaaaggcagagaagagcgggaaggccggcaggtcgtccggcttgcgcagggcccagtagtaggaggcaaaggccccggccagcgtgacctggcccagcgccagcacgaagttggccaaccagaagaacatgaaggcattgaagatctgcaggcccagcagggcccggtggtagcccgactcaccaccgtagaaggcgaactggcaacgggcattggggcattggcgggactcattggaggaggggaaggtctctgggttgcaggttttcgcagtaaatgggcaggggctgtcatcaaagatcttatagaccgcttcgttggaagtggacaggaagacagcagtgctggcccagtaggcgatgcagaggcacagcaagaagaaggtgaccagtgggtagagcaaggagcacatgacgtatcccacagccctgctggcttctttgatgagtgcaatcgcgatgagaattctcttccggagaaagatgagcagcaagatgataatgacttcaaggatactcagaatgatcataaaggccaaccaggtctgccgtaagtgcaggtacacccggaaatccgtctgaaagccgaggtccaccaaagagacatcagagccggcctccccacgcagtcgggagtactccatgtagcagtgaaatattcggtagcccagctccgagaatctccatgatgatcatcacccagcccataataccagccagtaagtgaagcaggatgatggacaggaggctcatcgccatggcaatgaccaggcctatgataatccagtaccaagagacggtgtaatcttcaaatatgcgcatggcgagttgccgcgcctctaggactccattggctttcttggcgccctccaccaggtctgtgatgtttttccgggagccatgcccatcctcataggtcgtctcattgcccaccatcaggacacccttgtaggcgtggatagcggggaagcatctccgggccaagggtttcttgagggtggaacacatgaagtaaggcctctcggccgagccgtcattcctctccaggtcctccaagaagcagaggaacagcgtgtccacacacatgccatagacgcctcgtgcggaattccgcgagcgcgct

SEQ ID NO: 87776 - DNA, 747 bp, Homo sapiens
  misc_feature (1)...(747): n = a,t,c or g
ttttttttttttgtgctcaacatcatttattttgggaagggaggatttctccaccaacttcgaggcccccggaggcatgccctgtatcttccttcagggctgactcacagtccgttttgtgcttattagatgaataaatgagggaacagagaaggtaatgtaatatttgcctttcttatttttggataaaaaaatataagtagaatcagtattttcttcttgcacccatgtgacagtcttgagcacaccagggcaattgactgctgagaagcgccagggagcggggcacaaagttctgctggtgctgcctcgtaggcgtgtaaggatatccacttaagggcacagcagtggacagggctatgtgacctgggaaaggtgacttctttctctgagcttccatttccactcagtcagtgctggggtaaaaacatgtgtaaaagagcacacagagcatgccatcagcatctctaccttttgacacagtcaacgctggagaccactgagaccgcaggatatcaaggcagatgctgccattgctgttgatattagggtgataaattttggttgtgaaagcaacctttgggggcttggacggataatctgtaggaaagttgatggtcatgcatgacacacctgcttcgtaaggactgtcattcgggcccatgatggnagtactgcagtgggacaagtcatcaccgacaggtcctgctgacactgtgcaggaggatccctctgcaagtcgttaat

SEQ ID NO: 87777 - DNA, 1555 bp, Homo sapiens
  misc_feature (1)...(1555): n = a,t,c or g
tcgtcattacgcctagcttgtcacgagggatcaagttcatggaagtatatgctttttaaaaatcaaagggagactttgtgaccaacagggtcactgctgtagcaaaatataaaatatgccatggttaaagcagtaatgattttcttttgggtggggttcctagagattccaagaagacatcatgaaatatgtgagtgaaacatatcaccagtgaagttctgtctgcccggcactaactttttacttggcttgagttgtaggaggaacagacacctttacatattgcctcccgcctgggtaagacagaaattgtccagctgcttctacaacatatggctcatccagatgcggccactacaaatgggtacacaccactgcacatctctgcccgggagggccaggtgggatgtgggcatcagtcctattgggaaggcagggagcagcccactcctttaggcttaccaaggtaaggagaatgacatcatgagaacatggaccaagaggattcctaagtcatggcctttctgctctaccacatacagaatcaagagggtagatctcctcaggccttgacttacttccttctctacatatttaagactcattgtctaaatgatttaatagaattgtgagattccgtatatcttcaataaagagtgctgaatttcattctaattaatgccaatgtttctaggacaggtatctagtactctaagatgattttcactttttcttctcttttattataaaatccataatatattcttaagaaaaagataaatgaaatccctaaatatattgaactggtaatactaatgaggaagagggtactgcattagattggcagtactatatttgctgtgagttatagtaccagatcgaagctcaatttacttgtacattttcgcaaccctactattagccaccacttatttgacattctcattcccatattagtttccaactttaccaactacacttttgcctgggtatttacagtgtttaaagagagctgaagctggaaaatcacacttctttagttgttattgacatcgagcaaagaattttacttatgttccaagtttcatgacagggcagagtaatttttcccatgctttatacatgctgtttgacattccataattttggnagatgaccttagaataaaaccatgaatatacctcagcctaattagagcaaaattaattggagcccagtgcaagtgaatttgtcatggggcaaaataattcccccacaaatgtaacagtgattcagattaatgaaaggacaatttcaattctctcataatcagtaggtataagtacttcatccagggagagggaaagttgcaaatttaaactgagatagtgatgtggcatctgtccactttgtaagtaggagcagcccacttagctgttatggcttatctggttgcctgttatgacttacctggttgcctatggctgtaaaaggtattttgatataagaaattgacaattattgaagttcttgaactctgaaaagttggaaggattttaaaagttcttaaaaaaaa

SEQ ID NO: 87778 - DNA, 6390 bp, Homo sapiens; identical to SEQ ID NO: 80224

SEQ ID NO: 87779 - DNA, 836 bp, Homo sapiens
  misc_feature (1)...(836): n = a,t,c or g
caaaatggctctactcccctacatcatgcagcttccaaaaacaggcatgagattgctctcatgttactagaaggtggggctaatccagatggtaaggatcattatgaggctacagcaaagcaccaggccacagccaagggtaacttcaagatgattcatatccttctgtactacaaagcatccacaatcatccaagacactgagggtaacactcctccacacttagtctgtgataagagtggaagaagcaaaactgctggtgtcccaaggagcaatatttacatagagaataaagaagaaaagaanccccacaagtggccaaaggtgccctgggtttagtactcaagagaatggtagaaggttaaacagcttggatttcttcttactttctatgttgtgatgctgtccccagtgtcctggaaactaacatacttgggcacaggacatcatctacaaatgttttctcaccttcaaagtcttataaacatgttgactattgttcctgctgaggttcttattctaaacttacggcttgctttctgggcactgagtaactgctgactgttctactgttgtcacatattcttgtatactgaatttcggctaattctgagtaagtgattccgtggctgttgttaatcttcagcaacctccgagcatgcaccttgtatcagtctctgaaatagaatagctccaatagcaacaggctagtcgttctgctagatggttctaggtggactccgtgatgttcctccatacagttaaacatcctaacttgtttctcaagctcactcaggcctatgccagacagttgtttttttccccaaccatgagat

SEQ ID NO: 87780 - DNA, 1776 bp, Homo sapiens
tcgcacgagtgtggagccttacatactgggagaatttgaaaattgtcaaataacacgaaagtggtgaagacagaatacaaagccacagaatatggcttggcctatggccatttttcttatgagttttctaatcatagagatgttgtggtcgatttacaaggttgggtaaccggtaatggaaaaggactcatctacctcacagatccccagattcactccgttgatcagaaagttttcactaccaattttggaaagagaggaattttttacttctttaataaccagcatgtggaatgtaatgaaatctgccatcgtctttctttgactagaccttcaatggagaaaccatgtaagtcataggctgtatggattggtaatgtgacagaccttagtgatgctctcaaatatctggtgatgctcgcaaatatctggttctctccttccaggcacatagaatacggcacagtctggtcctttggggcttgggcagggccgtgacacaggttctggccaatgatttgcaagaggaattgatcagtatcactttaagtcctgcatttaattggcagcacaagatcctgcagagcctctttccctctgccacagttatcaagaatgggtcaggagaccgctgcttctgggcataagtcctgcaaggaaagcaacatggaaaacagccccaactcacccatgagggatgaaaagcactgttgagaaaggcatgtgttgtttaagccattgagattttagagctttttgtcactatctgtcaagactgatactactggggcttttcctattgatttgggagttctttacatattaaaaaaatgtgagcctttgtgatacgaattcaatttgttttcctgtcttttgacatttgactttgcataaaagtttatctgtgcataattttatatgtagttgaattcatcaatcttttattttgtatggctttttggttatgtataatacttagatcctccttatactctgagtttctttctttttaattctcctgtatttccttctagtataattaaatctgtaaaaagtaagatggaagagtggtacagttttctttatccagtctgtccttgatgggcatttaggtagactggataaagaaaatgtggtacatatacaccatggaacgctgtgtgtattaatccactctcacactgctatgaagagatacctgagactgggtaatttagaaagaaaagaggtttaattaactcacagttccacatggctggggagacctcaggaaacttacaatcatggcagaaggcgaaggagaagcaagcacttttttcacaaggcagcagatgagagagagagtgtgtgtaaaggaggaattgtcaaacacttataaaaccatcagatctcatgagaactaactcactatcccaagaacagcatggggacaactgcccccgtgatccaatcacctcccgtcaggtccctcccttgacacatggggattataattcaagatgagatttgggtggggacatatagccaaaccatatcaaatagcaattaaaaaaaatcacataagaaaagacactcttaataaaatacaaatagaaaatgaaaaaaaaccaactcataaacttggtttaaataatccatttgtattgggtcttagtaagaatactactactagtaactattatcaagcaactactgtgtcatgtacttttcacacattcttttaattaaaaactctccactaacccttacagttcagtattatccttgttttacaga

SEQ ID NO: 87781 - DNA, 2990 bp, Homo sapiens; identical to SEQ ID NO: 65450

SEQ ID NO: 87782 - DNA, 901 bp, Homo sapiens
cgcaggttcccgccaagtgcaggcagggttcagaaccatgcgtccatggttctttttaataatgagaagttacctctgtgctgtgtggacattaggatggtgtgttactcttgttaatgaagcttgtgctgtcgacctgtgaggtctcaaagttaatttttaatttgatcatgaacataccaaagcaaatgcttatggatattaaaggatttttatgtattctaattttcattgtaatttaaaaatcttcacagagagagtctgttatcagtagggaaatttaacgaggatattgaaaacggaaccacaaaatcattggcttggggtaccgtttttaaaaataaatttgcaaaaaattcattctacagttatttttatgaaaaattttccctaaggtcaatgaactcctatttggaaacataatttttattcagtgcctgtggaggccggtaacggttgctcatgcctgtaatcccagcactttgggaggccaaggcaggcagatcacttgaggccaggagttccagaccagcctggccaacatggtgaaaccccatgtctattaaaaataaaaaaattaactgggctttgaggcgtgcacctgagatcccagctccttgggaggctgaggcaggataatcgtttgaacccgggaggcacagggttgggccaacaaaaaatggggcaattgaatttaagcttgggggaaaaaaaaaaggttatggaaaaaggtttggaggaaactggcttcttatttcctggaggagaaaggggaaaaaaaaaaaaagaaaaatttgtgaaaaaagggatttataaaaagtaaggattgggtccttttaggaaaaaggaattgttgggggtctttttagaaagggcgttctaacccggaacggcaccccat

SEQ ID NO: 87783 - DNA, 421 bp, Homo sapiens
gaagactgtaaggcctgcggtgggcgtcggcctagagctcctcctcgggcagccgctcagcgaggccagagtgaagagcggcatttgggctggcgagtcggtagaggaaatgcaggtggagcgggtgtgtggctcggccttggcaggaggcgtgggggcagtgagcacagggacaggaagctggcagggagctaggagacccgcacggtggcacctttgggggacaccacggaccccgagaaaacctttcagcacaaaacagctccgtccaaacctgtgccggagacaggccaaactccagtagggcttccagtgccgcaggcccgtcgccaggaagaccccagccacccctcaagagcccgcctgagaaagcttgcggtggtaaacccttcctcagcctctctgggatgtgagtcctcta

SEQ ID NO: 87784 - DNA, 2172 bp, Homo sapiens; identical to SEQ ID NO: 72864

SEQ ID NO: 87785 - DNA, 2865 bp, Homo sapiens; identical to SEQ ID NO: 65229

SEQ ID NO: 87786 - DNA, 2688 bp, Homo sapiens
  misc_feature (1)...(2688): n = a,t,c or g
gccaagagtccgcaggatgcagtggacgaaggtgttggggctggggctgggggctgctgccctcttggggctggggatcatcctcggccactttgccatccccaaaaaagccaactcactggccccccaggacctggacctggagatcctggagaccgtcatggggcagctggatgcccacaggatccgggagaacctcagagaactctccagggagccacacctggcctccagccctcgggatgaggacctggtgcagctgctgctgcagcgctggaaggacccagagtcaggcctggactcggccgaggcctncacgtacgaagtgctgctgtccttccctagccaggagcagcccaacgtcgtggacatcgtgggccccactgggggcatcatccactcctgccaccggactgaggagaacgtgaccggggagcaaggggggccagatgtggtacaaccctatgctgcctatgctccttctggaaccccacagggcctcctcgtctatgccaaccggggcgcggaagaagactttaaggagctacagactcagggcatcaaacttgaaggcaccattgccctgactcgatatgggggtgtagggcgtggggccaaggctgtgaacgctgccaagcacggggtagctggggtgctggtgtacacagaccctgccgacatcaacgatgggctgagctcacccgacgaaacctttcccaactcctggtacctgcccccctcaggagtggagcgaggctcctactacgagtattttggggaccctctgactccctaccttccagccgtcccctcttccttccgcgtggaccttgccaatgtctccggatttcccccaattcctacacagcccattggcttccaggatgcaagagacctgctctgtaacctcaacggaactttggccccagccacctggcagggagcactgggctgccactacaggttgggtcccggcttccggcctgacggagacttcccagcagacagccaggtgaatgtgagcgtctacaaccgcctggagctgaggaactcttccaacgtcctgggcatcatccgtggggctgtggagcctgatcgctacgtgctgtatgggaaccaccgagacagctgggtgcacggggctgtggaccccagcagtggcaccgccgtcctcctggagctctcccgtgtcctggggaccctgctgaagaagggcacctggcgtcctcgcagatcaatcgtgtttgcgagctggggggctgaggagtttgggctcattggctccacggaattcacagaagagttcttcaacaagctgcaggagcgcacggtggcctacatcaacgtggacatctcggtgtttgccaacgctacccttagggtgcaggggacgccccctgtccagagcgtcgtcttctctgcaaccaaagagatccgctcaccaggccctggcgacctgagcatctacgacaactggatccggtacttcaaccgcagcagcccggtgtacggcctggtccccagcttgggttctctgggtgctggcagcgactatgcacccttcgttcacttcctgggcatctcctccatggacattgcctatacctatgaccggagcaagacttcagccaggatctaccccacctaccacacagcctttgacacctttgactatgtggacaagtttttggacccgggcttcagcagccatcaggctgtggcccggacagcggggagtgtgattctccggctcagtgacagcttcttcctgcccctcaaagtcagtgactacagtgagacactccgcagcttcctgcaggcagcccagcaagatcttggggccctgctggagcagcacagcatcagcctggggcctctggtgactgcagtggagaagtttgaggcaaaagctgcagccttgggccaacgcatatcaacactgcagaagggcagccctgaccccctgcaggtccggatgctcaatgaccagttgatgctcttggaacggacctttctgaaccctagagccttcccagaggaacgctactacagccatgtgctctgggcacctcgcacgggctccgtagtcacattcccgggcctatccaatgcctgctccagggccagggacacagcttctggatctgaagcttgggctgaggtccagagacagctcagcattgtggtgacagccctggagggtgcggcagccaccctgaggcctgtggctgacctctgaccccagccctctttcttcagccctccctttactccaaccctctcctgcctgctttcctgagatgtcctggtcttccttggtgccagaagagggcactaccacaggaccctctcaagcttctcaggcaacagcttgaggtccctgaggggagtggcaagccctaatgcaactcaccctcatcctggtgcttaggtggcagagggtgggcagcaggggacagggatgggatggcaaaaccaccaactgcccttggtggcaggtgggtggagatgggatgcgtgccaacctcagatgccaactcaggtcatcaaggccaaggaccagtggcgaaagtgagtcttggggtaccttaggccttggctagtctgcgttcctctccctgcatgctgtgtatcctaactccctacaacagcccctcaaataaatcacatctagtgactggtaccaaa

SEQ ID NO: 87787 - DNA, 473 bp, Homo sapiens
gccccttctcagacgtgcttcgtgacttcattcagctggtgttgcaagaagcaggtcttggacctagaggaggagggtctgtggccagaactgctggatagtggcaggattgagatttgtgtctctgactggtggggagcccgacacgacagcggctgtatgtacagactcctcgtccaacttctagacgccaaccagactgttctagataaattctctgctgtgcctgatcccatcccgcagtggaacaacaatgcctgccttcacgtcacccacgtgttctccaacatcaagatgggcgtccgctttgtgtctttcgaacaccggggccaggacacacagttctgggctgggccactatggagcccgtgtgaccaactccagtgtgatcgtgcgagtccgtctgtcctagtccagcactacccttcttgcaagacagcctgactgtgccttccagggcctgggaccattgg

SEQ ID NO: 87788 - DNA, 1779 bp, Homo sapiens; identical to SEQ ID NO: 65486

SEQ ID NO: 87789 - DNA, 791 bp, Homo sapiens
ccatggccgcgggattttcccgggtcgacgatttcgtccgcgcgctccgataccagttgatagttaatgatgagaaaaagaccaataaatgacagtgctgccaataaaaataaaattatcagccttatctttatcttttcgtataaactcagcatgttaatacatttaacaaaataactatctgaacgctgtgccgctgcaaaaattgtcccttgctgcggctttttaaccgaattacccgattctacaaaatcagcagaaagttacaacacttgcttagggcaataatttcctgtgaggtgattaccctttcaagcaatattcaaacgtaactatcctttaattttcggatccagcgcatcgcgtaaaccatcgcccaacaaattgaacgccagtacggtcagaaaaatagccagggccggaaaaacagcgacatgcggcgcgataaccatatccgctcgagcctcattgagcattgctccccactctggtgtcggcggttgcgcaccgaggccgagaaatgagaggctggcggcagagataatcgaggtaccaatgcgcatggtgaaaaacaccacgatagaagagccggtcccaggcaggatatgacgcaacaaaacggtcatatcgctggcaccaatactgcgtgctgactcaataaaggtctgctgtttcaacaccagcgtgtctgccgcgcaccaggcgggcaaacgcggggatggaaaaaatggcgactgcaataatcacgttagcaatgccgcttcccacgaaatcgtcgacccgggaaatca

SEQ ID NO: 87790 - DNA, 293 bp, Homo sapiens
agggcctgggtagcactcgcccaattgacatgcgtgagctctgtgctccttcacccgacatgcgcgggctccgtgctcctgcacctggtgtccatgggctctgtactcctgctgaggcagtgctgggcgtcggcactgatcatggccaaggttggaggaggcatctcgtgggaggcctgcaggtcccaggagggtggaatcaaggcagccagcctgagcccagggtggaggctctgccttcccaacgggggcaggacccagaagaagagtgaggccacagaggcagatctcga

SEQ ID NO: 87791 - DNA, 377 bp, Homo sapiens
cctgggctggtcatttctcttgctgtgcccaacctgccattaatcccatccatcctgagcccgacgtggtcatttctctcaccacccagcctaccgcccgacgtggtcctttccctcaccacccagcctaccgcccgacgtggtcctttccctcaccacccagcctaccgcccgacgtggtcctttccctcaccacccagcctaccgcccgacgtggtcctttccctcaccacccagcctaccgcccgacgtggtcctttccctcaccacccagcctaccgcccgacgtggtcctttccctcaccacccagcctaccgcccgacgtggtcctttccctcaccacccagcctaccgcccgatgtggtcctttccctca

SEQ ID NO: 87792 - DNA, 1382 bp, Homo sapiens
gatgctggagccccaaggcaggaaggacaggacagcctcaaggcaggaaagatggctctgggagctgtggctgtaacttgctttatgtgtccagcatctccgtgagcatctggtgtctcagctcaagtcaaccctggccagactccaataacagacacaagaactgagaaggtggccctggttaccaaaaaccagaggaccctcattaacatccccaaatttcaagccagactgaaatctgtcaaaaaaaaatgacggtcccagcctacccccgacacgggtgggaacagagtagggctgggcccagctagagcctcggcctgggggttgcttgcacctgcgggggcccacagactgagggaggcggttgggcttccttccattcccgacagcagagccccgtgcgtcgtgggagtaaaacgtgcgatgtgtgggcttcccccgcaaacaggatctggagctgggcgccggcgccgtctgcagggaggggctgagccagcaggtccaggtcgcccccagtactgcccacggccacgtagctgtaggaccccctagtgtacggggcgctgtgccagcgatgacagcaggacgctcttgggcgcggggagccgtgggtttcctgtcactctccggagcacttgggtgagacacagaagtacttcttcatccgacagagtctccatgaactcagactcaagtccggcaatgaacccacagagaacgtggacagacgcaaaggcaggcaggaccacaaagccaatgagcttccggaaccaggcgtcctgtagctcaggggcagcatcctccaggggcgacgtgtcctcccacaccagctggatcagctggcagtctggctcccagaagggctcctcaaactccaggaagattttgttgttggtcccaaagcctatcttcctgattgcttctgccttctcagccggcaggggagggtcaaagaaggtgtccaaatgttccctaagaaaacctaagggcacggtgacgatgacatggtgcgccgggaaccggtctccatcctcacactctaccgacactggaaaggtctccccgggaaaggctgcctcctggaaggacccgttccagtggatggtcttcacaggcttctcaaaaactacagtgtcctccggcagggcggccatcatgcagtttgtgagtccttgatagcccttagaaaaggtgcagtccagccccggcagcacggtatactccccaaagggtgccagggccaccaggtccatgctgtgggtgccgctcacacagcattccaggttgaagaaggagttcaggacggccagcttcagcttcctggtctcctcatcctctgtccagccggccacgtgctggccaatctccttcttgaggcc

SEQ ID NO: 87793 - DNA, 1484 bp, Homo sapiens
gttggtttatgttatgatagcaattttctgcatagcatcagcaatgagtctgtacaactgtcttgctgcactaattcataagataccatatggacaatgcacgattgcatgtcgtggcaaaaacatggaagtgagacttatttttctctctggactgtgcatagcagtagctgttgtttgggctgtgtttcgaaatgaagacaggtgggcttggattttacaggatatcttggggattgctttctgtctgaatttaattaaaacactgaagttgcccaacttcaagtcatgtgtgatacttctaggccttctcctcctctatgatgtattttttgttttcataacaccattcatcacaaagaatggtgagagtatcatggttgaactcgcagctggaccttttggaaataatgaaaagaatgatggaaacttggtggaagccactggtcaaccctcagctccccatgaaaagttgccagtagtcatcagagtaccaaaactgatctatttctcagtaatgagtgtgtgcctcatgcctgtttcaatattgggttttggagacattattgtaccaggcctgttgattgcatactgtagaagatttgatgttcagactggttcttcttacatatactatgtttccgtctacagttgcctatgctattggcatgatacttacatttgttgttctgggtgctgatgaaaaaggggcaacctgctctcctctatttagtaccttgcacacttattactgcctccagtttgttgcctgggagaccgtaagggaaatgaaaaagttctgggaaagggtaaccagctaaccagatgatgggaccattttgggattggtgcaacaaatgaagaaaaccctgtgatatctggtgaacagattgtccagcaataatattatgtggaactgctataatgtgtcattgattttctacaaatagacttcgactttttaaattgacttttgaattgacaatctgaaagagtcttcaatgatatgcttgcaaaaatatatttttatgagctggtactgacagttacatcataaataactaaaacgctttgcttttaatgttaaagttgtgccttcacattaaataaaacatatggtctgtgtagtttccgagatgtactatatacagtatatttttctaaaaaaaaatgccttgacccacccctatacttttttttaacgaaatctgtttctttcagctctgatggtagatacaagtagttactatttctgaatgggttttactgtaaagaattatgcaaattggccgggcgcggtggctcacgcctgtaatcccagcactttgggaggccgaggcgggcggatcacgaggtcaggagatcgagaccatcctggctaacacggtgaaacccctctctactaaaaataccaaaaattagctgggcgtggtggagggtgcctgtggtcccagctactgggaaggctgagacaggagaatggc

SEQ ID NO: 87794 - DNA, 424 bp, Homo sapiens
agccgtccccagataacattaggtggcgtgagatagcccgcgtgggccgcggaaatcagcgtataacccgcgttcatctcttttgccatatccatcgccagcttgatcatgtcgaggctttcgcgacgcatatgttcatcgcccagcatcatgttatacggatagccgttggtttctggcgtatagccgataatcggcatctgatacgtctgcgccagcgccttgatttgtttgatgccgcccgcttttaagtccggcgcgaacgcgtgcgggcgaccgccccaaatttcgatgccgtcgtaacccagctcgcttgcatcacgaaatgcgtgttcaataggcagccgctggtggccgcaggtaaacatacctgttttcatcgggtaactccttgcgtaaatccggcccgttgccgggccgggag

SEQ ID NO: 87795 - DNA, 499 bp, Homo sapiens
agaacggatatcgtacttgtccagatcgaagtaaacgatgttgttctgctgcagctgttgcatttgcagacgagcctgctcttcggaagacatgttgccgttgccgccgttcgcatccataccagtgccggcacccagcatgccttcgctgccgtcattgctggcgttcttgttggaagaacatgccgcaattgccataacaggcagagcaatcatcagccctttcagcactttgttcagttgcatttcaatgattcctttactattcaattaattattatcacagatacggcgaccaggcagggaatttgacctgtccatcagttgccggaagacgcgctttgaaacgcccatctgtagaaaccaaattcagcacggatcccatcccctgagaagagctgtagattaccatagtgccgttaggtgccagacttggcgtttcatccaggaacgtggacgacagaacttgtacgcctcccggtgccagatcttggttggc

SEQ ID NO: 87796 - DNA, 145 bp, Homo sapiens
taccggaaggtggggcagaagcgtttaggattagggcagcatgggaggaaggcaggtggtgggaaccaggtcccgggaggcggaggcccagggagaaaggcctggcacaggggctgggggcatacgaaatcgtcgacccgggaaa

SEQ ID NO: 87797 - DNA, 1620 bp, Homo sapiens
tttttaatcttcatggctacatctgaacagcggctgagggatatatatgccaactttgggagttgcacaatttttttgagaccatttcttagatgactagggactgtaatttctcttaatttggaatagccacaagttgttgtagccaaggtttgtgtgtgtttttaatacaattcttaaaattttagtaggcttctcatctgtagatagatttgaaggggtgggttgcccctccacacctgtgggtgtttctcgtaaggtgggacgagagacttaggaaagaaaaagacacagagacaaagaaataaggggacccggggaaccagcattcagcatatggaggatcccgccagcctctgagttcccttagtatttattcatcattcgtgggtgtttctccgagagggggatgtgtcagggtcacaagacaattgtggggagagggtcagcagacaaacacgtgaacaaaggtctttgcatcatagagaatgtaaaggattaagtgctgtgcttttagatatgcatacacataaacatctcaatgctttacaaagcagtattgctgcccacatgtcccacctccagccctaaggcggtttttccctatctcagtagatggagcatacaaccgggttttataccgagacattccattgcccagggacgggcaggagacagatgccttcctcttgtctcaactgcaagaggcatgccttcctcttatactaatcctcctcagcacagaccctttacgggtgtcgggctgggggactgtcaggtctttcccttcccacgaggccatatttcagactatcacatggggagaaaccttggacaatacctggctttcctaggcagaggtccctgcggccttccgcagtgtttgtgcagtgtttgtgtccctgggtacttgagattagggagtggtgatgactctcaaggagcatgctgccttcaagcatctgtttaacaaagcacatcttgcaccacccttaatccatttaaccctgagtggacacagcacatgtttcagagagcacggggttgggggtaaggttatagattaacagaatctcaaggcagaagaatttttcttagtacagaacaaaatggagtctcctatgtctacttctttctacacagacacagtaacaatctgatctctctttcttttccccacatttcccccttttcttttcgacaaaaccgccatcgtcatcatggcccgttctcaatggtcgctgtctcttcggagctgttgggtacacctgcagacatctccgtggaggcccttttctttgcatctccaatgggttcattgtagaacttcaaatgtctagtgggtatccaaacaggaagctgattttctccgtaaggctgactgtagatgtactcgggatctctcgtcgacttgtcctcaatgaccacgctcgagcgtaccttcacctgctttggagaaatcctgaatgtgtccccagaaatgagacgagaagtcttctcctgatcaaaggtcttttcttgattgaagggttcgtggtttcacaggcttcaaggaaagaagccatggacctcagtggtgagtgttacagctccattagagaaacatgcagacccaaagag

SEQ ID NO: 87798 - DNA, 1281 bp, Homo sapiens
tttgagaccttcgtagaccctagtcagtgtggtggaattcgtgagaagggcagatctcacgagagaggatttggcgccctcctctgtggattctggccaggccgggttcggcggttgctgtgagagcgggcttcccaacaccatgccgtccgccttctctgtcagctctttccccgtcagcatcccagccgtactcacgcagacggactggactgagccctggctcatggggctggccaccttccacgcgctctgcgtgctcctcacctgcttgtcctcccgaagctacagactacagatcgggcactttctgtgtctagtcatcttagtctactgtgctgaatacatcaatgaggcggctgcgatgaactggagattattttcgaaataccagtatttcgactccagggggatgttcatttctatagtattttcagccccactgctggtgaatgccatgatcattgtggttatgtgggtatggaagactttgaatgtgatgactgacctgaagaatgcacaagagagaagaaaggaaaagaaaaggagaaggaaagaagactgaggggcagcagctgcttggagtttgcgtccttcccgtccacccagtgcagctcccagtgctgcagtgtgcgtggcgtgggcatccttccagctgactcatggtttgaaaaaccgttgttttatttaaatatccacagtggtagggcacacactgaagttggcttttcagccagcactgaatgtatccatcaggacatgcgtcttcaggtgcctgatctttgtagtcaggctgtgggaacggtctctgcagagcttcataactgggaatttgatttgaagaagtccatgtcatatgtgtaactagtactaattataaatataaaatacacaatataaaatatgaaactcaataataaacagtgccacctgtacatgggcaccatgccctcctcctcgtgctgtgttttctagtgcatgccacagttcgcagtagagggtgttttcaccttccaagacatggggcaaagtttggagacacctggttgtcactggagggggtggtgctcctggcttctcctgtggagcccggggtgatgcataaaatcctgtgtgcctgggtcagccgcatcacagacaatgacttgacatgaaatgtcagctgtgctggggcagagagaccttggaaggaagctcttggaaaatacgttgtatctcagtttgatgaaccaattcacaagaggctaggccctctctagcaaagttatgggctgctttact

SEQ ID NO: 87799 - DNA, 816 bp, Homo sapiens
ttttttttttttgcaagtggaactttgaacatttattacacgtttaataatatttcaaaattattgataattcttttggatgtgataagctttgtaattgtcttttaatgagctctcatcttggagagatacattctgaaatatttacagaagaaataatccgatgcctgagatcagcttcaaaagaactcaggatggggcagggacgggttgtaggtagtcggtagtcagggtactgggtacacggatgttctttgtactgttctttggtctgttgcgcaggttcgaaatgcttcctaattaaaaagcctaaaaagggacttggcaagctcccatccagacttcaaccccacaatatggagagcactcaggtccgaggcgttcctgctccccagctccctgcaaaaatagcgccaggcaaggtccgaggcgagggcgatgcttccatgagggtcccgccgactgcgtcgcgatcctcaatggctcagcgacttgcggcccttgagcattcggcgaaggatgacctgcacgccggccggcgtgctcaggcgccggacccagccgtgcttgttcttgcgtttgatgttgctcggctgatactcattcccgcgagccttgccccgggcctgctgcggggtggggaggccccaggcgtctgggaaccccagccaggcccggggctggagccacctgccacccagcaacgctgccgacctactcgtggggcccaacagggatccagccaagacagccatatccgcagtgggtcccgcagtaccggctgcgggcgattccggagcccagagccgctccagc

SEQ ID NO: 87800 - DNA, 749 bp, Homo sapiens
cggcacgagaggttgtagtccattcactttggaactgctatccacagaccatcagctttttgtcagtcagttgggagttaccatagggcattgtccagtgatgacagaatccagcaactcctcacacagttccagagtcaatcccaggggaaaagaggctccttacttgtagctcctccttgcattcctcagatagcatgatcttgtataaacatttaaattctgtagtccaaagtcccagtggttgtcatcgggaggcactcaacaggcttttgtcacaaggcctagcagtctccacatagggctatcacaccaagaatttgtctatatcagcactccagccttctgctgtactgtttggacttgggcgctcttactggttctcatgtagcatgtcccattaatgttgcttgaagagtgagtttatgtgccttctgttttacaatattgggtaggcagcaatagattattttctgtttatggagaaagcatgctttgtagagccttaaaaacacacgtgttaatagctaaaactttaggtacgtgagggaaacaaatcttctaacatgttgcttaatgttagttaattgttttttgtcttccttaggctgacattttggatgtcaatcagatatttaaagatttggccatgatgatccatgaccagggtgatctgattggtatgtattattgatacctttaacctcaaggtgagttgatagtatttggcatgcatctgtaatcccagc

SEQ ID NO: 87801 - DNA, 757 bp, Homo sapiens
ggctggtcacaactccggcggcccaaggagctgctcggttcacccacaaggaatgagagctgcctgcctgctgctgcttggagagccccagacagtcgcttgaagaggtgtgtggatgtctcctagatcttgacttgctcctgaggaaatattgtgtgactgagtttcctgttatactgctctccaatccatcatgaaccagccagagtctgccaacgatcctgaacccctgtgtgcagtgtgtggccaagcccactccttggaggaaaaccacttctacagctatccagaggaagtggatgatgacctcatctgccacatctgcctgcaggctttgctggaccccctggacactccgtgtggacacacctactgcaccctctgcctcaccaacttcctggtggagaaggacttctgtcccatggaccgcaagcctctggttctgcagcactgcaagaagtccagcatcctggtcaacaaactcctcaacaagctactggtgacctgcccattcagggagcactgcacccaggtgttgcagcgctgtgacctcgagcatcactttcaaaccagccaggcatggggcacgcacctgtagtcccagctacttgggaggctgaggcaggaggattgcttgagcccaggagttcaccactgcagtgaggtataattgtgacacagcactacagcctgggtgacagagcaagacccccatctctgaaaaaaataaaatacaataacattaagctaaaaaaaa

SEQ ID NO: 87802 - DNA, 342 bp, Homo sapiens
gaaaaaaattcacctgttgtcataataaaggaatttaattttggattattttccactcttacactggcattgatttgggttagtatccacacgaatgtactgatgcttttcacattggttctgaaagactttccccccattttcctttgtggtgttaaagcagccccccagccctccttacaggaatgttgaagattgggagggggatgcttggttgaggatgcttgtgacacgtaactctagacttttttttaacacggaacacttcacgactctgcgtgtcatcttgcataggccagttttagtgcaagtgctgctggagtgagtgcataaccctggatt

SEQ ID NO: 87803 - DNA, 358 bp, Homo sapiens
ggaatactgagggggaaatggacttggtgggtacaaggatgaccacaagctcagttctggacgtgtcaaagaaatcatggcccttggaccaaatctgaccctccacctgttttgtgtaaataaagctttactggaacatgggatcctcctaagtttaaatattgcctgtggctactttcatgctatagcaatagagttgaatagttctgacagagaccatatgactcacaaagccaaaaatacatattatctgcagaaaaagtttgctgggcttttgtgtaggacatccaagggaagtaaagtatcaaagaggcagttggatgtgtagctataaaaatgtaatttgaggctgggcacg

SEQ ID NO: 87804 - DNA, 502 bp, Homo sapiens
  misc_feature (1)...(502): n = a,t,c or g
cattggtcctggtgcattctttcaccataggatcatctaacaaaatcagagggtcacaaggctaggtaaataaaggtgttattatgtgaagtcaatttttactatttgtcgatactggaaggctgtgagtttttcagtacagctgaaaatcaatgtgtcttcaatagaggaaatcaatttcttgccatgttggtactcgaagagccatatcctacatgacatttgccctagaatcctgttattggctagaaaattctgaagttataatatctgaaaagtatagccattaaggaatacttctaatgctaatataactctttttagtgaaggatgagttaagatgaaggaataagcagaggaggaggaagagtagaaggaagaagggttgggggaggaggaagaggaaaggagggggaggaagaagaggagaggagcaggggaggaagaagaggagatggggagaggaagcanctattcactttcacacacactgggacctttc

SEQ ID NO: 87805 - DNA, 508 bp, Homo sapiens
ctggattgcaaagtaaaatgtacttcttactgtgtttgcagtcagaaactcttttgagtcactactttagagtatgctattgtgagataggtaaaatttcacccaataatatcaatatacgtgcaaaattctgtattgaactaccaccaacagtactggaagaaattaagagtctatgtaccgaatacagaaatatttatctgtgggagaaacagccaaagtaggtggtttaaataaaacaaaacatacacactgagctggaacgtgaacacagaatatggtacagactcagattcctactaaagttacaagcaagagttctcatctcttgatgggcactgaccccaacaacaggcctgggcacaggtccagcacttaactcagagggatgccgtgtgctgctgcatggtctgttaccaacatctcatagaagagagcagaaaccacttaggaacacagctgatttaggaaggtttttctaaacacacatagtttaggaaggtttttc

SEQ ID NO: 87806 - DNA, 377 bp, Homo sapiens
  misc_feature (1)...(377): n = a,t,c or g
tgggctcctgtctgactttaccaataactaggtatgaattttttttcctgttttctgtgaactgaggagactggactattgtgcagattctagggtccctttcagatctgaagtttcatgattctgagcatgtgtgaattgaacctttgaagtaaagaaggaatcattttgtcaagtaaagacactgtcttttaaagttctgatttcccgttgacttcatctcctccccagactgctgcggtgagaatggtgacatgcttgtgtgtaatcttcagactttatagtttcagtctttggggtgaatggcaaggtccccactgtgcagtgccattgctttcggacattagcctgggaacttnctgtgtganactngggtc

SEQ ID NO: 87807 - DNA, 313 bp, Homo sapiens; identical to SEQ ID NO: 36569

SEQ ID NO: 87808 - DNA, 331 bp, Homo sapiens
tggtggtgtgtgcctgcaatcccagctacttgggaggctgaggcaggagaattgcttgaaccctgtagctggaggctgcagtgagccgagatagtgccactgcactccagcctggtgaaagagtgagactacgtctcaaaaaataaaataaaataaatttagcataaaaacagaccttactttttaatcattaggaatatgcaaacattacaatggtaacagaagcattcattgccttttaatttttagtctcatacctttgaatacttgttacagtgctcagaagaaagaatcaatccaggtaagttactgggcaagtcaagacgtctgg

SEQ ID NO: 87809 - DNA, 455 bp, Homo sapiens
attttaaatacacacacccagggggctctgccccctgtaaaagaaaaaaaatcaaaacaaacaaataaataaccccaaagagatggacccaggggagaacgcgtaagtgtgaggggcatgagtatacacgagtgtgcgtgtctttccctctcccttatttgtctccgtatgagtctctccttgtaccctccccctgcctcgatgatattactcccccagacttggaagccgctgccagagtgacgctttgatggtatctgcaagcgtttttgctgatcttatctctgccccctgaatattaattccctaatctggtagcaatccatctccccagtgaaggacctactagaggcaggtggggggagccaccatcagatcataagcataagaataatacaaaggggagggattcttctgcaaccaagaggcaagaggcgagagaaggaaaaaaaaaa

SEQ ID NO: 87810 - DNA, 373 bp, Homo sapiens
  misc_feature (1)...(373): n = a,t,c or g
aaaggacatgaaaagaatattgatgttgcgcatccccacgcgggtccctgtgccccaagagtcagtcatcagatcctgcatagggtgcaccataaacctcacatagactggcatatccataccagagaagtcctgtgccttgcacctgatagaggcctggaagataacaagcttcatggcatttctcctgacctgcctggtgagatatccatactggaaatggcagcctggcatgtctaggcagcaaagcctgcaagaactccatgagatcccgtgtgatcctacagtagtttggaagagcacccaaaatgtcccaaggccttcacactcccttatgaggggctcanaagtagctgagaggggccagcaggtn

SEQ ID NO: 87811 - DNA, 311 bp, Homo sapiens
ctcgttgtgaaattaaagtgttaacagaggctgaaagaacatgtaggcttattgaggtcatgtacactcacctgatttggcatgtttccctttacatgtgtccaagccccagctttatataaatactgagctgggctcagaaattttgctctatattcggaattcaccttcctaatagaaatgaaatgaaagtaaatatttcaccatgttaatcattgaaataccatattttcctattaaaatacatacccaagcctttgatgtttccaaggagtaagcttccttttaggctggtgtaagtcttttaattg

SEQ ID NO: 87812 - DNA, 461 bp, Homo sapiens
cgactttctccagtgatgtatctgttactgacttcagaaggaggaccctcttcttttttctctctctctctcaaattgttttcacggattaagaatgtagaagatggaaacgtttttcctgcaaccttgtgtatttgctctttctacttctctatctttgcttagcaattaaaacacctctcttagggctccatcaaacagaacttttagactgagtaacgctaaacatctcctaatcccttttttccttgttgagataaaagagctaggcacttagtcgtattaccgaattctcagtttgccagatatgtactaatatagtccagatgaggaaaataaggctgaaggcaagctaaacttgcctgaagccacattgctaggaagtgacagaaccttgtaaacaagatttaagatttgatatactttcttattttctaaaaatttctaagaaatggggtacc

SEQ ID NO: 87813 - DNA, 800 bp, Homo sapiens
  misc_feature (1)...(800): n = a,t,c or g
cagttattgttctcatagcagtgttatcttcttgacttcctccagcactgacttttcattataatccttaaacatttggtcattgtggattagaggtgaatctcccccttgttgtttagaattaccagcagttgcagagagattttatggaggatgatcacgagcgagcagtgtcggtgactgctctatctgtccagttcttcaccgcacctactctggtgagtagtgcttgccttttctttgtaactgatagctggcactccttgcctttttttgccttcttaatagaactatgagcgtttgcagagtgattatgtgacagatgaccacgacagagagttttcagtcgcagacctctcggttcagatattcacggttccttcacttgtaagtactgaaagactagaagaactttcttgttttccattaacagaggccttaaaataatagagaactaaagtctgtatattcctgaaaagaatagtattttattaatgggtaatcagacttcaaacaccttcactattcttttactagaatataaccttgaatatcaaagtcatctggtaggnggggagcatttaaacttaatttatactttctcttcagagtaaaggagagggaaacaatctacaatttttcatagtacttncctgagatnntgactgattagttcacattaagccgaatgatttcacaaaatatccttcacgttagnattagacagcataatgtacaccgtctcacaatttgagaagtctcctcccactncctcccaaagggagatgagctaagccatt

SEQ ID NO: 87814 - DNA, 304 bp, Homo sapiens
ttttttttttttgaaacaaagcctttttttgcccctcaggcgggagggcaggggcccagccggggctcactgaatcctctgccaaccgggttaaagcagttctccggcctaaccctttcgagaagcgggaataacgggccccggccccccccccgggtaaattttggaattttaaggggaaacggggttcccccaggtggggcgggctagcctcgacccccggacctaaggggaccccccggcctggcccccccacagggggggaataacgggggggaccccccggcccgggcctacctttgaa

SEQ ID NO: 87815 - DNA, 420 bp, Homo sapiens
  misc_feature (1)...(420): n = a,t,c or g
ggcacgaggacttttcccagaaagcaaatatgctgtgttatttgcctaccaaggaggcttcggaggtagaatttggtgcctacagactggcagtggggaggtgtgtgggctgttgacaaagtcctgagcaggaggatggaggggaggttttatagagagtaagagctgcttggaatttggaagtnccagaggggtgttgtagcttggagaggagcaggaaggggcagtttagtgtggccagctctgcatagtgactgcctgtaaggagatgggacttcctaggaacctgaggctcagatacatgtcatgtgccgtattctggtgctcgaaggccaacttatccattttgaggcgggttaaatttgacttcaaggtgtaactggtttcagggggaaagagtgtgcgtacacaattcaccca

SEQ ID NO: 87816 - DNA, 343 bp, Homo sapiens
ggcacgagggaagaacaggatttgaggcatgagagggctacaaggtgggcttggcagaaaaccagcttggccaagtccacactttcatgtctacggtgagagaggaaccatgagcaaatgtttacaattttttgtgcttctgctcaatttttttctctccaattgactgggtaagcctcctgccatagtcaaagggcttcattcatttgttcattcactcactcaccaaacaagtctgtctggcacaacacgaggcatgggggccgtggtcagtgtgagtgagactgataggtctctctctcccacagtctgatggacaggcaggcagacagatacagagcag

SEQ ID NO: 87817 - DNA, 342 bp, Homo sapiens
ggcacgagcaaaggactagtctgactaatctatgatgttatatggtttaccttccctcccaaaagtaagcagccatactggcaaatgtcctctttatccattcactcagcatttattgtgcaccaagagcaccagcactacatactgcatgttatgtgtgtgtatctatatagtactataatacaggaattgtccctgtcctgatgaagcttacaatttagtgggaaagtcacaatagacaaaggatatacaaaaatataattacaagtagtgcaaagtgctataatttaaaaggggaaaaaaagaatgtactggtagagagcagaggaaaaacaagggggc

SEQ ID NO: 87818 - DNA, 357 bp, Homo sapiens
ggcacgagcggcacgagctcttatttggtcttagttctaaaaatagcctcatatttaatgttcatcacaagttgatgtctctctagtaattttgattgcatgaaacttgttctctaatagattcctctgcaaaagctcatggaagcaatagttcctgaattcttatatgtcagtaatggcttattggtggctttcatacttgagtctgttaggctctatacaaaatccttggttctcatctcttttcctttagtatcttaaatgttactctattttcataggatataaaacattgctattgaaaagcctaacaacaattcaattttatgttcattataagtcacttggtctttttgc

SEQ ID NO: 87819 - DNA, 449 bp, Homo sapiens
  misc_feature (1)...(449): n = a,t,c or g
tcaacagatatttttcaaaacatttttatatcgctttgattcatttatatgggtatataattgatgatagttgaaataagagtggcaaaggattatatttgaagctcaaaatggaattcattttactgtttcctcagcttttgagtgtgtttgaaatattccaaaagaaaaatccagacttgaatggtgtattcctgagagagagttgcaatggccatctccacaaaacacctgatgactgaggaatagatgagacgagggcagatttttagtcataaaaaatgagttcagattgagttgaagtttttgcctactgtagatcattagatggactaatttttcatttatgcatatgtcanactataattttgctgagacatagtatggntagaaggacgtagtagaacttanagctagattaataatgaagccccatatagaaagctctg

SEQ ID NO: 87820 - DNA, 388 bp, Homo sapiens
tcagacaagaagtatgatgaagccattaagtgttacagaaatgcactaaaatgggataaagacaatcttcaaatcttaagggacctttccttactacagattcaaatgcgagatcttgagggttacagggaaacgaggtatcagttacttcagcttcgacctgcgcagagagcatcatggattggttatgctattgcttaccatttattagaagattatgaaatggcagcaaagattttagaagaatttaggaaaacacaacagacatcccctgacaaggtggattatgaatatagtgaactactcttatatcagaatcaagttcttcgggaagcaggtctctatatataatctttggaacatctttgtacctatgaaaagcagatcg

SEQ ID NO: 87821 - DNA, 734 bp, Homo sapiens
gcggtggaattcggcaaacttaaggtacgtgaggagaatttcttcaatgttcctgctttcttaactgtctcaggacaacttcatctagaagtgatgtcaggagcttttactcaagtgtttacctttggtccgaccttccgagctgaaaattctcagagccggaggcacctggcagagttttatatgatagaagcagagatttcttttgttgacagccttcaagatcttatgcaggttatagaggaactgttcaaggctacaacaatgatggttctctcaaaatgtcctgaagatgttgaactctgtcacaaattcatagcacctggccaaaaggacagattagaacatatgctaaaaaacaactttttaatcatttcttatactgaagcagtggagatcttaaagcaagcatcccagaacttcacctttaccccagagtggggtgctgacctacggactgaacatgaaaagtacctggtgaagcactgtggcaacatacctgtcttcgttattaattatccattaacactcaagcctttctacatgatggataatgaaggcgggcctcaggaactagagggaagtgtagcttaacacagcctggggttgatgattctccttagtattgtagtcattggtcagccttaaatgttcatacttgtgcaaagtcattaatggataaatacagcatggtggctagtggcatagatttagagtcagagagacttgagttc

SEQ ID NO: 87822 - DNA, 315 bp, Homo sapiens
ggcacgagggattatagcaactgagaccatatatattcttaactagttttcttcccaagaaaggaattctccatttaaaatgctgtatataaaatgtttttaattagttcatttgaaaaacgctgtgtagtgccttttacagttgaaacaatattatttctattgagttggcttgtgggccatgtcttcatgtgactcagcttgtccctgaaatgttagccctcctccctcccatgcatagattgtgtggcagtcttatcaagaaaatgtgtggaacactctactctacttatattgccagattaaaactaaatg

SEQ ID NO: 87823 - DNA, 350 bp, Homo sapiens
  misc_feature (1)...(350): n = a,t,c or g
ggcacgagagggctcggcgtggggcagggtggtctaggggtccggtcctgcggagccttcctgccccatctggtctgaccccttagcctgactctgattcactggtgtctgaagacgacgactatgatcaggaggacctgcaatctgatctggagctgtaagcgctaccgctagacactgctacttgctgctccaaggatgactctgatatcccattgggtctcttgctgggcttactatcacgctctgagctggacgcttgccccctatccttactgggaaccttccgtctccctatattccctgtgctaccatgaagccatgtcccatctcaaacactctcgggggcn

SEQ ID NO: 87824 - DNA, 358 bp, Homo sapiens
ggcacgagcaacattccagggtgctacgatcagtacatcgtacgtggtccaaaatgcctcaacagcatgctttcatcaacctacccaacctgtagctaagaatacctctatgagccctcgacagcgccgggcccagcagcagagtcatagaaggatcgatactttagcatatggaagccagggccaccagccgagagacaaccacactgatcatggcggaccatctgtgctgattgtcgtcctgactttgacactggcagctcttatatttcgaccatgatatctggctaacgaatacctatatgactttgagttataatatgagtttctgcatgcttaacgcgtactgaactgctcg

SEQ ID NO: 87825 - DNA, 857 bp, Homo sapiens
cccacgcgtccgccctttttcttcctccaaactaccatttcttgacttcattagtagattctagaacagttagtaaggagctaatttcactaagcaaactgtagtcaacttgcatcaggataggtagccatctgaatggccagtacctggagcaggacaagtgggacagatggtattctgctgccaagtcactgcaaatctggcctttttgctctttaggtggctcctacctcttccaagcagcatggtgtgaatgtcagtgtgaatgcatcggccacccctttccaacagccgagtggatatgggtctcatggatacaacactggtgtttcagtcacctccagtaacacgggcgtgccagatatctcgggttctgtgtactccaaaacccagcagtcctttgagaaacaaggttttcattccggtactcctgctgcttccttcaacttgccttcagccctaggaagtgggggccccatcaatccggccacagctgctgcctacccacctgccccctttatgcacattctgaccccccatcagcagccgcattctcagatccttcaccatcacctgcagcaggatggccaggacatcctcaatttcgtcgatgaccagcttggtgaataagtattactgtaccaactgggcctcctctagcaggcccctgaaggcagtggaataaaatgaattcttcgccctttaagaactcctgaccttaatgtggtagtagtatcttgtccttgaggggatttccttcccctcacccctaagactttcacaacctggtgactggaaagaaccaccacaaatcttcatttcctccagaaactgctacatctacagccgatttcagg

SEQ ID NO: 87826 - DNA, 1867 bp, Homo sapiens
ctatcaaagatcacgatgccagttatatgtaatgagcctctgagcttcatacagcgcctaactgaatacatgtagcatacttacttcatccacaggccaagttcactctctgatcctgtggacaggatgcagtgtgtagctgcgtttgctgtatctgctgttgcttctcagtgggaacggactggaaaacctttcaacccactgctgggagagacttatgaattagtgcgagatgaccttggatttagactcatctccgaacaggtcagccatcacccaccaatcagtgcatttcatgctgaaggattaaacaatgacttcatctttcatggctctatctatcccaaactgaaattctgggggaagagtgtagaagcagaacccaaaggaaccatcaccttggagctccttgaacacaatgaggcatatacatggacaaatcccacctgctgtgtgcataatatcattgtgggtaaactgtggatcgaacagtatggcaatgtggaaattataaaccacaagactggggacaaatgtgtgttgaattttaagccatgtggcctttttggtaaggaattacacaaagttgaaggctacattcaagataaaagcaaaaagaagctctgtgccctctatgggaagtggactgaatgtttatacagtgttgaccctgccacgtttgacgcttacaaaaaaaatgataagaaaaatacagaagagaagaagaacagcaaacagatgagcacctctgaggagttggatgaaatgccagtgccggattctgaaagtgtattcattatccctggaagcgttcttctatggcgaatagccccacggcctccaaattctgcccagatgtataattttactagttttgcaatggttttgaatgaagtagacaaagacatggagagtgtgattcccaagacagactgcaggttacggcctgacatcagagccatggaaaatggagagatagatcaagctagtgaagaaaaaaaacgacttgaggaaaaacaaagagcagcccgcaaaaacaggtccaagtcagaagaggactggaagacgaggtggttccatcaaggtcctaatccctacaatggagcacaggactggatttactctggcagctactgggacagaaattacttcaatttgcctgacatttattaaaatgcatacaagtcagggtgtttggctaatctacaaataagtcttaaacctatgtttttaaatttttttcccttggtttctacttatcttttaaaaaaaaaatgaaaaaacactcatgagataactgcatttcacccaacaaaagcagggtataaggcgatattggtgatgaaagtcttaggaaaaatgcataattttgctataaaatgtacttatttggaatactattttatatagaggtaagagaacactgctggggaatatgctttttatggttgctgttgccatatttactgaaggtttatacctaaatgtaactttagctttatggaactatatagtaatcccaaatcaagttattttgaatatttttatgctgtcatgcttgaatgttttagatgtaacctttgacatatttagaactctcctcctatacaatgtttattctcagatatagaggttatgtcattttataaagacttcattgataagatggcttttattcatactaatcctcccaatgttaccccttccatcttccaagaagaaaaaaaatgcctgaatattcagaatagatatttctgatttgaaaattctaaagaattaaactggaaaagtatttcatttacttagtgctctgaatttacttttacagttttctgcagtcagtatcattaaaatggttaagtttaca

SEQ ID NO: 87827 - DNA, 1596 bp, Homo sapiens
ctgttttagccaaaaaagaggaagagaagaagcgggaaagtcataaacaatctttgcttaaggagaagaaaaggttaacaattaacaacgtagctcgacagtgggacttgcaacaacgagtagccaatattgctacaaatgaagatagaaaagattctgactctcctcaggacccctgtcagattgatggaagcaccctctctgcattcccagaggaaacagggcctctagactcaggactcaacaatgctttacaaggtttatctgtcatagacacataccttgttgaagtggacggggatacactttccctatatggctcaggagcactggaatctctggataggaattggagtgttcaaacagcaggaatgatcacaacagtctccttcactttcatagaatttgatgaaatcgtccaagtgcttcctaaactgaagattaagtttcctaattctctgcaccttaaattcaaggaaacaaatcttgtaatgctgcagcaatttaacgcactagcccaactccgtcgtattgaccagttgacaattgatcctcaaggaaatccagttgtcaattttacactctggaaatactatgtactgtttaggctaagccatttcagtatgcagaaaataaatggaacagaggtgacacagaatgatatgataatggctgaaaggctctttggaatcctagcacatgtagcatcttctgagttaccccagtatcgtctgatttccattctgggtgatgccaggaaaaagcaatttcggtatctactagaatccaaaggaaaaaaacctggtattatcaacgaagaaaataatgacagcaaaagacttgtaggagaaaacacaaatcgtgctacattaaattatactacaagagacttttataatgaaaagctagaggaaataaaggaaaagaagaaattctgtaaaacatatatagaagaccttgtgaaggaagccacagaaatcaacatgaaaaatgaggctttgcagaagctttggccacagatgttcattgagcttgttagggatgcagtcatagaaattcgcaataaaaattcctatatgaagctctgcctacagcagataacagaccaaaaataaaaatggcctttagttacagttgattttggcagttttattttttgaaggttgaaaatatgcaggttatacatgttaaaacaacaacaacactatcctataaactagaaagactagtataaaagcattattgcccactgttctcatagctaaaagttaagaaggaaagaaggaaagcaggagaaaggaaggattaattgcctgtatgtgaggaccaaacaacctttgggaactaaacagttttcagagatggcgtggcactgcatccttggttcttgctttgattggtgccctgctatagcccaaagcacgtagtatttgctgatgattcagcatgagctgcatctacctacttttagctgataattttcagttatttccctttttattttatgtcatgatttcaaagccaaaaatatgttctttttatgagtgaagaataaacttactaacaaattagtcaaaataaagtatgtttgcctcc

SEQ ID NO: 87828 - DNA, 384 bp, Homo sapiens
  misc_feature (1)...(384): n = a,t,c or g
cttcaacatggagatcagctaagcatttgcttcacctgcttcaaggctgcctttctagactttaaagacttgctggagtcagaggactgggaagaagacaactgggaccctgagctgatggagcacactgaggcagagtcagagcaggaggggtcctcagggatggagctgagctgggggcagagcccaggacagcctgtgcaggggggctctgaggcatgggggccagggaccctggcagcagccccagaagggttggaagatgcaggtctggacccccactttgtccccactgaactatggcctcaggaggctgtgcccctgggcctgggccttgaggatgctgactggacccagggtcttccctggagatttgaggagctn

SEQ ID NO: 87829 - DNA, 352 bp, Homo sapiens
cccacgcgtccggcgggccagtctcaacccgcgcgccgaacatctggaatcgcctcagctggggggcaaagtgagtttccctgatacccccaagtccgacagccagaccctcagccccaatgaaatcaagacggagcatagcctgacggttcctatagggagcttttcttttatcgataagtacatgattatatctgtctactttatcctatataccttcatttttcaagtctttagatgagatatattctgattacatctcttttaaatttttatctctcaatatctgaattatttattagttgtattttttttataattataccattttgttatattatactcatcttcc

SEQ ID NO: 87830 - DNA, 378 bp, Homo sapiens
cctttgctaactccatgagcaggtaggcctacctgctcttggctaactccatgagccaggacaagactgtcaagattgatgaaggtgcctacgatgttcggcacaaggagcttcctgaagtcaccaactccgtcttccatgaaataaacatgtgggtctctcaaaggacagccacggtaggaactgcgtcctcaccctgaatgcattgtccggagccccgcttctcgacttcccatcatagcctctctttcccctcaccccctatttcctctctatatccttcccccctcacctttttcgctcaaatcgatcccctcttgcttagtacacctcactccccacccctctttatctctcctcttccttatagtttccacc

SEQ ID NO: 87831 - DNA, 361 bp, Homo sapiens
aataagacctggaagttcgtggaaagtctccctactagtgatttctcacgtgagaagatggatgttactgcgaaggaactgacataagatcaatgatgcgcttctgaatgactttgctctgcactgactagactatgatgttacgaaacgcttcaaagctgaagaatctaaaggtctcactttgactcaagcaccatctaataatactgctatacttaaatcacttgagaatcacatcacatcttagagattacgggcttcttggtacagacttgtgaatgacaggctatcggcatgctgataatgcgcattctaactatgtatatattcacatgatctagttctttattctaaatctgga

SEQ ID NO: 87832 - DNA, 3085 bp, Homo sapiens
ttatgagaatggtgaagaaattgtccattgcgaattagctgcctataggcgaaactctgggctgctggaatgtgatttgttcagataaaactggaacactgacgaagaatgaaatgactgttactcacatatttacttcagatggtctgcatgctgaggttactggagttggctataatcaatttggggaagtgattgttgatggtgatgttgttcatggattctataacccagctgttagcagaattgttgaggcgggctgtgtgtgcaatgatgctgtaattagaaacaatactctaatggggaagccaacagaaggggccttaattgctcttgcaatgaagatgggtcttgatggacttcaacaagactacatcagaaaagctgaatacccttttagctctgagcaaaagtggatggctgttaagtgtgtacaccgaacacagcaggacagaccagagatttgttttatgaaaggtgcttacgaacaagtaattaagtactgtactacataccagagcaaagggcagaccttgacacttactcagcagcagagagatgtgtaccaacaagagaaggcacgcatgggctcagcgggactcagagttcttgctttggcttctggtcctgaactgggacagctgacatttcttggcttggtgggaatcattgatccacctagaactggtgtgaaagaagctgttacaacactcattgcctcaggagtatcaataaaaatgattactggagattcacaggagactgcagttgcaatcgccagtcgtctgggattgtattccaaaacttcccagtcagtctcaggagaagaaatagatgcaatggatgttcagcagctttcacaaatagtaccaaaggttgcagtattttacagagctagcccaaggcacaagatgaaaattattaagtcgctacagaagaacggttcagttgtagccatgacaggagatggagtaaatgatgcagttgctctgaaggctgcagacattggagttgcgatgggccagactggtacagatgtttgcaaagaggcagcagacatgatcctagtggatgatgattttcaaaccataatgtctgcaatcgaagagggtaaagggatttataataacattaaaaatttcgttagattccagctgagcacgagtatagcagcattaactttaatctcattggctacattaatgaactttcctaatcctctcaatgccatgcagattttgtggatcaatattattatggatggacccccagctcagagccttggagtagaaccagtggataaagatgtcattcgtaaacctcctcgcaactggaaagacagcattttgactaaaaacttgatacttaaaatacttgtttcatcaataatcattgtttgtgggactttgtttgtcttctggcgtgagctacgagacaatgtgattacacctcgagacacaacaatgaccttcacatgctttgtgttttttgacatgttcaatgcactaagttccagatcccagaccaagtctgtgtttgagattggactctgcagtaatagaatgttttgctatgcagttcttggatccatcatgggacaattactagttatttactttcctccgcttcagaaggtttttcagactgagagcctaagcatactggatctgttgtttcttttgggtctcacctcatcagtgtgcatagtggcagaaattataaagaaggttgaaaggagcagggaaaagatccagaagcatgttagttcgacatcatcatcttttcttgaagtatgatgcatattgcattattttatttgcaaactaggaattgcagtctgaggatcatttagaagggcaagttcaagaggatatgaagatttgagaactttttaactattcattgactaaaaatgaacattaatgttaaagacttaagactttaacctgctggcagtcccaaatgaaattatgcaactttgatatcatattccttgatttaaattggcttttgtgattgagtgaaactttataaagcatatggtcagttatttaattaaaaaggcaaaacctgaaccaccttctgcacttaaagaagtctaacagtacaaatacactatctatcttagatagatatatttttttttatttttaaatattgtactatttatggtggtggggctttcttactaatacacaaataaatttaatcatttcaaaggcattctatttggtttagaagttgattcccaggagtgccatatttcagctactgtatttcctttttcttgtaatgtaagcagctcagataccatgtgctatcatttttgtatcaagttttttgcacaggatgtgaccactgtcagatcactgttcttttctttctttttgtgattgaaaagcctatactacaatttgaagtaaatttttgtttttcttagtaagtgtaaatggttgctttatttttattttaaaaaggtatgtctttggtttggcagaattcatgcagggctatcaagtggtgttctagggtaacagtgtccataattaacgcttagtcatagagtcaaaaacatttaagactgattgggttgaagtttataataaattatattaacatgtcttcctttttgaggtaaagatatatactttgtcaaatatcattttgtcatcctctaaatataaatccaaatacctcagctaagtaattctattttattatttttactgttatgtatgtttttaatcatatttcttaggaagtataggctactggacttagaataaaaagtccccaaacccaaacaaatggtttatgaaccagagtatatgtggaagattctttgctggtcttgctctgtgtgcatctgaagcttctttggcctagattttagcacaaacctgagtatatctcttctactttcatcatgtgttctgtaccttctttttgtttcattgggcatgctagggaaataggtggattttgtgtgtaatgccatcagtttttatgaaagcttgatgaggtataggtcatttgttttgagtatgtgggccagaaatttaaaattagaaattcgtttttctga

SEQ ID NO: 87833 - DNA, 341 bp, Homo sapiens
  misc_feature (1)...(341): n = a,t,c or g
cccaggtgcagctggtgcagtctggggctgaggtgaaggagcctggggcctgagtgaaggtctcctgcacggcctctggaaacaccctcagcagttatgatatcaactgggtgcgacaggcccctggacaagggcttgagtggatgggatggatgaaccctaacactagagaaaccggctatgcacagaagttccggggcagagtcatttttagcaggagcccttccataaacacagtctacatggaagtgacctatttgacatctgaggacacggccctatatttctgtgctagaagtgggactcatagctatagctggcatgacttctggggccagggn

SEQ ID NO: 87834 - DNA, 651 bp, Homo sapiens
cccacgcgtacgcagctccatacaccccacactcaggcaccagggcaagggagcaaaattccagaaagctcaggtgctgccatggccacgactgttgttacactcgagctgaggaggccggctgcaaccccaagacagagcgctactcctggcagagcgtcaatcacaacgacctgtgcgatgagtccccagcagcaccatgccacccacccggagtatcccctgggcaccctggcatagccagatgacttccgtgcccctgttgcaataaccactgcttccaagtctctgtagaccaccccttgggtatatctcatgtaagtgatatttattttatttatattttttgagtcagagtctcactctgtcacccaggctagagtgtgctgacgtgatcttggctcactacaacctctgcctcctgggttcaagcgattctcatgcctcagcctcccaagtggctaggactacagacatgcaccatcacgcccagctaatttttgtatttttttcagtagaggtggggtttcaccaagttggccaggctggtctcaaactccccacctcaagtgctctgcccgcctcggcctcccaaagtgctgggattacaggcatgagccatggtgtctggccctaatgtgagtgatcttt

SEQ ID NO: 87835 - DNA, 912 bp, Homo sapiens
gcttgtttgaggcttcctggggaaaataatgatgtcagatttgcatttgcaatcttagactattataggatattatgctgcataaatctagatataacttttattcagataatttacaaaaattagaacatgattttaaaggtggtatatctcttgtggagggaaatcttgctgaaattacagcttcttaggttaacagagaatgtgtcctgtttgtgcacctctctaaatgaaagaattaaggagaattatttcattattcatagtttggtttgtgggggtgaaagagggaatgagaaaaatcctaagacatccttggaacaatttaacacaaaatatacacatatatagatcctgagatgttacaacaaattaacaattatatagatcaacatgatccaaatagttttcaagacaccgttatggtgggtaaacagccattttacggcatgtgctccatggatgtccacatcatgccaggaaaaccatactctttgtctccaaatttgaaagctagtcatccagagcaggtggccagtcaacatctacagactcaacatccagctccagaatgtctgcagtcacattcatcagggacccaatgtttggcttggttctcccgaagtctccatgtacaaactctttaatgtaggtgccagcctgagttttcaagtggaggcggaagtggtgctcatccacgtactgtgtctccatgaagtgaatgacgcgagctcgcacagccaggggccttcggtgaaggacgcgcaaaggtgttttctggtcgatttttaagtcctttatgtcatttaggaattcaatgtctttcttctgtatcgctttatttgtccaaattaaggcactgtaggtctttgtcttttcttcttcaccttctttcatatgtcctattgcctc

SEQ ID NO: 87836 - DNA, 423 bp, Homo sapiens
gcgcacagaaagttcaacactttgttcagtgagttagatgcacaatatggaagcctgttctgtgacatggaagtgaagtggctgagtcgtggtatggtgctaaagtagttttttgaactgttggaagaaattgactttttcatgtcctctaaaggaaaatctgtgcctcagctcactagcaaaaattgggtcaaagacttagcctttttgattaacattacaacacatctaaatacattggatatttctctgcaaagacattcacaagtggttacacaaatgtatgattcaattcactaattcctagcaaaattgtgtctttgggaaactcatttgacaaggaacaatctggcccacttccctacactgaaattagtttctgaaaatgaaagcgatggcctgaactatattccaaaaattaaa

SEQ ID NO: 87837 - DNA, 386 bp, Homo sapiens
gttgttatggctgttaacgaactgcatacctactgtcattgcttgtcattccttgacagtgttaagggcacaagtgctgggcattgccggcgctcggtatgacttctgtgcaagagatatgagatagttgtccttgttgaaaggagatgtggagaagatttacactgagatgagtgcaaatggctgctggagatgataagctaatggcagggtaagttggccctctcgatgtgctggtgcatgtgaatgaatgggactgagcagatgtttgcacccattgtggcaccatggagaagcctctatactgtattacagctttcaacccacaggcctctgccctctggaaactggagctgtgttttgctgataccatggactcgctgaag

SEQ ID NO: 87838 - DNA, 497 bp, Homo sapiens
tttttttttttttttttcccaaatctttggctgtattgcaatggttgtttcaatttgtaatctccaactaaacatttcctaaccatggattaacaatatagttactgactggtttcttttaacagtatttatccaacataacaaaataaactgcaatttgttatagttttttttttttttacaaaacattttataaatatttttacaaaatgtatacaaagcaatttcaagtgagacgtactatacaaatgaaggtatttaagcaaataaagcccacaccacactgacagcgagtgacgcgtcctctttaagtaaagtcagtctgtaaggcctccctaatctaacagaatctactaaatccttcagagctaaaatatttctttttcataattgccaaattaaaattttgcttcatcttcggggaagtacttaaggacacagaaaatcaaatgccttaataacaaattcacgccttttcccacaacagaaaaaaaaaa

SEQ ID NO: 87839 - DNA, 2029 bp, Homo sapiens
ggcacgaggagagctagcaccatgagcttcataccctggagctgcttcagaatccaaaagaagtgttgaccaggagtgagatccaggatgtgaactattcccttgaagctgtgaaggtgaagacagtgtgccagataccattgatgaaggaaatgctaaagcgattccaagtggctgtaaacctagctgaagacacagctcatcccaaactcgtcttctcccaggaagggagatacgtgaaaaatacagcatcagccagttcttggccagtgttttcttcagcatggaactactttgctggatggaggaatcctcagaagactgcttttgtagagagatttcagcacttatcctgtgttctgggaaaaaacgttttcacctcagggaaacattactgggaagttgagagtagagatagtctggaggttgctgttggggtgtgtcgggaggacgtcatgggaattactgatcgttcaaaaatgtccccagatgtgggcatctgggcgatttattggagtgctgctggctattggcccttgataggcttccctggaactcccacccagcaagagccagctctccaccgagtgggggtttacctggatcgtgggactgggaatgtctccttctacagcgctgtggacggagtgcacctgcacaccttttcttgttcttctgtctcacgcctccggccatttttttggttgagtccattagcatctttagtcattccaccagtgactgataggaaatgaggcttttcttcccctgaccaaaactccttccctgtagtccagctgagggacacacatccctgggccctcttctgcccttcatgtctctatcctggatggtccatcttctgggtctccctaacggtaccgtttggtatctgccctttgtgtgcttcacaagaggcagtcccatgggaggtgggtctggccaatggagatgggacaggaaattttccaagacgcttttgggaaatctttttgtagcttttaaagagatgtgcggggaagacatatggatgttagcagccatattggaactgagaacacaggaatggtggaaaggtagaagaaacagagtttttgttgccgttgtgaaattgttgaaatttccttcatgccaagcttcttgttatatgagataattacgcccttattgtataagacaattttagttgtatttggttacttgcagcctgaagtaccgtaactgcactaaagggacgtagtgtgaacatcccgcagtataggcttaagtcacttttgtgaaatttgacaaaggcatagaatctttttctatccagtcaggcattgcctattctttccagtaactactgattcccccacttttctgtcttagaaaattgtgggaatcccccctcactctgcctatgttgcactctctctcttcccaaccataactctgccctcagctattaactgtgctgtgtatttatcaagttggtatgttgtatgtacagtgttattcatgtcatcatgagaatgttgaacgcttgttaaataccttttgctagcctcttcatatgctgttgcatatgactctcatcacaactcagtgagatggaaagtcaaatcctatttgtacaaatgagaaaactgaactctttagagtaactagctcagtattggccagctggtaaatggcagtgttgggattaaaatccagttcttatctactctccctttattcagaagcatttattggatgttgatctttgtttcaggttttgattttgttacttttttatactgtgtatattttcctcagtctacccttctgctctagattgtctggactcaggagattgtggcagttactggatagttatttttaagataatgattgcttttctctgtttatataagtcatgtgtacttattgtagaaagtttgtaagatgcaaaaagtataaaaattaaagttatgcactactaacatttcaatatattttctcccagattttcaataaagactttcaggcagtgaaaaaaaaaaaa

SEQ ID NO: 87840 - DNA, 2334 bp, Homo sapiens
gagtaaagcaaagagaaaggaagcaggcccgttggaagtggttgtgacaaccccagcaatgtggagaagcctggggcttgccctggctctctgtctcctcccatcgggaggaacagagagccaggaccaaagctccttatgtaagcaacccccagcctggagcataagagatcaagatccaatgctaaactccaatggttcagtgactgtggttgctcttcttcaagccagctgatacctgtgcatactgcaggcatctaaattagaagacctgcgagtaaaactgaagaaagaaggatattctaatatttcttatattgttgttaatcatcaaggaatctcttctcgattaaaatacacacatcttaagaataaggtttcagagcatattcctgtttatcaacaagaagaaaaccaaacagatgtctggactcttttaaatggaagcaaagatgacttcctcatatatgatagatgtggccgtcttgtatatcatcttggtttgcctttttccttcctaactttcccatatgtagaagaagccattaagattgcttactgtgaaaagaaatgtggaaactgctctctcacgactctcaaagatgaagacttttgtaaacgtgtatctttggctactgtggataaaacagttgaaactccatcgcctcattaccatcatgagcatcatcacaatcatggacatcagcaccttggcagcagtgagctttcagagaatcagcaaccaggagcaccaaatgctcctactcatcctgctcctccaggccttcatcaccaccataagcacaagggtcagcataggcagggtcacccagagaaccgagatatgccagcaagtgaagatttacaagatttacaaaagaagctctgtcgaaagagatgtataaatcaattactctgtaaattgcccacagattcagagttggctcctaggagctgatgctgccattgtcgacatctgatatttgaaaaaacagggtctgcaatcacctgacagtgtaaagaaaacctcccatctttatgtagctgacagggacttcgggcagaggagaacataactgaatcttgtcagtgacgtttgcctccagctgcctgacaaataagtcagcagcttatacccacagaagccagtgccagttgacgctgaaagaatcaggcaaaaaagtgagaatgaccttcaaactaaatatttaaaataggacatactccccaatttagtctagacacaatttcatttccagcatttttataaactaccaaattagtgaaccaaaaatagaaattagatttgtgcaaacatggagaaatctactgaattggcttccagattttaaattttatgtcatagaaatattgactcaaaccatattttttatgatggagcaactgaaaggtgattgcagcttttggttaatatgtctttttttttctttttccagtgttctatttgctttaatgagaatagaaacgtaaactatgacctaggggtttctgttggataattagcagtttagaatggaggaagaacaacaaagacatgctttccatttttttctttacttatctctcaaaacaatattactttgtcttttcaatcttctacttttaactaataaaataagtggattttgtattttaagatccagaaatacttaacacgtgaatattttgctaaaaaagcatatataactattttaaatatccatttatcttttgtatatctaagactcatcctgatttttactatcacacatgaataaagcctttgtatctttctttctctaatgttgtatcatactcttctaaaacttgagtggctgtcttaaaagatataaggggaaagataatattgtctgtctctatattgcttagtaagtatttccatagtcaatgatggtttaataggtaaaccaaaccctataaacctgacctcctttatggttaatactattaagcaagaatgcagtacagaattggatacagtacggatttgtccaaataaattcaataaaaaccttaaagctgacttcgtttgttatgtaggctgtatgcatatattgaaaacagaagtgaaactttcgattgcttttaaataaataccaactaatgaatttactgctaagctcaaaaccgtctacgcttaaggtgagaatctttgccaacagaaaggcgttgctctaaatcgcgaatggtattacgaagaattgcaatctccttgtttttttcttcttgaaaatgctgaagtttctaaacgaaacaaaaaatttgttattagaattcagaaataaaatttagtacaaggaacaacaaaataac

SEQ ID NO: 87841 - DNA, 410 bp, Homo sapiens
attaacaagctgagacaccatccccacctgctactccgtctacacctcacgaaccagtgacaaagactgagactgaacctacttctgtcatgagctcatgtggagaaaacacaagataacgaaaacgcgtactaaaatctaaaacttacctggatggggaaggctgcatagtgctgctgagacatgcagtcccactcactagacattatggagcgttacgaggaaatgcccatccagcggatggagaggtagggtaggatctgaagatctcaagtcttggaagcacagacttaggagtcactgacttagaggtggtagttacaagtgacgtgatggttaagttcactgagagaaaaagattacaacgagaaagagctgatccttctgtcctattttttagaagagggtgt

SEQ ID NO: 87842 - DNA, 822 bp, Homo sapiens
  misc_feature (1)...(822): n = a,t,c or g
ttttttttagccaatccaaccaacttctgccttttgattagcgcatgcaggaccatttatagttaatgtgattattagtatgattagatttgtgtctattattttgctgttttctatttgtcctatatgttttcttctttttctgccttattttttattaatctttttttataattccactttatttccttttattgactagctacatctcttttattttagtgggtttaagggttatagtatcgtatgggcagatgcacctgacagcaataactcaaggcataccctaacaatgaccctatgggtccaactagaatgtggggttcacacttccaagctaaggaaatgtggggagtggcccaactcaggaggatctgctccttttctaggggagggacatctggnaccatctgaacctctgggccccattcttggaatgcaggctgtacagaggatcaaggccctttgattcaggttaaatggaggttgttaggagcaggtttctaagtgaaaatgctatataatctgcatgctttttacaaacagtagcaactggttttcgtgtccagcccactgctcctggaccacccagcatataagtcctcaataaatcctatgtctcattcaccggctccaggtttcttccacctctcagacacagtgccatccgtactgaaatcaataggggtctagcacaacaattagcccagcaggaggttggagaaaattccacgagtgccaagacaatgggatcagggaaaaatccacggtggaaatcctggactggttgtccaccggacgcgtggttccancacgaattgt

SEQ ID NO: 87843 - DNA, 1019 bp, Homo sapiens
cactattccagtgtggcggaattccaggcatgaaccacaatatcattcttttttgtttgtttgagacggtctcactctcgcccaggctggagtgcggtggtgtgatcttggttcactgcaacctccacctcccaggttcaagcaattctcatgcctcagcctcctgaatagctgggattacaggtgcctgcccagctaatttttgtatttttactggagacagggtttcaccatgttggccaggctggtctcgaacttctgccctcaagtgacccacccaccttggcttcccaaagtgctgggattacaggcatgagccaccgtgctcaatcacaatatgattcttaataactgcaaatacgccattgtaaagacataccatgattaatttaaccagtccccagttgatgggcacttggtttgtgttcagattttgtgtattagaaaacaaggctacaggctgggagtcactgccgaagtgataagctgtgggtggtgaatgcagagaaggccacaatgtacagcacctaccctgggagtgttcacttggggttcatgttggaacccattttgcttcctccaccattgcacattgaaggagaatgtatttttgcacgcgcttctcattgcccttcatgtacatctgctctagggcaggagtcagcaaactacagcccagagggcatgtctggcccacggcttgtttttgtaaataaagttttattggagccgggtgcggtggctcacggctgtaatccccacactttgggaagctgagccaggcgatcccttattagcctgaccgctgtggcaaaaccctgtctctactaaaaatacaaaaattagccgggcatagtggtgcacgcctctgtaactccagctactccggaggctgaagcaggaaaatcacttgaacccaggagccagaggttgcagtgagccaagatcgcaccactatactccagcctgggcaacagagctgagactctgtctcaaaaataataataataatgatccag

SEQ ID NO: 87844 - DNA, 1770 bp, Homo sapiens
ttttttttttttcaatgcatatttatgaactttatttcaaatatattttcacacattttatctaaatacataatacagaagcctgtgtgacttgggcaatgtggccaggagggcctgagactaacaaatccaccttggcaaaaggacataaaatacgtcttatggtcagaaaaatcaacattttgtgtatttacttagtttacgaaaagtactgaaaatgctattattagctgaatttgtgatttccttttgaaattctgagttatccttatttttcccattttgtttttgcaccaaggagactgcagtcaaataaaacagatactatacacactcgtcggggcagccgtactgcagaagcacgttgatgcactcctggctggaggcctgccgggcgtaggtcagcgctgtgttcccgtgggcatctcgggccatgacgtccaccccgtaccagatcaggagctgcgccaggaccacattccccttgcggcaggccagatggagcgccgtgcagccgtctccctccccacaggtctcgttcacctcctcacaggagccatgtgccagcagcaggatggctgtctgcaggtcctcatcagcggtggcccgcagcagctgctggcccagggacagctcagtgcagggtagtggggccagaaagagcttctcctcatatttggaacggatccaccgttccttctcttccctcgtggacttttctgagggttttgtctgcccctggctgctcccttcccagatgctgttggctaggtcattgacaatagatgacataaccttcctgagctcaactggccagtcatccagctccagagatcgcacacgggaaaggtgggggccaagactgcggtggatacctgagcattcaatacacatgaggactcccaagttcaaactggcccacttaggattctgggtctcacagtccacacagtgggcgttcccacgcatgttttggatcgactgcagggccatggcctcgctctggctggtcagctgggacttgcttttactgctctcgcatgactgcaggctggccaggatctggctctggatggcttggacccaggcatcccgctcctcatacgtcgtggcttcaaagtgccacgtttggccagtggcagacacaatcataaagttgttggtgcttttcttctttaggtgtttctttttattggcatgaggagaggggggcgggttgagcttggggctggtggtgctggagatactggggctgaagcatatggagtcacccagcccggtgtccatgtccttggataggccattgcttttagagctggagatgggtgtgcaggccgatgtggctagggatggccactttcctgggactttgatggtagatgtctgaaggtcaatctcttttttatgaatattcttcatataatcacctaagcttgaataataggtgagcatgccattggaacacagggtgacgtatttctttttccatgtcttcagccatttcccacttcgctttaagagcatgccctgtttaatggggatggctctaccgctcccgatggtatcagcatgattctccggggctttcctctctttgtctgggtcactccctttctcagatgtaaacaggttggaccagcgcatggaccgcttgcaaacgggcgtgggtgtgttggcagtgggaggaacactgaactgagggtccctcctgctgggtgctggagtcgatggaatgggagaggaatagttatttaaactcccacctccatt

SEQ ID NO: 87845 - DNA, 594 bp, Homo sapiens
ttttttttttttgctcatattcacatatgaaaaccaaaactttttttgtcctacaaacctggtttttaaaaaggaactatgtggctataaataaaacttgggccatgctgataggacaaacgggatttttcatatttcttattaaaatttctgccatttagaagaagagaactactttcatggtttggaagagataaacctgaaaaaaaaaggggccttatcttcactttatcgataagtcagtttatttgtttcattgtgtacatttttatattctccttttgacattataactgttggcttttctaatcttgttaaatatatctatttttaccaaaggtatttaatattcttttttatgacaacttagatcaactatttttagcttggtaaatttttctaaacacaattgttatagccagaggaacaaagatgatataaaatattgttgctctgacaaaaatacatgtatttcattctcgtatggtgctagaggttagattaatctgcattttaaaaaactgaattggaatagaattggtaagttgcaaagactttttgaaaataattaaattatcatatcttccattcctg

SEQ ID NO: 87846 - DNA, 490 bp, Homo sapiens
ccggtagtatcgctttcagcacacgcgtcgcaattaacggatcgacccacgcgtccgggctttgtcatagtttatatatatgtttgaaatgaagtgtttggtttttaaatttaattgtttttaatgtaaatatttacttaagtaccatgagtaaaatttggtataaattgggtcatatgtattgtaaaatatatatttttactgtaaatattttaagtgttttagtatcaataatgactactgctttgactttcaaaataacaattattttagatgttgagtctcttaatttacagtaaggttaatttggccttttttaattttgaagggtacgctagctgggattttgattggtctggctcagttaaactgctctgaactaaagctcaagaggctttcctatcgacatggtttactaggcgttgacaaattattctcatatgcaatcactgagtggcttattgacattaagaagaaccagctaccagga

SEQ ID NO: 87847 - DNA, 424 bp, Homo sapiens
ttccctcccttaaccaatacaaatggaattgtatgtggtgtacattattgtgattgagaagaaacaaagattaaaattaggaactttggtttttttatggaggtagacctttgtatttaatagatttaaaatactgaaccaataatttttgacatctgacatagtcttgtcaacttcgatatccttatcaataatagctgaatttttgagaatgaagaattatgaaaggaatattaaaagtatattccttcagggcaggtaatgttttaaagcatcctttcaaatgaagaaatattgtgaaatatgaatcagttgtctagaaaagaggcttgaatttcagattttaaacacttgtaataaatggcaattttaattaaaatgaacataaagctttatttgtgagtttaaatagataatgaatcat

SEQ ID NO: 87848 - DNA, 423 bp, Homo sapiens
ttttttttttttctttgagacagagtctcactctgtagcccaggctggaatgcagtggcgcaatcttggctcactgccagctccacctccagggttcacaccattcttctgcctcagcctcctgaatggctgggactacaggcgcccgccaccacacctggctaatttttttgtattgttggtggagacggggtttcacgatgttggccaggatggtcttgatctcctgacctcgtgatccaccccctcagcctcccaaagtgctgagattacaggcgtgagccactgcacccggctgaaaaagattagatttgcaaaggggcatgtggaatttttttttgaaagtcatgtagaatagtttataagccagccctttcagaaagaaaaaccaccacacaaaactttcttttacttgtaaattac

SEQ ID NO: 87849 - DNA, 582 bp, Homo sapiens
  misc_feature (1)...(582): n = a,t,c or g
ggatatagtccctaatccaaagatggcccctctgggggatgaggcccccactctagaaaaggtcttgaccccagagctttctgaagaagaggtgtccaccagagatgacattcaattccatcacttctcttcggaggaagccctgcagaaggtcaagtactttgtagccaaagaggatccatcatcccaggaggaggcccacacgccagaggcacccccaccccagcctccttcctcagagaggtgcctgggagagatgaaatgtaccctagttagaggggacagctccccacgccaggctgagttgaagtctgggccagcatccaggcctgccctttgagaagccccacccccacgaagaggcttacaacccttcccagaagganggcacctttccaattggacgaagaggaccccttgaaagaggagggcgccccccaacgaggcagagggcctcttgagagaggaggtgctccccaaagagggagtgggctttccaaaagaggaggtgaccttgaaangaggaattggccccttaaagagggaagttgggttccaaaagaggaggtgccccccatagaa

SEQ ID NO: 87850 - DNA, 519 bp, Homo sapiens
gcggccgcagctccccgcccgggaccgcgcaaaaaggcccaaggtcccgggccgcactcaccgaagtccaggaactgcttcatggagagcggggacggcgagaagcgcgcgtagaagtcccgctagagaagccacagccagtacgccaggtttccccgcgcctctgccgagtgggttgaaggcaaatacttgaagttgcaatcgaaggtcaagaaaatggaatcaagaggtcacaatccttctctgatgatggcttaaaaagctggaagacactcaacattgaatcctggggctctgtgccatgcttgctaggagaaacagccaccatgagtccatctttcagatctcaagtgaacagcatggtatcggggaacactgtcatcgtacctagagcgtttaaagaatccacactagagaagagggaaagagaaagagaaacaaattaatctcacaaagaagcaaatacactaaatgggaatgtctaagctttctgttcagctatgtctacctctggactaa

SEQ ID NO: 87851 - DNA, 2105 bp, Homo sapiens
caatattagtggcaccagcatccagactgtttcctactatcttcttcaccgcagtgcttagactcagtaccaccggcccagagcaaatctgatggactgacttccgatcaataggtttgatggccttagcaggttctgtacggactgcgttttttttccgaacgcccgcaccagggtcagaagggaggtggtcgccctccgtcgtggtctggcgtgtattccgagccttggtgtctggcggtttccgagcgttggtgtctggcggtttccgagcgttggtgtcttggcggtttccgaccgttggtgtctggcggtttccgaccgttggtgtctggcacgcgccaccctctcttgctttggttgcgccatgccgatgtaccaggtaaagccctatcaccgggtctgcgcccctctccgtgtggagcccacctgcatgtactggctccccaacatgcacggcaggagcggcggcccagcacttggcactggccacttgcagacaagaagacaagaaaatgatttgaggacagcttcaatcgcggtgtgaagaagaaagcagcaaaacgaccactgaaaacaacgccggtggcaaaatatccaaagaaagggtcccaagcggtacatcgtcatagccggaaacagtcagagccaccagccaatgatcttttcaatgctgcgaaagctgccaaaagtgacatgcagggatgtccttcctgagatccgtgctatctgcattgaggaaattgggtgttggatgcaaagctacagcacgtctttcctcaccgacagctatttaaaatatattggttggactctgcatgataagcaccgagaagtccgcgtgaagtgcgtgaaggctctgaaagggctgtacggtaaccgggacctgaccgcacgcctggagctcttcactggccgcttcaaggactggatggtttccatgatcgtggacagagagtacagtgtggcagtggaggccgtcagattactgatacttatccttaagaacatggaaggggtgctgatggacgtggactgtgagagcgtctaccccattgtgtaggcctctaattgaggcctggcctctgctgtgggtgaatttctgtactggaaacttttctaccctgagtgcgagataagaacgatgggtggaagagagcaacgccagagcccaggcgcccagaggactttcttccagcttctgctgtccttctttgtggagagcaagaatcgactcccagacacctgccactcgtgaatgcatctgataaactcactcacactgaggccttggggactgagagtgcgatgacatggatcctgcggacaaaccgccccagggcgtacctagcaccgaagcatcaggcgccaataggtctccagctccttctcggatgacgtccttcagcacgccccggtcccccgagatgtccagcatcctctgacttaaccgctcgtacagggactgatggagaatgaaagccaggcctcagagccgcagacccacccggccacccctcagcgtctacgcccccgaaacgtctgggccctcacctggccgggggcgtcgtccccttccaggactccctggtttaacgcgcttccccccatgtcctagctgccctccctgtggcgtgagccttcggcctggtgcgccccgctgcccttcctggctgtgactctggtggggttccgaaggcccctttatgcccggcagacccctaccgacggcggcattccattctggggccacgaggaggcactcatcgtttcgttccaaccgccgccaacggccctggccctcgcgagctctggaactacagaggtcgcacggtgagttgccaggggtggcccgtaatcggagcgcacaaaacatgatgggacacgtaacgggaccacacagggcacattgggcacttgcaggggcgcgaggtggcggcacgtaatgggagcgcgctgagcatgatggggcatgtgcgggagcgccaggcggggcatgtaaccagagcgtgcggggcatgatggggcacggacatggggggttaggtggggcacgtaattggagctcgcggggcaggatggtgcatctaactggagcgacagaa

SEQ ID NO: 87852 - DNA, 274 bp, Homo sapiens
agcgtcttctgctcttggagtacgaaccatccagggtagacggcattttctactggaagataacatgtgattactgctgatgacccagttggcctggcgactgactttgggctccctttccaggaggaagatttctgactgccaagaggcaggaaagctagaagcaggctggggcccaccgcatgccttcctctctggagtcttggaaggaaagggaccagatgaataggagcagaatacgctttaacaactgactctactcgtgcgggaatgg

SEQ ID NO: 87853 - DNA, 1009 bp, Homo sapiens
gaaacacagattgaaacatgagaacgtctctcttccctctagagcctcacacttgctgcctcctctgcctggaactctctccctctgctctcacagggttccctaagtgtcgcttcctccaagaagccctccctgatgagttgagccactttagtttgtgctcaggctcaccctgcacgtcttggttgctctcatcactgtaatgatctaaaacacacgtctgctcatgagacccgcatcccacccccgatgctggggccgctcttggattttcatgcctgctgccagcacccagggggagctccggaaatgtctgctgggggctcggaatacccacctttctggtaatgcagcccagcgggtcccagcctcgttttccagccctcactcaaaatggagtcgctctggttcgaacgcctctgacaagtgtgtacctacgtgtcaggcccatccttcctgcaggcctttgtcttggtgtcaccctgcctgagctggccccaaccacagtagcaacagtgatgctgatgtgtgactgctgccaggagcctgctcacatgaccgtgtggagaaagttctttccctgaggaccatctggagtggacgcgtgcactacccctctctgaatacaccctccccacgaggccctctggagcatcctgtagagccagcccctacccagagaccctgagcccagagaatgcgctgggtggtgagccctggggacgaatgcagagccctaggtctcctctccagaaagaccggattttgccatgttggcccaggctggtcttgaactcctgaccctcaagtgatccacctgcctcggcctcccaaagtgcagggattgcaggtgtgagccactgcacccggcctcaggcaggtatttttaccagccgaatactcttgcactgtgcactcttcgtgttcatcatcagtcccccggatgggtgtttaaggcattttccaaagctctgttattaaaaacacggtgcaatgagtttttttcagc

SEQ ID NO: 87854 - DNA, 379 bp, Homo sapiens
gaacataattatggaaactgtggctttttgaagtggcatttaattttgctgttattaagtctatgtgaaaatagctaaaacttttatttggaaaatataattgaaagcttcatccattctttgatatgactaaaatgaaagtttttatgttttcctgttcctggttatactgtattcagagctatggtgctttgtaaaatcttgaaaggcatttctttgttgttgctgatatgcattttaatggcatttaaatgagacgatttgtaattcttaagtgcattttacttaattgtatttattcttgggagaacattcatttttttatagatcagaggttaaaaaataaccaaagctaaggcatgataattatcgaattaga

SEQ ID NO: 87855 - DNA, 1820 bp, Homo sapiens
tttttttttttttcattttttaaatagatatgaaataccgtaccaagtttatttgcctttaaatgatacaaacaagaaaagacatgttagtcaaaatattaaattttcttgcattttacagaagaaaaataaactgaagtaaaactgtaggaactgctgaacgtcagataaatgtttcttcagaacaagagatattagttcctaaaagattcttcctaaagttttttttaaaagagattaagaaaaacagtaagccactggggttattacattctaaaaaaaaactacatgtttcttaatggacatatgtttacatttacagatagtaaacttagtttcctgtctcataaaactcagaagacgccagtgatgtctaaactatggaaaagaataaaagcctctttttcatatgaaaaaacattcaaactaaatctaccttaacattattttctatgaaaacttaataaagaatggctcttctgaaaacaaaatgctatacaaatcagtttcaaaaaagaaatacattatgagattaggcttatagctagtggtatcaagtaaaaccccaaacgatgacacaagaattcacagtattagccggtcctccccaccctcctgaattacctgaccaatggaagtttggctttgttgtttcagaaagcactgtttcttacattccattaattgttccaaatcacgccacatttttgcttgtttcatatttggaccatgactttctcgtataactttttgtttttcccgaagtttctttccaaggttttcttgttcagcagtatttttggtatactgttccctaattgcctttcttttttcttgttgatcagaagagatatatgccttcatctcatcagtagcacgacgaagttgaacttctaggttcttaatcatacaatttgtataatggtatctactttcttcttgaagacattcttcacggagtcttctaacttcctgttctaatttggaccgattgctttcgaggcctgctgcacagctatcatactgggatttcttttcatcacactcctgggtcagttcttgatatttttgacgcaactgtcgtagctcttttataactgaggcaagagctgacttcttttcagataccaatgaatacagttttttcaccatttcagacatatcatccaatgttcgtcctttcatttcatcaacttcactcttcagtgcagatactctttctagctcttcttgggtgtaactatatccagatataccctttttctcctccatagtttgcagttgttgttgaatattttcatgacgttgcttaagaagttcttcagtcctctgcaaaagaccgaattcagctttaagttcagctattatctgatgcttctttttgaaaactgtactcttgcttcgaagtttattgacatatcgtttgaactcatctccctttaaaacttcagtaccatcaaattcacgggtctgatttctctttactgatgcttctctctctaggctggctaacttctccttggcctcctgaagttcctcagctttggcttcttttttacgggaaatgatagatgcctgttgcctatacagtgagagtttgccttcaatgggctcatttctcatcattttcttttcaatcaactggttaatttctgtgtttatttcatttattttagattcaagttcaagaaggtcagaatggcccatagctggctctgaaactactttttgtaaaaaatgtaattcctttttgttattttctaattcgttaggaaattattcagttaccatatataaattaaattttatctcctcctcta

SEQ ID NO: 87856 - DNA, 706 bp, Homo sapiens
ggcacgagcgaccagctgagaacacgaggaccgccgactccagttaggaggatcaaggaagtgcctggtgggagcagaacagcaggtggggtgcagcccagctccctggagggatggtgggcacccatcctcaccctgctgcctccattagcaggccgagagggtgtgctctggaatcccatgagcacctgtgccacatcctcccctgtggctgacccttcttcacagttggtgcagctttgtggtctgtagtgcagggatcaattggcaaatccctttcccacccattccctggagaattggggtccttggctcagatgacagaccaacctgagttggaatcccagctccttggtggccgtcctggcctccaccccctcactgcctccgctcctcctatcctgcccacgcccactgcagggcctttgcacacactgtttcttctgccctcccttccggcccactccctcatatcattcagtcctcctttcagatgtcacctcctaagatgggctgccctgaccacctcatctataatggccccagtgcctggcacaggattggcacacagcagaaatttgccagaaatgggatctgggttctggggacaaggctgttgtggccaggttaaaagctccctcttccaggaaggttgttttgggcttcaagagccttggatagggattttagggccttttggtgctac

SEQ ID NO: 87857 - DNA, 488 bp, Homo sapiens
  misc_feature (1)...(488): n = a,t,c or g
cactgatnacctcactgacggcnctgaaatncncggtcgacccacgcgtccggcatgatctcacccagctttggcttcatgggccatctcctgcggttggaatttgaaatcctcccttccacacccaatccctagcttccctcctaccagggggaggcagcaggctcttcattgataagccatttgcagacatttagccctgacttgaagggtgtctactgcacattccctgcctcagggctggctccagtgcccacccactggacagtctcagagctcagcaggagccctgtggccacagccacattctgctaaaactgggatagaggaacaagcccagccccaagagcagctatgacttttgtttttaagaatggacatttcacatctgtgcaatactgaagacctcactttgtcatgttgccccagtgacatagtgagaggtcaccaggcttgcaaatgaacttcacacagacctcagggtangt

SEQ ID NO: 87858 - DNA, 573 bp, Homo sapiens
cccttcacgcagtggggtgggaagggagatcctaccgcgtacctggaagacgggagaacaggggtgtttcggtgagtagtgctctctctcagtccgcacggcagccttccagcaaatcgggattttatgccaaactcgccccacgcccccaaatgccaggttccccggggtagcaacgaatgacacgttgtccaatcagacttcagtgtaaccatgtcacagaagacatgactaaagcaaaacaggactgggtggggcgcattttggttttgacgaggttgggtctgggtctctgcttccctctcctgggccaagatcctctgggcgtggagttcaggaatgagggtgggaccttccccaggagacccaagtatgggcagcggttgctgggaccaagtcctcactgagagtgacttcgacaaacatccattggcagctccagcttaggcccaggagacaaagtgggggtcactgacaccccggattttttttttaatgactgagtcatgatttgaacactggtctgttggatttcaagatctgggattttctcactgaacacgctaactcctg

SEQ ID NO: 87859 - DNA, 435 bp, Homo sapiens
aaaactcctaaatattccaagcaaatgcccttaaccctgtctgttatctgctttccttgaacagaaattctacatgaccataaaacctcgaagatgggtatggcacagttcatgccctgtaatcctagcactttgggagggtgaggcaggaggatggctcaagcccaggagtttgagaccagtgtgggcaacagagtgagaaccatctctacccaaaaaaaaaaaaaaaagggggggccgtttaaaagaatccttggggggcccaaatttaaccggggctggcaaggtaatatttttttccttatggggggccgtttaaaaacctacttgggaattttgggaaggaaccttttttttgggggggggacttattgggccaacctccctccagaaattaaaggctttagggaaaaaaaaaatttttaaggggtatag

SEQ ID NO: 87860 - DNA, 556 bp, Homo sapiens
cagtgaatataaatgtactacatttgcatgccttttgggtttgccttaattcttacctcatttgcatcctatcgatctggaaagagctgttttggatgaatgcagtataaaatgtaaaaaccctgctaaatgacttattgattaagtatatctatctatatatacatatacacaaagatattatttatcgaaagtaaaaaagatggaagtgtattggtttctgtttgaattttcaaaggcttccaatgtggtggcaataaatgtcccaaataaatttataacaattgattttccccctaattcttattttataattttaaaattgcagcagttgctagcaacaacttactaaatctactcttaaatatacaactttggaatttgaagaattaatgacaacaaaagggaaaaaagcaactttccaacttttcacatgccatgttcgttgtccctcttttgggagcctggcatgtgaaaagtaaaacagatttgttcattccgaaaaaaaaatgttcattctatgacaataaattttatctcagggggaaaaaaaaaa

SEQ ID NO: 87861 - DNA, 390 bp, Homo sapiens
acaggaaaacatgttgctgctgtacttgttattgtgaatattatagttgttgctgttgctgttgtttttaatggcccaggcaattctgacgcagtcagaaaactcatgtttgaaagccagtgttgtagctggtaagggaagtgctacctgcatggaagatgggatgggatagcacagttaagtgcatgggttttgaagaaaggtaagtctgtattcaagtcatggctttgctactttttctctatattatcctacaatcttgtttttatctatattatcctgggttctcacctgtaaaacatgggtgagaatagtacccatttcataaagttaagaagaataaaatgtgaagaataaaatgaaataatgaatttaaataatttagcacag

SEQ ID NO: 87862 - DNA, 391 bp, Homo sapiens
  misc_feature (1)...(391): n = a,t,c or g
cctatgactgctatttctgacgtggaaactaaataaactacttattcttctggtgccaccactacaggggttgttgaggtctctgaaactaataccagcacctttgtaacatctacccagtctacagccactgtgaaccttaccaaaaccactgggataactacccctgtggcttcagttgcttttcctaagtctttggtagcatctccttcaaccataactcttcctgtggcttccactgcttccacctccttagacgtggggactgcagatgcatcttcctccatggtgaccacaccaacttcatctctgggctctgttcctattatactctcaggaattaatgggaagccaccagtgagccagagaccacaaaatgctgctcaaattn

SEQ ID NO: 87863 - DNA, 876 bp, Homo sapiens
catctaaatccacagtgaacactgtcattgggtgcttaccttgtcatgattttctttattccaggctcattctgtctgtgtttctttgttcactgaagtcagccccaaaactgcagaaatgagtgcgttactggccaaagcttatgccatgtctggagaggcccaccacaggggtaggtaaaagaggtagccttgaagttatttcccagtcacatgagggaagcacattggcaaacagcctatctaagattctaattagctatttattcctgtaatggaaaaattaggtgggtcacagtctcatacaaaatcaattacacattaatttaaacctgataatatacccccacattcgttggaatgtcagtaacaaataaatcatctgatttctacatcctctatttattttgaatctcagtgagattcaccttcttaactaatagatatcacacatactgtgaatgtggcctgtgcagtatcggttgataaggacatccagtgataaatgggtagagctttacctcctccactttcagtctccttgactcttttcctctggctgacaagagagaatgtttgttagcagaattttcttgacccatattcaatagttagatactgggggttgcagagaaagccaactgattaatttatgcttcaacaatagttctttgtctggcaggtcatctttttgaaagtgggtggctttgggagagacacaaatgaaccaatgagggaggacaatgtatcattctgtgctgccttgatcaaattaatggacactgatggattagtggcctgtcaggagaaattaggttcatgaagaaaaaattggactttaaaactgttatttcttgttaaaaagaaccttttggc

SEQ ID NO: 87864 - DNA, 516 bp, Homo sapiens
gtacattgtttctttggttacatcaagattcttctcttcagtgaactctagatgcttcaaagataaagataaaatattttcttctttttcagagataatatcttcattgtctcttgggctagtgcttctatcctcacaagaatatgcacacaactcaatacgttcaattttctctggaaccgaagaactcataattattggcactgaaacaaaacgttgataatgttccaacattcttgttattttttctttgcttaccccgtgaatgttacgccttgcaagttcctttggtttaaacttccaccatgtgtctggttcccgaaaaaggactttatatttgtgtttctgagacaaagcaacatatggtttcatttcccatgcctgtaggtttgtattatctataattataggagatatcttcttctcaaatgcttcttttgcacgattctggttccattcatgtgcttctccttagtactttacatcaaactggtactggccatttatataaaaata

SEQ ID NO: 87865 - DNA, 1786 bp, Homo sapiens
  misc_feature (1)...(1786): n = a,t,c or g
ccatttcaagacaccgctacagggtgtatggcccgctctgacccggtgccaacaccgtactttgtcatagcacccccagtcatcccaatgctggccctcactgggacactgcttaaacgtggaagatgacactcctatatggcgcccctactgatgtgcggatgttgcttaaaaacggcgaagcctgggtgaataaattgtagcgctcctccctgcggaccctggggtcagtgggagagcccatcaactgtgaggcctgggagtggcttcacagggtggtgggggacagcaggtgcacgctggtggacacctggtggcagacagaaacaggtggcatctgcatcgcaccacggccctcggaagaaggggcggaaatcctccctgccatggcgatgaggcccttctttggcatcgtccccgtcctcatggatgagaagggcagcgtcgtggagggcagcaacgtctccggggccctgtgcatctcccaggcctggccgggcatggccaggaccatctatggcgaccaccagcgatttgtggacgcctacttcaaggcctacccaggctattacttcactggagacggggcttaccgaactgagggcggctattaccagatcacagggcggatggatgatgtcatcaacatcagtggccaccggctggggaccgcagagattgaggacgccatccacccggggccgccacattttgcccttttgttctctgttgtacacaggccgaccacccttgcagtaccagaaagtgctgtcattggctacccccacgacatcaaaggagaagctgcctttgccttcattgtggtgaaagatagtgcgggtgactcagatgtggtggtgcaggagctcaagtccatggtggccaccaagatcgccaaatatgctgtgcctgatgagatcctggtggtgaaacgtcttccaaaaaccaggtctgggaaggtcatgcggcggctcctgaggaagatcatcactagtgaggcccaggagctgggagacactaccaccttggaggaccccagcatcatcgcagagatcctgagtgtctaccagaagtgcaaggacaagcaggctgctgctaagtgagctggcaccttgtggggctcttgggatgggcgggcacccaagccctggcttgtccttcccagaaggtacccctgaggttggcgtcttcctacgtcccagaagcagcccccaccccacacatgacccacaccgccctcacgtgaagctgggctgagagccctttctcccatccattggaggtcccaggagtgtcacccatggagaggctatgcgacatggctagggctggttctgccatctgagtttggtttcctggaatgaaaaggcattgccatctccattcctctgccctcttgagccagcacaggaaggtgaggccctgggatagcgcgcctgctcagataacacagagctagttagctagtagcaaccgtgttttctccagatctgtctagatacaaaggtcagaaatcttatttttatacttttatattgtggaagaacagcatgcaacactcacatgtagtgtgtggatttacttgaacatgttctttttaacatgtagttatgaaaatctccttttttgcctctactggtgaggaaacatgaggatcagaggccacgcctcgtgccaagcttggcgtntcgtgtcgcgatgtgacaatcaaacccccttnnnnnntttaaaaaagaaaaaagtattacaattgtgtaagaattgagaaatagagaagtgtaattaa

SEQ ID NO: 87866 - DNA, 392 bp, Homo sapiens
agaaaattgcagcagagattaagcagtttttaagtggtaatcccctctgtagaactgttgatttgtttagttaatgctaatttatttaatatacttctactttttgttgatttttaggtctgttgccacagttattgggagttgccccagagaaggccataaaacttacagtgaacgattttgtgagggataaatttatgcacaaagatggttcggtcccacttgcagcagaaattcttgctggaggctgcgtaagtaccttttgaagctctcttcattgaaaagacttgtttcacatatatatcactaccatggtcaacaggtgtggactaaggcttctgtttaaccacagatcctgcacaagggcagagtctactagggcacctcggctt

SEQ ID NO: 87867 - DNA, 1315 bp, Homo sapiens
cagccttcgcactgcgcctcctcctggctgggcttgcccccatgcactgccgggacgcctcccaagcggctgcctgccactatttcaccatggctgaatgaagcgagtggcacaccgaggatccccagttcttggctgaggtgctcttcactgccaccagcatgctcagcttcacccgcctggcctacattctgccggcccacgagtcgctgggcactctgcagatttccattggcaagatgattgaagacatgatccgtttcaatgagacgtttcagtttctgttctggaccatgttcggtatggaagagcacagcgtggtggacgtgcctcagtttctggtgcccgagtttgcaggccgggccctctatggcatctttaccatcatcatggtcattgtgctgctcaacatgctcattgctatgatcaccaactccttccagaagattgaggatgatgctgacgtggagtggacgtttgctcgctccaagctgtatctgttctacttctgagagggcctgacactgcctgtgcccttcaacatcctgccctcctcgaaggctgtcttctaccttctcaggagaatttgccagttcatttgctgttgctgttcctgctgcaaaaccaagaagccagactatcccccgatccctacttttgccaatcccagggcaggggctgtgcctggggagggagagcgtggatcctaccgccttcacgtcatcaaggccctggtacagcgctacacagagactgcccggcgagaattcgaggagacccggcggaaagatctgggcaacagactcacagagctgaccaagaccatatctcgactgcaaagcgaggtagccggtgtgcggtgaactctggcagagggagggacrcccyggcctcccgacggtgccagcgtcctcagtcactacatcactcaagtgcacaacagcttccagaacctggggcctcccatccctgagaccccagagctgacagggcctgggattgtgaggacccaggaatcatcaggaaccgggcttcaggacactggaggggtgaggactctggcttccggagagtctggcccctgctccccagctcatgtgctagttcatagggagcaggaagcagagggggctggggacctgccccagggggaggattcggggactgagaggaggtcctgatacagtggaagagtcccttcttctgttgctgagcgtggtagcctaggagggtgagggtggggggccccttgggaggagcctgtgctgcttttcttgcttcaataaagtttctgctctggatgtgaaaaaaaaaa

SEQ ID NO: 87868 - DNA, 1800 bp, Homo sapiens
ttttttttttttagatttaaaacagcatacatttattatctgaaagtttctgtgggtcaggagtccaaacgtgatttagctgggtcctctgctcagagtttcacaaagctgcaagcaaggcgttggctggggctgggcttttatctgaggttcagatgcttcttccaagatcacatggttgttcacaaaacttatttccttgcagccgtagagctcatggcagcttgcttatttaaggctaataggagagagagtctctgactggttcactctcttttaaaggactagtctgattaggtcaggcccacccaggggatctctttgattaactcaaagtcagctgattagaaaccttatgtatatctgcaacttctcttcacttttgttatataacataacataatatgggagagatgatcccatcacttttgccatattctgttggttagaagcaggttacatgtcccacccacactcaatgggggagaggattataccaaggcatggattattgagaatcactctagaattctgtctatcatagtgtaattatatatctatgtagtgaaaaaaatagatgtttgtaatttggaggtattaaaaagttgaatacaaagaaaaaattatagaactttaaagtcttaattttaatggagatggcacattattttgaagatagagaaaatggctttctatccttttcctatattacacttagtgccttgggcaggatatatgtccaagtatctaaactgtagattatattatatgaacttaaatggaataattaaataagtaattctgaaagacaagtatttaatgacataactggcttgatttgggaacccattttaccatgtgttagcctcagttgtagtaagcagaggatcatgtaattatatgtctataagtaagttatatggtttttctcagtgtacattagttcaacgtttttaaaggttttttttttttaaagttttcttttaatacctttgacagactgtgattttcatcagaagtgctaatctttcctcaggatggagagttcaggcatcttttcatgttgttttctcacagttttaaatgacatatctacagaagttcttttatcagtgacttttcccttcctggccccacactatctgagggcatactctgtagctccttttattttattttatttttgtgggcatcagatatattctgaagtcaatactaaagctgttagagtatgacatttactaagaatcctgccattttaggcccttcttcttaaaggacaacaattccatggggtatttaggtaaaaaaacaacatggcttggtaaatttagctctttttcttgacattggcaatgataatacaatgcctgtggtgtataattgtcatggctgacttataaattccctacagatatgtggttacttctctactttccctttctttggcttgggcaactgccacgttgatgcactggagccattcttctgcattcttctcatccttggccttaaagacataggttttattgtctgtgaagatttcgaaagcccgggggagagagcggtccctgcgtttcttggccacagccttcacactctgtactttgatgagttctattgggcagtcgtcagggtcatctttagactttcctttttgaaacagaagttgatttccagccagtgtaaaatagcgtgttttccaccttttgatgaacttccatctgacttgcttctctttaagctttcattctatgagaggctggccatcttgatttacaacagttgctttctcaggat

SEQ ID NO: 87869 - DNA, 376 bp, Homo sapiens
agacagattggatggcaaaaattttgcgcctctttgactgcatctgcaacaacggggggtttataggcacctaactgatcctcttcctgaacaataaggacctgctggctgagaagatccgccgaatcccgctcaccgtgtggtttccctagtacaagggccataacacctccaaggaggccgttgattacatccaccgggcgtttgtatacctgatccgcaacaaggagaccaaggagatctactcccacttaaactgcgccaccgacaccagaaacatccattttgttttcgacccggtgacagacgacatcatacaaaacaatgttaagtacattctcctttgctgaggagctgggccccgagaccgcctgcc

SEQ ID NO: 87870 - DNA, 389 bp, Homo sapiens
ccaaggccatcccgcgtgggactcagagttacagctttccctctcacacccgggaccacctgagagggtgcccacggcagccccccacccatcgagggggctggtccggctgctccgccagctgtccttctgcgcacacagtgggcacctactgcacgcatggcactgtgcttacagctggagtgagccgcaagcacacctgctgttgaaggtgcccgcccgacggggccgccctgagcatgggtgtgcagacgtatcctcgagaccctgttcagcgttttgggtgtacgcccaggagacgaattgctggatgctgtggcaattctatgtttacttgtttgaggagcttccatggtagctgcaccatttcacattcccgccaacagtgc

SEQ ID NO: 87871 - DNA, 373 bp, Homo sapiens
cggcaaagcaggaaggaagtgacccaggccactcagcttaaagccatacgtcaacgaacttctataggtgtccatactactagacagcgccggttgctggaccttagagaacgaaggtagcagcaagagtctgttacacatggcgaacctgaccggcgaaggacgaaggaattgacctatgccactcagactaaggccatttctaacgggactagcatcactgaacagaatcctgccaggagaagggcagacgccaagggcaccgcaagctggtcggaagagtctcttaaacccagtgacaatgaacaaggcttgcctgtgttctccggctatccgcccatgaagagactttcatccaccaatgcaggcggga

SEQ ID NO: 87872 - DNA, 423 bp, Homo sapiens
catgtttacctgattacaagacactaagaatggtttggccacctcatctggaagttgctagcaatggtaacattttttattttagaaattttgcaaaccattgcatttataaataggaattctgatatggctgctttaaaattatccagtttaaatggcccaattaaacacattcatttaacttgaaatgtatgacttagggaaatttttcaatttaacttgaagcgatttatttttcttaaattgttcaaaatgatggcatttcagaaacattggattacctgtgatttttgttttggtaaatgtttaaaaacaataaaaaaggaaaacatttacgtgtgcattttctttatacacacacacacacgaaaaaaaaacaagtaagaaacccagaatggtccttatgcatatgagaacagaagt

SEQ ID NO: 87873 - DNA, 1010 bp, Homo sapiens
  misc_feature (1)...(1010): n = a,t,c or g
ttttttttttttggggaggcaggccatttattgaagaactgcttgcagacatggacacacacagccatggtaaccagacgccaccctggggccagggagcacccagaaacagccctgggctgccagcccaggcctggacatttgcccaccacgggtggagggcctcctcttggcatcaaccatccacgacctcctacggcaccatctctcctgccaagttgcccatgggggtctccaggaagaaaaccagccttgggggaattccaagggccccagggagggtgggaagctgcccacgccgctcaggctgtgcccagtctcatgctcaccattctttctaatggccaaaaggnaaattcgctggaccgagggaggtccctctgctgggatgagcagcacagcacggctggggcccccagttcacagaaaatgggtgccaggatcctgggacctgggctggaatgggcacccgctttgggatttcctctgcttcagcctgtgtatggtccagggaacagtgtaggaaggggcgtggcatggggtggggctgccatgtccggggcttctgcgtagcccagcaaagatgctacaggaggaacaggaggagagggctgggaggggtctgggggaggaggaggagatggggctgcagtgaaggccttgctcattgcagggggtgtgggaggccaggcagggtcacctctggccctgcagaaagagggacggaagtaggcgggctcaggcctgcgcctccagggcacacacgtgcacactgggcaggcagaaccaagagggtggcagctccttgctggtgctgtcctcgtggaaccggatgtggaggaagaagtctcccgtgtagaggaagaggagggccccgaggcaggccgactggccggacggctgcaccgcgtcgaggtagaaggtgctggagcccacgaaggagacggtgtcgtgcaggtcgtagttgtgcacgccgttctggtggtcctggaaggggaccacctcgtgcc

SEQ ID NO: 87874 - DNA, 2496 bp, Homo sapiens
tttttttttttttacactaaaaagagtaaattttattgtttataaattatgcttcaataaacctgcctttaaaaaattttttatcagtaattacaattttcaaaagtggagatacttggtaggcccctgctttcttggcccctaaggtccctctctctgttaaactgtagagctccttagaaccaaaaccaaaccacctttcattttaatgaaaatgaaatgcaaaaactggggctccaagcaaggaagaaacgtctacctgcagttcatctgggggttggtgggagaggtggtggagagagtaaggctaagcgcccccagcaggcccaagttctctgtaccacacttggaggcaggtatatgggactgaaagtggatgttctcagccacaagcctgggcctggataggaaacaaaggataagactggaaggatgtcaggtagggtagacccagagcaccagctgggctcacttttcacgccctccatccattcgtcatgagtatccggatacagcaccacacggttcaactcctgagcacagcagtaacctttacacagacagcctgatttcccagaatgaattctcgtgtttacttccagatttaatgactttgactttagtagtcatctgaactatttattttactttgccagtaatatttagaccttatatatctttcattatgccatcttatcttctaatgtcaagtgaacagttgctaaactgtcttctgcatttatcacattaaaaatgtctttcttggaaaatcttcttgatatgaataaagtatcttttagagccatcatttaaagcaggtttctctccaacacgagtctgctgaggtggtgtgagctgtgaactctggctgaaggctttcccatacacactgcaatgacatggtttctgaccagtgtgagttacctgatgttgaataagggttgactttccactgaaggcgtttccacattcttgacatttatagggcttttccccagcatgcattatctgatcttcagtgggtcgtgaggtgggactgaaagcttttccatattcattacatccaaaggatttctcaccagtgtgaactgtccagcgcagaatgagatttgcaccatggttaaaggctctgccgtgcttctctccagtgggaatctgtccatctgctgtgaggctggagccatgaacaaaggctggaccatgttttctgcacttacgagtctctccgctgtgaactttctgatgctgaatgagggttgacctccggctgaaggccttcccacagtcaccacagtcatagggcttctctccagtgtgaactcgctgatgtagggtgagctgggagctctggctgaaagctttcccacattcaacgcactggtagggcttctccccagtgtgaactcttcgatgctgaacaagagtggaactccgacgaaaggctttgccgcactcattacaaacatagggtttttctcctgtgtgaatccttacgtgttcagtaagatgagagttaaaaccaaaggctctgccgcattcattacatacatagggtttctctccagtatgaacccgatgatggaggaaaaggcttgagctctgactgaaggccttcccacactgattgcatttatggggcttctctccagtgtgaattctctcatgctgaataaggctggagcttcgactgaaggccttcccacaatgactgcattcatgcggcttctctccagtgtgaattctctgatgctgagttaactgggggctctggctaaagcctcttccacattcaatacacttgtagggtttctctcctgtgtgaatgatccgaagttgaataaaagttgagcttcgactgaaagccttcccacactcaccacagccaaagggtttttctccagtgtgaattctccgatgaagacggaggtgagaattgagtccaaaagttttcccacattcatcacatttaaatggtttatttccagtgtgaatgtgatggtgcagaacaagatttgagctgtgagtaaaggctcgcccacaccggccacattcgtacggcttctccccagtgtgacttctctggtgtctacttaggtctgaattatatttgaaggttttgctgcatatatcacatttaaagaccctctctcctgttttatttctttgaagtctaacaacattttggtccagattcaagtttctatcaaatgcactacactcttgggttctttctcccaaagatctttccctgcccacggtagcttctgttaaaactctcttgtgaatattgggtttgttcaaactctgcccggcagaatttcccacgcgctctttgagtttgccctcacggccccatgcttcccgaaactcagcggcctgtgcattatcccttaagagtcttcttgatacaaattctggggtttttacttcttcggaaaatttttggtttaaaatagatagttccttcttggtcccaacctcagaatcgttccacat

SEQ ID NO: 87875 - DNA, 1734 bp, Homo sapiens
cgcactctcgggatggagggcgagcgccgggcatcgcaggcgccctcctcgggcctcccggccgggggcgccaacggggagagcccggggggcggcgccccctttccgggcagcagcggctcttccgccctgctgcaggcggaggtgctggatctggacgaggacgaggacgacctggaggtgttcagcaaggatgcctcattgatggacatgaactccttcagccctatgatgccaacatcccctttatcaatgataaaccaaatcaagtttgaggatgaaccagatttaaaggatctcttcatcacagttgatgaacctgaaagtcatgttactacaatagaaactttcattacgtataggattattactaagacatctcgtggggaatttgactccagtgaatttgaagttaggagacgatatcaagatttcctttggttgaagggaaaactggaagaagcacaccccactctgattattccaccattgccagaaaagtttatagtaaaaggaatggtggaacgctttaacgatgacttcattgagacacgcaggaaggctttacataaatttttgaaccgaattgctgatcatccaactttaacatttaatgaagacttcaaaatttttctcactgcacaagcttgggaactctcttctcacaagaagcaaggtcctggcttgctaagcaggatggggcaaaccgtcagagctgttgcgtcctcaatgagaggagttaaaaaccgcccagaggagttcatggaaatgaataactttattgaactatttagccagaaaataaatttgatagataaaatatctcagagaatttataaggaagaaagggaatattttgatgaaatgaaagaatatggcccaattcatattctgtggtcagcgtcagaagaggatctggttgatactctaaaggatgttgccagctgcattgacagatgctgtaaggccactgaaaagcggatgtctggactctcagaggccctgcttcctgttgtacatgagtacgtgctttatagtgaaatgttaatgggtgttatgaaaagaagagaccaaatacaagcagaactggattccaaagttgaagttttgacctataaaaaggcagatactgatctgcttccagaggagattggaaaacttgaagataaagtggaatgtgctaataatgccctgaaagcagattgggagagatggaaacaaaatatgcaaaatgatatcaagttagcatttacagatatggctgaggagaatatccattattatgaacagtgccttgctacgtgggaatcattccttacatcacagaccaaccttcacttggaagaagcctctgaagataaaccttaatcccattgaggacttctgtttgatctttgggagacagcatttattaaccaaagttattctttctggatctgccgtgtccttataaagtggatgaaaaatgttttgtacccatctggaaaaccaacaacttgaaatctcaggtattccaggtcactgacatgaatttgaagatatatctatctgtatggatatatatctatatgtatatagatatataaatacagagagatatctggcttggttttaattatgttcttaaatttgtgtgccaataattgcatatagatttttttcttaaatatttgactgtggaacatgccattttaaatatgttgtaaggactgttttaataaaaagtttagtatg

SEQ ID NO: 87876 - DNA, 875 bp, Homo sapiens
cagaaaaaatattatttgaatctttactcaccttacacacaaaaaaacagtatatagttgcataccaaacccaatttgtttatctgataaagcatttcttaaatagtggtttgtaaaccagatgaacttcagggacattcatagtcatcaaactgttacatgcccactgaaaatggaaaagaatggactcttgtattacagcttaagtaatggatgccttctttttgtttcctattctgtgttcagagctttaattgttcttgaaatgttttccacttgtctattttaattcttgtgagtactagaatagctttggccttttaaaacatttgtttattttttttctgagaatggctaacacactttattgatgttcgaaattaataaagaaaataaaagaaatgtatcttcattcattctgtatgttagcgttttaattacccttagaatatatggataaaaaatactattctttgtcttggagaaggtaagagtctagctagatgaataagggttatctatgtagaacaactagagaatgagaagagagcttatgagattgagtactacgttatgcagtagagaagcacgtcatctgctactgagtatggggagataacattgtgtaacaggaaagtatgatcactatctacttaaaattaaggacaatattaacactacattgctttattttaaagtaaaaattacacgactacacccatgccttggaagacaaaaaagcctctctttttgttagcagaatatacttgttcagcatcggtaaaccattaacattagaaaaaagggctctcatacctcaactcctctagtagccctccatttacaaagagctcccccccccactctctctaacc

SEQ ID NO: 87877 - DNA, 1537 bp, Homo sapiens
taagtgatgaaatgtccaaggactgcttgagtatcctgtataatacctgtgtctgtggggccctggagctggaggagaccaagacgctgcggatccagctggagctctcccaggtcaaagcagaagtggaccggaagctggcagagaaagacgaggagtgcgctaacctgaggcgcaaccaccagcgagctgtggagtccctgcaggcctccctggatgcagagacacgggcccgcaatgaggcgctgcggctcaagaagaagatggagggtgacctcaacgacctggagctgcagctgggccatgccacccgtcaggccacagaggcccaggctgccacgcggctgatgcaggcacagctcaaggaggagcaggcagggcgggacgaggagcagcggctggcagctgagctccacgagcaggcgcaggctctggagcgccgggcctcgctgctggctgcggagctggaggagctgcgggctgccctggagcagggcgagcgcagccggcgactggcagagcaggagcttttggaggccaccgagcgccccaaccttctgcattcgcagaacacaggcctcctaaaccagaagaagaagctggaggcggacttggcccagctgagcggggaggtggaggaggctgcacaggagaggcgggaggctgaggagaaggccaaaaaggccatcactgatgtgagcctgggacagaattgcagagggacttccctgaggctgggcacctgaccagctcctcctccccaacaggcggccatgatggccgaggagctgaagaaggagcaggacacaagtgcacacctggaacggatgaagaagacgctggagcagacggtgcgcgagctccaggcccgccttgaggaggcagaacaggccgccctccgtggcgggaagaagcaggtgcagacgctggagcagacggtgcgcgagctggaggctgagcttgatgcagagcagaagaagcacgccgaggcccttaagggcgtgcgcaagcatgagcgccgtgtcaaggagctcgcataccaggccgaggaggacaggaagaacctggctcgcatgcaggacctggtggacaagctgcagagcaaggtcaagagctacaagcgccagtttgaggaggcggagcagcaggccaacaccaacctggccaagtatcgcaaggcccagcacgagctggatgatgcggaggagcgggcagacatggcggaaacccaggccaacaagctgcgggcacggacccgggacgccctgggccccaagcacaaggagtgacggcctgaccccctgggctctaaagaggaatgtctgctgttgcacatctggctgaggccacctgccccgatcctgccatctctgcatcgccccctgctgccttcggccttccctgggccctgaataaacaccacagccagtttccttctcattcttttctttggggttcaggaggaaaaacacagtcctagggacaaaagccaggtccacagcagtcatttttaaaataaagttatttaatagtctcc

SEQ ID NO: 87878 - DNA, 375 bp, Homo sapiens
  misc_feature (1)...(375): n = a,t,c or g
ggcacgagtggaagaataatatgttttgcttcccaccatgaatcattcactaccattcagagagtcttcagaaatttgcttatgagtaatctttcaatacgtagaggctgaccatttcatgatttcatgtccctttgtcacaacgcaggtgattatgtgtcaacaaatgttcattacaatttgggctttctcaattagaatagtagcaaatcctaaactattttttttagttgaagttttattatgaactatctcagtatgtttgttaagtttatagaactttagcatacccaaaatgtcagttttaaacactgaaatccatgaagttaataagaatatagataggaattcttttaataatttagttttagcagn

SEQ ID NO: 87879 - DNA, 382 bp, Homo sapiens
ggcacgaggaagtgtcttcgaacacataaccgacattaacgtgtaccctgagcccacctgaaggaccttgaaaatattacaccattttttggaattggacttatgtaattattgagtggtgccgacctatttaccgccattctgcacttgacacaattagagggagcgcgggtctaccacaccattgcgtatttgacaccccttccccaaccaaatagagctttgagtttttttgttggatatggagttactctttgcatgtgctacaggctgttgaaaagtaaattggacctgtgcagaagatcatacaactcagccttcagttggctttttaagaaaactgcactttcaataaataaggaacactttcttagatattagg

SEQ ID NO: 87880 - DNA, 368 bp, Homo sapiens
  misc_feature (1)...(368): n = a,t,c or g
ggcacgagctagtgtacagctacagtaataaagactgtatagtattgacaaacacatagatcaattgaccaattagacaacccagaaatagatacacacaaacatacctaattgagttttgtcccaagtgcaaaaaaaattcaatggaaaaaagttatctccttgtaaaactggtgctggaactattattcatccatggacaaaaatatgagccttgacctatgtctcacacctttacaaaaattaactcataatgaattgtgtgcttaaatgtaaaacataaaatttttaaactcttaggaaacaggagaaaaatatttaggatctagtgatagacagttctttgacctgacaccaaaaacatgatn

SEQ ID NO: 87881 - DNA, 362 bp, Homo sapiens
ggcacgaggtaagcacatgagaggcttcacacagggaaaacggataactgagaatctgaaggctgtggccaatacttcaccacactcagggatctgaggaaacacattcgaactcatacaggggaaaagccatttcggtaggtcttactgttttctatttgtcactgaccaggtttcagctgggggtcttgatatactctggaatttttcaaaaaagaaagaaaactccctttactagctcttgatttagcagtgttagctcaccccaggacagctataaccaaccactgcagattagaggggtgctgatggagtccaagaacatccttactctgtggatgatggcctttctgcctcatttg

SEQ ID NO: 87882 - DNA, 349 bp, Homo sapiens
ggcacgagaaattatgtttgagtgcctctgcttactaaagaaattcatgaagaataaagggctacatttgtgcatactgtcctggttagttttttaaaacagacttaataccgttcaaattatcttgctgaatcccttctaaattctaaaaaggcaaactgcgtaaccaggggaatatttaatcttctttatcatatcaggtttaaatatcagatttatgatacaggatggtattgctcttgtggtttttgctatggaaaaatatatcttggtctctgcctgaggatatattaacatctataccatggaacttttaaatggaaaatcgtgtggtataattaaaagaata

SEQ ID NO: 87883 - DNA, 561 bp, Homo sapiens
ggcgaaagctatgcactgcgcagaggctgggaaggctttaattaaattcaaccactgtgagaaatacatctacagcttcagtgtgccccagtgctgccctctctgccagcaggacctgggctcgaggaagctggaggacgcacctgttagcatcgctaatccatttactaatggacatcaagaaaaatgttcattcctcctcagaccaactcaggggacatttcttagagagtatgatggaaggtctgatcttcatgttggaataactaacacaaatggggttgtgtataattacagtgcacatggtgtccagcgagacggagaagggtgggaagagagcataagcatcccattactgcagcccaacatgtatggaatgatggagcaatgggacaagtacctgtaagacttctccacctcgggggcctggctgcctcacaggtatgaagacaaccaccataactgctactcttacgcactcacgttcattaactgcgttctgatggcagaaggtagacagcaactggacaagggtgaatttactgagaagtacgtggtccc

SEQ ID NO: 87884 - DNA, 1925 bp, Homo sapiens
cgtcacagcccgacgcgccacccagctgtttttgtgctcacaagctctagcgaaaagccgccggtatttctccatctggctctcctctacctccaggcaggctcacccgagatccccgccccgaaccccccctgcacactcggcccagcgctgttgcccccggagcggacgtttctgcagctattctgagcacaccttgacgtcggctgagggagcgggacagggtcagcggcgaaggaggcaggccccgcgcggggatctcggaagccctgcggtgcatcatgaagttccagtacaaggaggaccatccctttgagtatcggaaaaaggaaggagaaaagatccggaagaaatatccggacagggtccccgtgattgtagagaaggctccaaaagccagggtgcctgatctggacaagaggaagtacctagtgccctctgaccttactgttggccagttctacttcttaatccggaagagaatccacctgagacctgaggacgccttattcttctttgtcaacaacaccatccctcccaccagtgctaccatgggccaactgtatgaggacaatcatgaggaagactattttctgtatgtggcctacagtgatgagagtgtctatgggaaatgagtggttggaagcccagcagatggggagcacctggacttgggggtaggggaggggtgtgtgtgcgcgacatggggaaagagggtggctcccaccgcaaggagacagaaggtgaagacatctagaaacattacaccacacacaccgtcatcacattttcacatgctcaattgatattttttgctgcttcctcggcccagggagaaagcatgtcaggacagagctgttggattggctttgatagaggaatggggatgatgtaagtttacagtattcctggggtttaattgttgtgcagtttcatagatgggtcaggaggtggacaagttggggccagagatgatggcagtccagcagcaactccctgtgctcccttctctttgggcagagattctatttttgacatttgcacaagacaggtagggaaaggggacttgtggtagtggaccatacctggggaccaaaagagacccactgtaattgatgcattgtggcccctgatcttccctgtctcacacttcttttctcccatcccggttgcaatctcactcagacatcacagtaccaccccaggggtggcagtagacaacaacccagaaatttagacagggatctcttacctttggaaaataggggttaggcatgaaggtggttgtgattaagaagatggttttgttattaaatagcattaaactggaattgacaagagtgttgagcatccctgtctaacctgctctttctctttggtgccccttatctcaccccttccttggaatttaataagtctcaggcatttccaattgtagactaaaaccactcttagcatctcctctagtattttccatgtatcaggaaagaggtgtcttatgtagggagggggcaagtatgaagtaaggtaattatatactactctcattcaggattcttgctcccatgctgctgtcccttcaggctcacatgcacaggaatgctacatgatggccagctgcttccctccttggttatcatccactgcagctgctagttagaaaggtttggagggatgacttttagtaaatcatggggattttattgatttattttcacttttgggattttgtggggtgggagtggggagcaggaattgcactcagacatgacatttcaattcatctctgctaatgaaaagggttctttctcttgggggaaatgtgtgtgtcagttctgtcagctgcaagttcttgtataatgaagtcaatgccatcaggccaaggaaataaaataattgcttaccttaaaaatccaaaaaaaaaa

SEQ ID NO: 87885 - DNA, 414 bp, Homo sapiens
  misc_feature (1)...(414): n = a,t,c or g
ctcttcatttctgataataaatgaatttgtgccactaaccatttcctcagaagtctgagggccttgtggttgggatggtccccagcaggtaggggaaacaacaggcaggtaggagaggaagtggaggctgcaatgcaacagttctgcctcctctggtcacacttgtcaaagggcactgaagtcacacctgtcagtccctgagcaaagctgtagtgaagtcccatcagggcactcagcttagtcatcagaatcataaaagcaactttaacgtataagtctttatttaccccagggacccagcttcccacaaagtaactcactcaatcttcataacaaccctacaagataggtacaccctattatccccattttacagaaaagaaaactgatttctcagcccatgcgccacnctct

SEQ ID NO: 87886 - DNA, 475 bp, Homo sapiens
tttttttttttgaaagatctgtctactttattttctggcaattcttgcttatcctaacgtttccaccagtgattcagcatgtaagaagaaaagtcacatcaccatttatgaagtttgtcaggctttaaaaaaaatagttctggtctcctgggagtcaacattcatcttcaacttctctgattggtggaatcaagctgcttgtggatttatattggttgatctggttagccatgtgggtactcatgggcttgatttgaatgtttctgggataggcattatccggttcatctgtaaaccatttcttttctcgtcggttcctcaatggagacgcggcgcgttcgtgctacccgtcgtcctccctagtggtctcatccacttccggcgtcggcgccttccattcactacgccctcaagcccgccagctcggggagcgcggagtggcgcgtaccattgcgggcgggggagctgggcgcgg

SEQ ID NO: 87887 - DNA, 420 bp, Homo sapiens
  misc_feature (1)...(420): n = a,t,c or g
ncattctatgtgtcatttactggggacacatagtgtacaagacttttgtggcctctggtcccttgaaggagaataaaaatattaaaatagcttatttatttatttttttgactgccctaaattatgagggatgaattttacaaactttacttatattagtggtaacaggggaactggagagttttgcgccttctctaagctgcccggcaagaaccaccaatagcatgggggaacatacggtccttttcaagcccatggctctttcggcctgtagatgtcagcccacacatctccctgtgcttatagactgctttggagatccattgggtgtcaggatttcttctgatagctttatggaatggatcaatgaggataacctcaaaaaatttgtatgtgtaatcttcaccaacccaataagaa

SEQ ID NO: 87888 - DNA, 414 bp, Homo sapiens
cccacgcgtgcggagcagccgccgaattacacttcctatagtacattaaacaacctgacgcaaaggaaagaagaagaactgttcactggaaaaaagaaacagagtccgaggcctcagaaattactattcctcccagcaccccgggggtaccacaggctcccggccactgggaagactacggaagaggtgacaacttttatctcccacactgagaccctggggggattgtgctatggaacatctttaaccgaatgccaatagcaaggaagaacattacggacggggagcaccatgaatatctcattgaagtacccagactattccacacttctgaagactgaggccccacactggaattgtgaaacccactgcgtcccgtgacaggacgtcgaaagggtaaaggagcctgggttg

SEQ ID NO: 87889 - DNA, 379 bp, Homo sapiens
cgaaattgactgccccactgtcatctgcctctcaatttggtactctgtaactctgtgaccaccaagaagcctttttccgtcccccacaaagctctttttggaaaattccctacgggagctgaattttaagcccatttactttataggaagaaacagaaaggcagcatgtcagctgaaacaccaatcacattgaatatcgatcctcaggatctgcaggtccaaacattcaccgtggagaagctactggagcctctcataatccaggttaccacacttgtaaactgtccccagaacccttccagcaggaaaaaaggacgttcgaaaagagccagtgtccttctagcttctgtggaggaagcaacttggaatttattagaca

SEQ ID NO: 87890 - DNA, 473 bp, Homo sapiens
  misc_feature (1)...(473): n = a,t,c or g
acggagaggggttgcttaacgaagaattgccaaattgctgggaatgtccaaagtgctaccaggaggacagctcggagaaagcccaggtaaaggaaccttatcagatttgcactgtgacagaaaggaggcatcaaatgtgggggattgctacacgtttgcctttgcattagtgttcacacagtttctctgacctaggagattatttttgtttggtttggtatgtttttcctttggttaatttttagtattttctttgttagagtttgtagcattgtgttttgtattactaaatgttgttccacttgggatctgcaaattcctaaggtccttttatactctggggccctacaaagagaggaaccacggctgggctatttgaggagagaaattaggtgagtatgatccctcctgaggaatgtnaactagaggagaggcagtggcctgaggcagccagtgagtgcagcantgtactt

SEQ ID NO: 87891 - DNA, 345 bp, Homo sapiens
gttttggaaaacatggctgttaacggttccataaccctcctgtgtgtggaaggaccctgttttcttagcccttcccctcttttcgccccgactcaggtaagccgcgtagcagatacgctgccagcaacacgggcgaccatgctgatgagcaggacggcgattccaggtaaaggctctgcggccacttcagggcggggcgtgtcctggtcccaggcctgggcaaagccccaccctcctattcacccagatgttttctccctgagaagtctggagtttttttccgtttagtgggtgctctcaggtagtgtagagtggaggactgcgtaaacagtctggggcttgctg

SEQ ID NO: 87892 - DNA, 267 bp, Homo sapiens
gtcctacccagctggcccagccagctccagcccctgcagccttctgacctcacccacctgccaaaaggcagtggacccatcgcagatcccaggtctcccacaaaggcccagagcaagggtggggcaggtgcccaatgggatgggtcagcatacccctcctgggaatgcgggctgccttgcaagggctggggagggggtcaagaaagcagactgcagcatggccctcctctgcccagctggtcaggcatggccgggtcgacgcggccg

SEQ ID NO: 87893 - DNA, 276 bp, Homo sapiens
tcatgaaggatattgggccgcagctttgttttttctattgtctgtctggttttggtcagtaagtaatactagcttcataaaatgagttggtcagtgagtaatactagcttcataaaatgagttctcctgttttattttctgaaagaaattcttcaaacatttggtagaattttccaatgaaatcatcccaacctggagattgatttttgggagttttcacatttatgaattcaaattcgttaattgtcgtcgacgcggccgcggtcgacgcggccg

SEQ ID NO: 87894 - DNA, 347 bp, Homo sapiens
  misc_feature (1)...(347): n = a,t,c or g
cctagaggttctttatacccacagaaacagtgaggccccaatctgcagggatctgctttaggcagtcccttgccagtcaaaagatatgactcctaattcattactatactatgggagcaaagggaggggtttgaagtaatgcacagaagtctgaatagggcctttgtcaagcacctgtgctaggccaacacactaactgatagagaactgttcattacatcaacatctaggtcaaacccagaacaatgacatcctcagtgagattttgtgataatatttctggactgtgtattacaaggaactatagtggtgcagtaataataatgttgattgtgatgatcaacatn

SEQ ID NO: 87895 - DNA, 327 bp, Homo sapiens
tacatctgtcctcttggcatctcattgggatttccttgactgctctcccctgttggatctcctgtgcccttatcctgtttggtcttctttcttggtttattttctcactttggtagacttcatcttctagtaagtaggtcttgagagtagatagctgggaggtaaacatttatgaaactttgcatatttgaaaatgtctttatttgctttcgtatttgggtcactgtttggccaagtattgaactctagacttgaaaacattgtcggttgcttcagatggtgccattcagatgttccgaagttatttgggtttctaaacctttgtat

SEQ ID NO: 87896 - DNA, 368 bp, Homo sapiens
  misc_feature (1)...(368): n = a,t,c or g
tgttagacccgcctgctttctcacatgagaagaatggttgtactggacaaatctgacccatatacataatctaattaattgctcagaaagacttaatgcctgatcatattcgactataaaaaatactcttctacaccatctatttactacccaacaagccagggttggaacagatttatagccttttttttgaaatcacgtaactgattgttctgtggctagaacaaagccgtatatggactgtgtgccacaaaagcccatcactattgagctgaactatacaaccagatattcccctccccagtatgacctgcatattctcatctcctttcctctgctgtggnttccccacctcgaagttctcattt

SEQ ID NO: 87897 - DNA, 530 bp, Homo sapiens
agctctccgggccggcgtgggagcccgcgctccaaagcccggtggggggaggggcgctcacgcaaccgccactgtctggagcgggctcgcctctgcggcagccctcaccgcccgggctttactgaagcggagtctagcatgtgcggctgctccacagcggtgtgggtggcggcggctcctctgcagcagcctcggcagtaggggtcagggtggccaagcccaccgtggagctcatctgagagttgtaaggtacgggactgcctcggtctttgggacgccccgtctggtagcatcccagatccagcacgttccttccggccctgcaccccggcccggtgcctcacaccccgctaccccatgcatccagactctaaggcagcccctgcatctcagtcctgacatcgctgtccctggagcatcctccgctggagctggagcttgacagcttacagagtcaagtccctgggaacttcaggaagcagcccaccatgtttcaaccacttactatgtgccatttcctgtgttcagag

SEQ ID NO: 87898 - DNA, 428 bp, Homo sapiens
gggtttttagtacatattcatattcacacaaacataagataagacatactggagagaaaccctttaaatgtacagaatgtggcagatcgttttacatgtcacacctaactcaacatacaggaattcatgctggagagaaaccctacaaatgtgaaaaatgtggcgaagcctttaataggcccacatcacttagtaaacataagagaattcatactggagagaaaccctacacatgtgaagaatgtggcaaagcctttagacggtccacagttcttaacgaacataagaaaattcatactggagagaaaccctacaaatgtgaagaatgtggcaaagcctttacatagtccacaacgctgcttgaacacaagaaaatttatactggagagaaaccctacatatgttaagaatgtggcaagactattaaa

SEQ ID NO: 87899 - DNA, 54 bp, Homo sapiens
tttttttatgacttgcaggcacaatatctagtactgcaagtcataaaaaaaaaa

SEQ ID NO: 87900 - DNA, 398 bp, Homo sapiens
ggaaaaaccggaccactttttccctgagggcacttctttcatacatgaaccccgccgcccgaactgaggagacttggtacattgcttgggtggcattagccgctcaactactgtgactgtggcttaacttatgcaaaagctcaatttgtcgatgaacgatgcctattacattgtcattatgaaaatgtccagcatatcccctaacttcaactccatggatcagcccctggacttccaaaggacgctgggactcaggagcccatgttacaacagggttcctgcccaaaaaatgtattttaccaccccttccaaccataatgcctaccaggtggactctgtgcaatctacgtgaaagagcccacacccctccttgctagaatgtgtctggccctctagct

SEQ ID NO: 87901 - DNA, 443 bp, Homo sapiens
ggcttcttcagggggtctgacacagaaactgtgtccaggggagattctcagtgtggtaagggactgagtgcgtcagggactccccagcagctgagggcctctctctccctgttgtgctcttgctggggctggtgatccaggggctcttaccccttggaagccgggtggaacatgagttccaccaccctgttgctgtagccaaattcattgtcgtatcagaaaatgagtttgaaaaagtggttgttgaaggcagtgccagccccagcatcaaaggtgaaggaatgagtatcactagtaaagttggaggagacaacctgttgctcagtgtagtccagaatgcctttgaagggaccctccaatgcctgttttaccatcttctttatgtcatcatatttggcaagtttctccagatggcacatcaggtccacaaccaacacattggc

SEQ ID NO: 87902 - DNA, 5059 bp, Homo sapiens; identical to SEQ ID NO: 72947

SEQ ID NO: 87903 - DNA, 560 bp, Homo sapiens
tataaatataccagcagtttgtcttttgagcagctgaaaccttcagagctttcaaagatttgtctcttcactgtagctgcttttggtggtagagtttccatcctttcagtattttattttaaaatgtaaatagtatttcatgtatggaaaagaagcctgctatttttctttgctaaaaaaaattttaaatctaaaataatgatatagtgttacagcaaattagtgatgtttcatactactacattaatggattattttagaaacaaagataaaaaaaccttactgagccacttaatgaaagtaaattatttaaagtacacactttatagagtgctttcaggccttggagaggatattttgagtcatataattacattttaaaaatttattttcagagacttatttgagaggcttttctttgcctataagtctgaatttttgctcttactggcacattgtttgtaggtttatgaaccacatgaaacatcacttggaacttgagaagcataacaatgaaagctgggaagaccacaccatgtgacaacagtgatactggcata

SEQ ID NO: 87904 - DNA, 266 bp, Homo sapiens
ctttggattgctgtaaggaccttgactcaggtgttgcttccttgaagatctgatgaccactcttttcttttcttgccctctgcttgctttctgggttcctgtccttgtgcttatgcagtttaagggaagtacagtggtggaaagatcactgtctgcctggctgccaccatattgttggtgacctcatgaaataggactattacaatcaaccctaatttgaaactacaaaaatgggttcttgggttcagtctctgtcgacgcggccg

SEQ ID NO: 87905 - DNA, 943 bp, Homo sapiens
  misc_feature (1)...(943): n = a,t,c or g
ctcggttagggcctcacttccctgcttccacacctcagggaggcctcggtgattttgccagagcctcagcctccatcgctctgtaacctgcgggtattggatgattcgtagctaagacttcgcgacacccttgaagctgagaaatggaacccttaacattcagggatgtggccatagaattctctccagaagagtggaaatgcctggaccctgcccagcagaatttgtatagagatgtgatgttggagaactacagaaacctggtctccctaggccgggcatggtggctcacgcctgtaatcccagcacttcgggaggctgaggcgggtggatcacctgaggtcaggagttcaagaccagcctagccggcatggagaaaccctgtctccactaaaaaaaaaaaaattagccaggcgtgatggtgcacacccgtaattccagctgctcgggaggatgaggcggaagaatcgcttgagcctgggaggcggaggttgcagtgagccgagatcaggccgctgaactccagcctgggtgacagagtaagaacctggaaactctcagacttcaaatggtcctgcaacaggagtatcaacctattttcttcccttctgtacaactgtgtttctccacatttcctctggatactgcaagtcaaacctgtgttttactactggctcttctgttgtgagcaagtcatttttctctgtggctctgttccttcctctagggagaccaggtttctgtagttctccaacatcacatctctatacaaattctgctgggcagggtccaggcatttccactcttctggagagaattctatggccacatccctgaatgttaagggttccatttctcagcttcaagggtgtcgcgaagtcttagctacgaagaattccnccngnctgtctagagagtagtcagtcaaannnngggggccatt

SEQ ID NO: 87906 - DNA, 561 bp, Homo sapiens
gtttgtctctctcttctgcactcttggaaaaaaagccagaattcacttctctattaagaaaaaaaaagttacagaaagcagggaaacattaagaaagcagcttctgaaactggattagtcctaagatttaacagttcactgagctccaatcctgccccttatgcatcttcagagactgtttcctatagctcccccaaaccaatttgagcattattgtccttacagtgggaaacaaagtttcacaaaaaagtaactcgcctaaaatacgaagcttctccatttcactgttaaggggctataaacttaagttttttcatactctaatgacacgttacaaatgaggatatatgcatcctccacccttttcttcctatcaagatgctatgctccatggtccaaaacaagccctctgattaagctgttccaacatacacaaaattatggttattgatttccagatgggtgtacgttaaacaccgaactgagaaggcactgataattttcatgcagtcagcgttgtttcctcgtgcggaattaccgcaggcgatcaaattgtgctcc

SEQ ID NO: 87907 - DNA, 664 bp, Homo sapiens
tttacagtctgttctcagtgaaggccagagctgtctttctaatgatactgtcctttaagaatccttgttggatatgcatgtgtgttgttcagtggctcaaaataaaggactggaatgatgtatggttctctcttcatccaggacaatttagcttttggtaacctgggctggcattgttattaatttctctcctagatcaaatggttggtggggttgctttccaacgttaagacaccactgtgtttgattattttggttttgtaactaatagggcaatgagtaatgcattcattttggaaacaggccagtggtaacacagctcttgggcctgctggacgtgtggaaaaataggacagagtaaacaattgagggcataaataatgaatcttccaactgagccctgggagagtgagggagattatcctcagagctgttcagtctggcagtaaaagggaaagagtccactgaattaattacccagactgtatttgatactgcaggaggtatgagattgtcaaaaccattcaaaacaaagttacctttccgatacaaacttttaatccatctttttgggtggtttaaaccagacatttgaattgttcatttattttttagaagccaggcctttgtatcttctttaaactttgttctatatgttagcatt

SEQ ID NO: 87908 - DNA, 448 bp, Homo sapiens
  misc_feature (1)...(448): n = a,t,c or g
ctgaagtctaatctctttctgtatctttggaataatgccaaattccactacattaacatatcaaataagtcacatgtgaataaacccacttcaccattagtctatttctaaagagacaatttattaataacaagctgtaaatactgaaaaggatatgagtttcatacatttaaggtctttcacagctatgcttctagtaccagataaaaactcattaaatcaagtactccgaaaactaggccataacagaattcctaaattgattaattacagaaactatatgttaaaagaaatttaaggctcttctctatcttccacaacctcaccatgtttcaatagttcagaatcaaaacatttcactccaccccaatgaaaaagtctcctgatattttcacgcggccgcgtcgacgtccgacagtttnccccangaatncctaattggaatcgg

SEQ ID NO: 87909 - DNA, 1279 bp, Homo sapiens
aggaattcggcacgaggcaatttttaatttttgttaatatcaacagcaaaagcctagtgcattgggagatgtgcaacctccctgaaaatcttttctgtttctggagtacttcaggggtggcctctggccccagagcctttgccacagtgctcccaccagcccccacctcatccgtctgtttgcagagcctcatctacaggtccccacgctgccttctttactcactctgcgcttggccgttttgttatttggcttagtctacattgggcggaagtctgtgtgcacagagtgggtgttccttcgagccccttccactcagagggccacacccagcgatgccagtgaaggtggcacagcctctcttcagtttctcctgactgtgatctcactggggtagaattcccctgagagaattccctcactcacggctccctttgccagagtcagttcaatcaggtctgatgtgagcaatttacacacttgtctcagaaagtccctcagggtttgtagaggactgcaggggggcatccgctgcagactcagcctttctctgcagccatcctgcagtgggggtgagcgggcacaggctgagaactgctcttgggtggtggaagcaggtgtcacggtgcaagtctccccctgcacccctcccccagcttgagccgtgtcacccccctctccctccagcatgggcctgtgtctcaggctctctggaaggtggccctgccccggaccctcttgcaggtgtcctggtttgacttggaactagatggccatctttccaggctttggtggcccaagagcagtctgggtggatggaagtggctgtcccctcctctccagcccctgcccacccactggtggaggtgctaactagcagggacgtggcataggatgggagctgggcgtgaggtgcttggggtccattctttgtccctcagcttctcagagtccggccagcccttgtgttcccgtgccccacactttcctcctccccactgcagtgagtcaatagtccagggtggggcctggcctccctgccctgattggggactcaggaggtgaggcctggggggcttcctgccccctccttgcccacctgcctgcccccgggcagcacgggagggagagcagggtgagcacgcttgttggtttcagatgcactttctgcttgcattgccgtatctgtgcgttccttcatcctggtcctggctttatggaacaccatgtttttagcatgtttttaaataaaaacggataaagtgtcaaaagcacaaaa

SEQ ID NO: 87910 - DNA, 413 bp, Homo sapiens
tttcgtggcgccttcacagaccctatccctcacctgcgctgtttctggtgactccatcaccagtggtgggaactactgggcctgggtccggcagccgccagggaagggcctggagtggattggatacatctatcatactggaagtgcctactacaccccgtctctcaagagtcgagcgatcatttcaattgacaaaagcagggtgctcttttccctataactgagctctgtgaccgtcgcggacacggtcatgtatttctgtgccagagcctggtctggggattactttgactactggggccagggaatcctggtcaccgtctacgcggcctccaccaagggcccatcggtcttccccctggcaccctcctgcaagagcacctatggtggcacagcggacctgggctgcctgg

SEQ ID NO: 87911 - DNA, 408 bp, Homo sapiens
tttcgtgggacccacgcccaggtccaactggtacagactgtggctgaggtgaagaagcctggggcctacaagaaggtctcctgcaaggttttcggacaccccctcactgaattatccatacactgggtgcgccaggctccacgaaaagggcttgagtggatgggagcttttgatcatgaggatggtgaggctatatacacacagaaattccagggcagagacaccatgaccgttgacacatctatagacacagcctacatggagctgggcagcctgagatctggggactcggccatttactactgtgcaacagatcagccgttttgtattggcagaaggtgtaacggatactggggccaaggaaccctggtgtgcgtctgcacagcatccccgaccagccccaatgtg

SEQ ID NO: 87912 - DNA, 1747 bp, Homo sapiens; identical to SEQ ID NO: 64498

SEQ ID NO: 87913 - DNA, 592 bp, Homo sapiens
ggctctggcagcagcttcactaaggtgggatggatagcagggtctcaggcacaaccagtaatggagagacaaaaccagtgtatccagtcatggaaaagaaggaggaagatggcaccctggagcgggggcactggaacaacaagatggagtttgtgctgtcagtggctggggagatcattggcttaggcaacgtctggaggtttccctatctctgctacaaaaatgggggaggtgccttcttcatcccctacctcgtcttcctctttacctgtggcattcctgtcttccttctggagacagcactaggccagtacactagccagggaggcgtcacagcctggaggaagatctgccccatctttgagggcattggctatgcctcccagatgatcgtcatcctcctcaacgtctactacatcattgtgttggcctgggccctgttctacctcttcagcagcttcaccatcgacctgccctggggcggctgctaccatgagtggaacacagaacactgtatggagttccagaagaccaacggctccctgaatggtacctctgagaatgccacctctcctgtcatcgagttctggga

SEQ ID NO: 87914 - DNA, 403 bp, Homo sapiens
tttcgtgatattgttcctttgtaaagatatatacttactaaattttaggtgatttgatgaaaaagtagaagacaatttgactcttgtttccctaaggaagtgatatttgagctttaatctgaaagatgaataagaggtatatgccatttattcttgggttgcttggctaaaaaaagcaagcacatgaaaggaaaggtattatatatcatttttgttttttggcaaacggatgtcagcaatatcttactgtgaatggctttgcttttgttcaggaggagctgcgttgggtcagagctggtagactggcttctagaacactgtcctttcgtccagtgcagatctatggccataggagtctggcaactcctactggacatgggaattatgttatcagtggaccagc

SEQ ID NO: 87915 - DNA, 407 bp, Homo sapiens
tttcgtcggggcgctagttcctagcagctgggccagcgtaggggcgcaggtcggatccggcagaggagggcggaggaggacgcagggggagggtggagagacccgcgagccgcagtctcagcctcgtccgacgcgcctccgcctctcccgggccgggcccggtgggcgctcagagcttgagggcgccggctgctccctcggtagcgggggcaagcggaggcaggggtgtgggcggctaaaatgagtgaaaggagaagatctgcagtcgccctgagctcgcgagcacatgccttctccgttgaagccttgatcggctcaaataaaaaacggaaactgcgagactgggaggagaaggggctggacctgtctatggaggcgccgagccccgcgggcccactcggagacac

SEQ ID NO: 87916 - DNA, 388 bp, Homo sapiens
tttcgtgggaggaggagaaggcgaccttctcctactcctcctccctggaaaagagctaccagctgccatacggggaggtcatcaccatcggcaaccatcgcttccgctgcccgaagacgctcttccaccccttcttcatgggtatggagacggggggcattcacaacaccacctacaacatcatgatgaagagcgacatcaacatgaagaacgacctgtatgcctacaacgtcatgtccgggggcaccacgatggaccctgggatcgatcaccccatgctgaaaaagataaccgcgctggctcccatcgccatgaagatgaagatcatccccccgccggagcgcacatactcggtgtgcatcatgggcttcatcctgcacgtcgtgtc

SEQ ID NO: 87917 - DNA, 935 bp, Homo sapiens
gaaagcctgccagcacctattccacctcccagcccagcatggcacccctgctgcccatccggaccttgcccttgatcctgattctgctggctctgctgtccccaggggctgcagacttcaacatctcaagcctctctggtctgctgtccccggcgctaacggagagcctgctggttgccttgcccccctgtcacctcacaggaggcaatgccacactgatggtccggagagccaatgacagcaaagtggtgacgtccagctttgtggtgcctccgtgccgtgggcgcagggaactggtgagtgtggtggacagtggtgctggcttcacagtcactcggctcagtgcataccaggtgacaaacctcgtgccaggaaccaaattctacatttcctacctagtgaagaaggggacagccactgagtccagcagagagatcccaatgttcacactccctcgaaggaacatggaatccattgggctgggtatggcccgcacagggggcatggtggtcatcacggtgctgctctctgtcgccatgttcctgctggtgctgggcttcatcattgccctggcactgggctcccgcaagtaaggaggtctgcccggagcagcagcttctccaggaagcccagggcaccatccagctccccagcccacctgctcccaggccccaggcctgtggctcccttggtgccctcgcctcctcctcctgccctcctctcccctagagccctctcctccctctgtccctctccttgttccccagtgcctcaccttccaacactccattattcctctcaccccactcctgtcagagttgactttcctcccattttaccactttaaacacccccataacaattcccccatccttcagtgaactaagtccctataataaaagctgaagctgttctgcctaaaaaaaaattcaaaa

SEQ ID NO: 87918 - DNA, 559 bp, Homo sapiens
tgtgtcaggggggtgactgcgtcaacacgtttggcagtttccagtgtgagtgcccacctggctaccacctcagtgagcacacccgcatctgtgaggatattgacgaatgctccacacactccggcatctgtggccctggcacctgctacaacaccctggggaactacacctgtgtctgccctgcagagtacctccaagtcaatggtggcaacaactgcatggatatgaggaagagtgtctgcttccggcactataacggcacatgtcaaaatgagctggccttcaacgtgacccagaaaatgtgttgctgctcctacaacattggccaggcctggaatagaccctgtgaggcctgccccactcccatcagtcctgagtaaccctccccagccttcttcccagcctggcccctcctagcataatggttaaggaaacacagtgcccttagggttcttagattaatcctccttgttctgatgagagccagagagttgaagttttgtccctctattagtccattctcatactgctgtgaagaaatactggatactgggtaatt

SEQ ID NO: 87919 - DNA, 462 bp, Homo sapiens
  misc_feature (1)...(462): n = a,t,c or g
tttcgtagcgatcgctgcagcgagggtctggcggctaaaccgtggtttgagccaggctgccctcctgctgctgcggcagcctggggctcggggactggctagatctgtgagtacctgggccccaggcggttttcccaaaggggattagggatgtaaaggctatcttcagagtgtggggtccctgaaggatatgaaggaagggctgtcacaaaagggaaaaagagtgggagactccttggagaagataccgaagggaagatctgccacttccttaggagacgaaaagaacttccacttctttaggagagaaaaaaacccgtttgcaacttctttgtgggccctgagggagacgacttgaagagagagatgggggttccttattagccacctccacttttcgagaatgaanagcaaaaaagaggaatcttctncttcacgctcagctttatttgcccaacttag

SEQ ID NO: 87920 - DNA, 447 bp, Homo sapiens
  misc_feature (1)...(447): n = a,t,c or g
aattcagtgttgaagaagtaagtggtagaggcactgaggaccagatgagtgaggacaaagaaggcggccttggatttggctagtagacacaagcaacctttgggagagtagagtcatggaggtggcatgggggcagcacatgttttagaccagttcaacagagacctcagtggcctccctcttacccttagggcactcctggccagctaaggaaggggaggcctgaggatccctgggataggcagaaggctctagtctgagaaagggaggcaaagccagattttaggaagtaggatccttcctggggctaagtctggtgctggcctcacccttcttcctctgcctctagcagactgaatgccagcacctccacaccaaaggccgaaggcatggcaggaaaggcaagaagcaccatcacaagcgttcccactcaccctcagtgagtan

SEQ ID NO: 87921 - DNA, 449 bp, Homo sapiens
gcggccgcactcggcgcaggagaacggcttttccgtggtgtggaccttcaggtgctgcgtgagccgcgactgctgagaaaaggtctttttgcactcgccgcagggaaactccttctgcctgtcgtggactctggtgtggcaggcgagcttggaaggccgcgtgaagcgcttgccgcactcggcgcaggggaagggcttttgctcgctgtgcaggcgctggtgggcgcgcatggcgttcctccagaagaagcccctgctgcactccgggcactggaagggccgcttcccaatgtgttgcagcccgtgggctttcaggcttctcttgaggcggaaacttttgttacactcgggacacgaaaagggcttctctcccgtgtgaactctgatgtgctcgtccagcttaatcttgtagatgaatttcctgccacattcaccacaagaaaacggct

SEQ ID NO: 87922 - DNA, 1038 bp, Homo sapiens
ggcacgaggcccagcctacactgcctaaattcaaatcttagctcctcactcacatgctttatggttctgcacaaatgactccacctctgttccctcagctgcaaagtagtgataattgtgtcgcctaacctacagaggtgtcatgtaggttcaatgaaataatgcatggaaagcccttcaacagagcctggtgtgtggaaaatgctcagtcaatagtagctggttttattgttcatgtggactttattttttaaccatctcccatcttccctttgctttttcagctccagggtttgagccacaatgtgatcttcaccttggattctttgttaaaaggagacctaaagggagtcaaaggagtaagtgttcagaaatttgattttcactttaacttgaaaggattaattttttttttcctctttcaagatcatagtagtacttgtatttgaaagactctttgaacattttcagcgttaaaaatgctcttggaaaatgatcattggaaaaaatgtgcctcttcacataatggtattgacagaggaatgagattaggcactttcaagaagattgggaaggtcctccatgggtggggagagagaagctaagcccgagtcttggctcccacagtgtgaccactggggacccagcccttctgaacctcgggctcctgcttcatcagcatgaccaggggcgcttacccttcttttcctctcctcaggccttcttgtgtatataacacatggtttgatgttgcccaggcacagtggtcatgccctataatctgagcactttgggagaccatggcggcgggtaaattgcttgagcccaggagttcaagaccagcctgggcaacataataagacccccatgtctacagaagaagtacaagaattagccaggggtggtggtgagtgcctgtagttctagctactcaggaagctgaggtgggaagatcaattgagcctgggagttcaaggctacagtgagctgtgattgtggcactgcactccattctaggcaacagagtgagaccctgtc

SEQ ID NO: 87923 - DNA, 4347 bp, Homo sapiens
tttcgtgccgcggctgctgcgggaagtggccagttcaggaggcggaccccccgagggcagcgctgcggggccgttttccggccctcctgacgcgacactgcccctctccgagagctgagaaggaaaagaggagcttgcggaggtgcggctgcaggccgttgttggtcgagctggcgggtcccgcgggccaggccgtggaggtgttacctcattttgaaagtcttgggaaacaggaaaaaattcctaacaaaatgtcagcttttcgaaatcattgtccacatttggattcagttggtgaaataacaaaagaagatttgatacaaaaatcccttggtacttgtcaggattgtaaagtccaaggaccaaatctttgggcatgtctggagaatagatgttcatatgttggctgtggtgaatcacaagtagatcacagcaccatacattctcaggagacaaagcattatctaactgtgaaccttaccactcttcgagtatggtgttatgcttgcagcaaagaagtatttttggataggaaattaggaactcagccttcattgcctcatgtaagacaacctcaccaaatacaagaaaacagtgtccaggattttaaaatacccagtaatacaacattaaaaactcctctggttgccgtatttgatgatctggatatagaagcggatgaagaagatgaacttagggccagaggtcttacaggtttgaaaaatattggaaatacttgttacatgaatgcagctttgcaggctctttctaattgcccacctttgacacagttttttcttgattgtggaggactagctcgaacagataagaaacctgccatttgtaaaagttatctcaaactaatgacagagctgtggcataaaagcaggccaggatctgttgcgcctactactctgtttcaaggaattaaaactggaaatccaacatttcgggggtattctcagcaggatgctcaagaattccttcgatgtttaatggatttgcttcatgaaaaattgaaagagcaagtcatggaagtagaagaagatccgcaaaccataaccactgaggagacaatggaagaagacaagagccagtcggatgtagattttcagtcttgtgaatcttgtagcaacagtgatagagcagaaaatgaaaatggctctagatgcttttctgaagataataatgaaacaacaatgttaattcaggatgatgaaaacaattcagaaatgtcaaaggattggcaaaaagagaagatgtgcaataagattaataaagtaaattctgaaggcgaatttgataaagatagagactctatatctgaaacagtcgacttaaacaaccaggaaactgtcaaagtgcaaatacacagcagagcttcagaatatatcactgatgtccattcgaatgacctgtctacaccacagatccttccatcaaatgaaggtgttaatccacgtttatcggcaagccctcctaaatcaggcaatttgtggccaggattggcaccaccacacaaaaaagctcagtctgcatctccaaagagaaaaaaacagcacaagaaatacagaagtgttatttcagacatatttgatggaacaatcattagttcagtgcagtgtctgacttgtgacagggtgtctgtaaccctcgagacctttcaagatctgtccttgccaattcctggcaaggaagaccttgctaagctgcattcatcaagtcatccaacttctatagtcaaagcaggatcatgtggcgaagcatatgctccacaagggtggatagcttttttcatggaatatgtgaagaggtttgttgtctcatgtgtccctagctggttttggggtccagtagtaaccttgcaagattgtcttgctgccttctttgccagagatgaactaaaaggtgacaatatgtacagttgtgaaaaatgcaaaaagctgagaaatggagtgaagttttgtaaagtacaaaactttcctgagattttgtgcatccaccttaaaagattcagacatgaactaatgttttccaccaaaatcagtacccatgtttcatttccgctagaaggcttggatcttcagccatttcttgctaaggatagtccagctcaaattgtgacatatgatcttctgtcagtcatttgccatcatggaactgcaagtagtggacactatatagcctactgccgaaacaatctaaataatctctggtatgaatttgatgatcagagtgtcactgaagtttcagaatctactgtacaaaatgcagaagcttacgttcttttctataggaagagcagcgaagaggcacaaaaagagaggagaaggatatcaaatttattgaacataatggaaccaagcctccttcagttttatatttctcgacagtggcttaataaatttaagacctttgccgaacctggccctatttcaaataatgactttctttgtattcatggaggtgttcctccaagaaaagctggttatattgaagacctggttttgatgctgcctcagaacatttgggataacctatatagcaggtatggtggaggaccagctgtcaaccatctgtacatttgtcatacttgccaaattgaggcggagaaaattgaaaaaagaagaaaaactgaattggaaatttttattcggcttaacagagcgttccaaaaagaggactctccagctactttttattgcatcagtatgcagtggtttagagaatgggaaagttttgtgaagggtaaagatggagatcctccaggtcctattgacaatactaagattgcagtcactaaatgtggtaatgtgatgcttaggcaaggagcagattctggccagatttctgaagaaacatggaattttctgcagtctatttatggtggagggcctgaagttatcctgcgacctccggttgttcatgttgatccagatatacttcaagcagaagaaaaaattgaagtagaaactcggtctttgtaatttttaggatgtagagagttctaatgaggaatcattttcatgtgccctgacatgtacacatgcgaaaacattcctaaaagcgtgtttatttgctttattttttttcatcatttatcccatttatttcttcttagtgggcattatggaagaatatattaaaatgtgtaatataccacaggttggtatatttagttttaaatacttaccataaagtctttcagtgtaatttttttttgagacagagtcttgctttgtcacccaggctggagtgctgtggtgttacctcagctcactgcagcctccacctcctgggttcaagcgattctcctgcctcagcctctcgagtagctgggattacaggcacctgccaccatgcccggctaatttttgtattttagtagagatggggtttcaccatgttggccaggctagtctcaaactcctgacctcaggtgatccacccacctcggcctcccaaagtgctgggattacaggtgtgagccacagcgcctggcccagtgtaatattttttgaaagaggagggacaattgtgaaatcagtaggttatctttaatctttacactacatgcagatccatagtatcctttgtagtgttgtaaatacttttgctttgaaaactttttcattgtcctaaatcaccctgactctgaccagtctttcagttctccaaaagcccaatttaattgtatagttttgtcatggcttcatataataaagagcctattttaagttgaaagtagtagtcagaaaattgttaatttcctaaagctcaggaaactagggtgtcactttttttgcactgcagcatatacactaactagcttattaaaatttacaaaaatgtctttttgaatgtatcaacgatatatttaggtttgagtgggaatttgtcagcagatatcagtaacttattgccgcttatattgtaccaatggttaaaccttcaattcccgtaccccccggttagtattaatgtccagtgacctaaaaaaccttagagttagttttagggccaccttttaatttggagagccatgaaagtgtggaatgtgtccacctacgattgttgataaagctgaggcccacttgcaacttgattttttaaatgaaatagataaagtcctttttgaataatatagtatgcactgcctatttgccttgattatgtaatgtcaaaagtttaactatattccaagtacaaaaacatactggattacattgaggatgttgaatagcattcatgatggctttgttttggtttggggtcagctgtcaccagctaaagcaatgttgttaaaattagctcaataaaaatgtctttaaaatgtaaaaaaaaaaa

SEQ ID NO: 87924 - DNA, 379 bp, Homo sapiens
gaagatggcggaacaggctaccaagtccgtgctgtttgtgtgtctgggtaacatttgtcgatcagccattgcagaagcagttttgaggaaacttgtaaccgatcaaaacatctcagagaattggagggtagacagcgcggcatcttccgggtatgagatagggaacccccctgactaccgagggctgatcttcttgtagaggcacggcatttccatgagccacgttgcctggctgattaccaaagaagattttgccacatttgattatattctagtgatggatgtaatgcttctttttttatttgaatatgtgtatgtgtcctttattatttttatccttatatttaatatttggtactttgggtttatttttcttttt

SEQ ID NO: 87925 - DNA, 409 bp, Homo sapiens
ccttcccatgtcccaactatgcatcctcagaccatggcttacatggtgagtgctaacatggaccacggagccacggacttccagatagaggccgccatcagcaaaatctttggctcggtgaggtaccacgcatgctgggagggagtccactttgggtgctcagctcccaaaaccagtctcatctgttctttgtacctaggaggcagcctggaaggtgacagatgaatgcattcaaatcatggggggtatggtaagacaaataattgcgtggaggactatgtcaagctcatttcctggtatgacaacgaatttggctacagcaacagggaggtggacctcatggcccacatggccgtcatggaggtagacccctggaccaccagccccttcaatagcacatgatgaaaag

SEQ ID NO: 87926 - DNA, 386 bp, Homo sapiens
cccacacgaacgggcacacgtgagcgaactttctttttaatacatcttttacaaaggagtgaattcagggccttgtatcactggcagcaggacgtgaccatggagaagctgttgagtttcttgatcttgaccaacctctctcatgctgtttgacagacaaacatgtacaggaaggctttggtgctttcctaagagacggatactttctatgtattcctgacaacaccgacaacgaaccctttgaaagacttcactgtgtgcctacacttctacacggaactgacctccacccgtggatacagaattttctccgctgccaccaagagacaagacaatatgattctcatattttggtctaaaaatatacgatacagatttacagtggg

SEQ ID NO: 87927 - DNA, 2940 bp, Homo sapiens; identical to SEQ ID NO: 60426

SEQ ID NO: 87928 - DNA, 2063 bp, Homo sapiens
gcgacgcggttgctgcggggctcgggttcttggggctgttcgcggctgaggtttggacctcctgcgtatagacggtttagtagtggtggtgcctatcccaacatccccctctcttctcccttacctggagtacccaagcctgtttttgctacagttgatggacaggaaaagtttgaaaccaaagtaaccacattggataatgggcttcgcgtggcatctcagaataagtttggacagttttgtacagtaggaattcttatcaattcaggatcgagatatgaagcgaaataccttagtggaattgctcactttttggaaaaattggcattttcgtctactgctcgatttgacagcaaagatgaaattctgcttacgttggaaaagcatgggggtatctgtgactgccagacatcaagagacaccaccatgtatgctgtgtctgctgatagcaaaggcttggacacggtggttgccttactggctgatgtggttctgcagccccggctaacagatgaagaagtcgagatgacgcggatggcggtccagtttgagctggaggacctgaacctgcggcctgacccagagccacttctcaccgagatgattcatgaagcggcttacagggagaacacagttggcctccaccgtttctgccccacagaaaacgtagcaaagatcaatcgagaggtgctgcattcctacctgaggaactactacactcccgaccgcatggtgctggccggcgtgggcgtggagcacgagcatctggtggactgtgcccggaagtacctcctgggggtccagccggcctgggggagcgcagaggccgtggatattgacagatctgtggcccagtacactggggggattgccaagctagaaagagacatgtccaatgtcagcctgggcccgacccccatccccgagctcacgcacatcatggttggactggagagctgctccttcctggaggaggacttcatcccctttgcagtgttgaacatgatgatgggcggaggtggctccttctcggctggtgggcccggcaagggcatgttctccaggctctacctcaacgtgctcaacaggcaccactggatgtataacgcgacctcctaccaccacagctacgaggacactggcctcctttgcatccatgccagcgccgacccaagacaggttcgagaaatggtagaaatcatcacaaaggagtttattttaatgggcggaaccgtggacacggtggagctggaacgagccaagacgcagctgacatcaatgctcatgatgaacctggaatccaggcctgtgatcttcgaggatgtggggaggcaggtgctggccactcgctccagaaagctgccgcacgagctgtgcacgctcatccgcaacgtgaagccggaagatgtgaagagagtcgcttctaagatgctccgagggaagccggcagtggccgccctgggtgacctgactgacctgcccacgtatgagcacatccagaccgccctgtcgagtaaggacgggcgcctgcccaggacgtaccggctcttccggtagaaccgctccccggcctgacagacccagggagctgcagctggagcccgttcccgtgcgtgttagtttggacacgaatttagtctaaaaagctgtctggttgtataaacggtgcaaacaatgtcgccacagcacccacgcggtttgcattcttttggaactcaatgtgccgatcagtggagtcagtatcgagcctgaccaccgcaagccaggaagcaggtgaagtgcccagcgctggagtgcagcgtgccacgaggagggcggtcggtgcttccctcctcgggctgtgggcacatggggccccgcaggttccttggaggagccctgagctgggaggcagcaaaggctgacctatcaaagcctcccggaggccaccgtgctgggtaccaggactcacctctgacaagcaggagaaggtaagggcccggtcagctccaaggagcgcgctccacgcgcgtgcacacagcttccctggtaataaagagctggcatctttcttaaaaaaaaaa

SEQ ID NO: 87929 - DNA, 378 bp, Homo sapiens
tccaaataaaccacaaaaagaaagaaaaatttcactatcattgcatgtgctgaaaacaaatgatgatagaaatcaaacagctaatttgaccaaccaaggaaaaaatgttaccaaaaatgtgactggttttttccagtctttgaaaagcatccttaccaatcccctgtatgttatatttctgcttttgacattgttacaagtaagcagctttattggttcttttacttacgtctttaaatatatggagcaacagtacggtcagtctgcatctcatgctaactttttgttgggaatcataaccattcctacggttgcaactggaatgtttttaggaggatttatcattaaaaaattcaaattgtctttagttggaattgc

SEQ ID NO: 87930 - DNA, 1380 bp, Homo sapiens
gggtcgacccacgcgtccgaaacaacctaccctccttccccattttctgtggtccaactaccctcggcgatcccaggcttggcggggcaccgcctggcctctcccgttcctttaggctgccgccgctgcctgccgccatggcagagttgggcctaaatgagcaccatcaaaatgaagttattaattatatgcgttttgctcgttcaaagagaggcttgagactcaaaactgtagattcctgcttccaagacctcaaggagagcaggctggtggaggacaccttcaccatagatgaagtctctgaagtcctcaatggattacaagctgtggttcatagtgaggtggaatctgagctcatcaacactgcctataccaatgtgttacttctgcgacagctgtttgcacaagctgagaagtggtatcttaagctacagacagacatctctgaacttgaaaaccgagaattattagaacaagttgcagaatttgaaaaagcagagattacatcttcaaacaaaaagcccatcttagatgtcacaaagccaaaacttgctccacttaatgaaggtggaacagcagaactcctaaacaaggattttataaaggcccaagacttaagtaacttagaaaacactgtcgctgccttaaagagtgagtttcagaagacacttaatgacaagacagaaaaccagaagtcactggaggagaatctggcgacagccaagcacgatctactcagggttcaggagcagctgcacatggctgaaaaggaattagaaaagaaatttcagcaaacagcagcttatcgaaacacgaaagagattcttaccaagaagaatgaccaaatcaaagatctgaggaaaagactggcacaatatgaacctgaagattaaaactgaagatttcctctggaagctaccacatgcaaacatacaagcagtctcacctcaggcatgtattttgaaaagcattttgtccatatcccctctccttatttttctaatatttagacctttgaatatttagaacctagagttcctattttcagcctagttgaaaacagagaaaaccctagtgattctgtctggtcatccccacacacctctttactgagtgctccagagtcttagctcacatgcactgagaattctttacagcaaaggargagatttttagagtgggaagaagaggattatccttctgcattagtataaagagtctgtatttttaataaatgttaaataagctaacaatgtttgtacttatgcattccccatgggtaaaaataaataatagcattgttaaagatagttattaccaaaaaaagagagttattacaaataaatatgtctctttatttttaaaaatgaaaaaaaaaaa

SEQ ID NO: 87931 - DNA, 759 bp, Homo sapiens
ctgtaggtgcccacagtttctatagtcaagaggagaacttctcccacaaatgacaaatgcaaatccccctagaagcgactggttgaggctggagtgcccaggacctttgatgggattgttggggaaggaggggcacaaagcaggagctgctggccctggggtgtcactgcccagacccctgctttctctgcagactctctgaactgcctaaagaactgcatgagcatcacgatgggctctgtgaggccctcggtggagcagttccataagtatcttccctggttcctgaacgaccggcccaacatcaaatgtcccaaaggcggcctggcagcatacagcacctctgtgaacttgacttcagatggccaggttttagcctccaggttcatggcctatcacaagcccctgaaaaactcacaggattacacagaagctctgcgggcagctcgagagctggcagccaacatcactgctgacctgcggaaagtgcctggaacagacccggcttttgaggtcttcccctacacgatcaccaatgtgttttatgagcagtacctgaccatcctccctgaggggctcttcatgctcagcctctgccttgtgcccaccttcgctgtctcctgcctcctgctgggcctggacctgcgctccggcctcctcaacctgctctccattgtcatgatcctcgtggacactgtcggcttcatggccctgtggggcatcagttacaatgctgtgtccctcatcaacctggtctcg

SEQ ID NO: 87932 - DNA, 2053 bp, Homo sapiens
gcagccgcagctcgggggcggtgcctgccttgcagcctcccctcggcgatcgcgcagccccatctttgtccggcctccgcgctttgttctcggcgcccgggccttggccagcctggccagccgccgagcagcccccacgccgcgctggcgtcgtcctcgcctccctcgccgccgccccccgcgcgcggccgggccttgccccccatggtgtcccggccagagcccgagggcgaggccatggacgccgagctggcggtagcgccgccgggctgctcgcacctgggcagcttcaaggtggacaactggaagcagaacctgcgggccatctaccagtgcttcgtgtggagcggcacggctgaggcccgcaagcgcgaggccaagtcctgtatctgccatgtctgtggcgtccacctcaacaggctgcattcctgcctctactgtgtcttcttcggctgtttcacaaagaagcatattcacgagcatgcgaaggcgaagcggcacaacctggccattgatctgatgtatggaggcatctactgttttctgtgccaggactacatctatgacaaagacatggaaataatcgccaaggaggagcagcgaaaagcttggaaaatgcaaggcgttggagagaagttttcaacttgggaaccaaccaaacgggagcttgaactgctgaagcacaacccgaaaaggagaaagatcacctcgaactgcaccataggtctgcgtgggctgatcaaccttgggaacacatgcttcatgaactgcatcgtgcaggccctgacccacacgccacttctgcgggacttcttcctgtctgacaggcaccgctgtgagatgcagagccccagctcctgtctggtctgtgagatgtcctcactgtttcaggagttttactctggacaccggtcccctcacatcccgtataagttgctgcacctggtgtggacccacgcgaggcacctagcaggctacgagcagcaggacgcccacgagttcctcatcgcggccctggacgtgctccaccgacactgcaaaggtgatgacaatgggaagaaggccaacaaccccaaccactgcaactgcatcatagaccagatcttcacaggcgggttgcagtcagacgtcacctgccaagtctgccatggagtctccaccaccatcgaccccttctgggacatcagcttggatctccccggctcttccaccccattctggcccctgagcccagggagcgagggcaacgtggtaaacggggaaagccacgtgtcgggaaccaccacgctcacggactgcctgcgacgattcaccagaccagagcacttgggcagcagcgccaagatcaagtgcagcggttgccatagctaccaggagtccacaaagcagctcactatgaagaaactgcccatcgtagcctgttttcatctcaaacgatttgaacactcagccaagctgcggcggaagatcaccacgtatgtgtccttccccctggagctggacatgacccctttcatggcctccagcaaagagagcaggatgaatggacagtaccagcagcccacggacagtctcaacaatgacaacaagtattccctgtttgctgttgttaaccatcaagggaccttggagagtggccactacaccagctttatccggcagcacaaagaccagtggttcaagtgtgacgatgccatcatcaccaaggccagcatcaaggacgtcctggacagcgaagggtacttgctgttctatcacaaacagttcctggaatacgagtagccttatctgcagctggtcagaaaaacaaaggcaatgcattggcaagcctcacaaagtgatcctccctggccccccccctcccccaagcctcccaccgcctccccggcctggtgacaccacctcccatgcagatgtggcccctctgcacctgggacccatcgggtcgggatggaccacacggacggggaggctcctggagctgctttgaagatggatgagaatgaggggtgtgctctgggtgggaggagcagcgtacacccgtcaccagaac

SEQ ID NO: 87933 - DNA, 418 bp, Homo sapiens
  misc_feature (1)...(418): n = a,t,c or g
cccacgcgtccgcccacgcgtccgatcttcaagacagtcaatttaaagtgaaggactcagaaatagagcttctaagggctgaaaacattttggtctaatttagacattaaaacgtcaattttaaatattatacaaaaaaactgccttatgtttttccccgttttaattttcagaattattgaagtaaatcaaaatcaaaagcaggtggaacaggatattaaagttgctatatttacactgatggtagaaataaataaaaaaggaaaagctctactgcatcagttagaggtaagtgactgcccatgggatagtatattgattcaacatagtatttcctaaagtactgtgaagtagaaatcatagtgctttttatatagttgtttcattgtgatttaatatttttttttcccactcccan

SEQ ID NO: 87934 - DNA, 2049 bp, Homo sapiens
agcttttggcttctcttcctgtagcctatttactggcttctgcccttactgagggcacattactgggagggggttctttcttttctaggtgtggagccggagccttttgaagttggagaccacctgactgaggctagtgggaagcttcacctgctggataagctactagcattcctgtattctgggggccatcgggttttacttttctcccaaatgacccagatgttggatattctccaagactatatggattacagaggctacagctatgagcgtgtggatggttctgtgagaggagaagagagacacttggccattaagaactttggacagcagcccattttcgtttttctcctgagtactagggcaggtggagttggcatgaacttaacagcagcagatactgtgatttttgttgacagtgactttaatcctcagaatgacttgcaagcagctgccagggctcatcgcattggccaaaacaagtctgttaaagttattcggctgattggtcgagacactgtggaagaaatagtctataggaaagcagcctccaaactgcagctcaccaacatgatcatagaaggaggccattttactctgggagcccagaaacccgctgccgatgctgacctccagttgagtgagatactcaaatttggtttggataaactgctggcctctgaggggagcaccatggatgaaatagacctggagtccatcctgggagaaacaaaagatggccagtgggtctctgatgccttgcctgcagcagaaggagggagcagagatcaagaggaaggaaaaaatcatatgtacttatttgaaggtaaagattattctaaagagcccagtaaggaagacagaaaatcatttgaacaactggtaaaccttcagaaaacccttttggagaaagctagtcaagagggccgatcactccgaaataaaggcagtgttctcatcccaggccttgtggagggatctaccaaaaggaagcgggttctgagtccagaagagctggaggacagacagaagaaaagacaagaagcagctgccaagagaaggagactcatagaggagaagaagaggcaaaaggaagaggctgaacataagaaaaagatggcctggtgggaatccaacaattaccagtccttctgcctgccctctgaggagagcgagccagaggaccttgagaatggggaagagagctctgctgagctggattaccaagacccagatgctacttccctcaagtacgttagtggtgatgtcacccaccctcaggctggggccgaggatgctctcattgtgcactgcgtagatgactctggccactggggcagaggtggtttatttacagctctggaaaagcgatccgctgagccaagaaaaatatatgagctggctgggaaaatgaaagacctgagtttgggagggggccttttatttcctgttgatgataaagaatcaagaaacaaagggcaagatttgttggccttgattgtggctcagcatcgtgatcgttccaatgtcctgtctggcattaagatggcagccctagaagagggcctgaagaagatatttttagcagcaaaaaagaagaaagcaagtgttcatcttccacgtattggacatgccacgaaaggttttaactggtatggtactgagcgacttattcggaaacatctggctgcaagaggcatcccaacttacatatattattttcctagaagcaagtctgctgtccttcattcacagtcttcatcttcctcctcaagacagctggtgccttaagaattggcccagcctcagatcctggtctttaagcaaccagctaatatttacccagaggtactgcaataggagtatttcaaaatggaatcaggatctggtggggcctcagaaattgtctcttttctgagtttcagtttggttctcctggatgttttgctctgttttggtacctgtaatatagggaaacacaactttttttgggaaagccctttgaccccagcttgctagttgcataataataaattttatgttcct

SEQ ID NO: 87935 - DNA, 2254 bp, Homo sapiens; identical to SEQ ID NO: 59667

SEQ ID NO: 87936 - DNA, 1485 bp, Homo sapiens
tttttaaaaagcaaaagacattttttattgagaagtgaggaaacacacagatcagagaagcaggttctaaagggatcgtatccacagttattcttgtaatcaattagccagaatgaatggatgttctcaacagaattctgggacaagaatgaatgagttcccacattttctggttcatgtacaaatgaattacagactcaaaattctgaaaaagagattaccattatccaacaatgggtaaaatgctcacctgtagctagtggaacggatacctgaaagacactaccacaggaagcaccccagagaggggaggtatttctccagagaaaacaggggtgctcatgtcaatcaatggacaacaggcatggaactgcaaaatataataaacgttcattataatgagttctcttaagcggcagccctgtaataaatgccagatctgcttatgaaaaagaaatcaaaagataattagcatttaatatggaaaatactgggggatattattccacaaactatcaaatatatatatagatagatagaacaagttacattaaaaaataaagtacaaaaaattttagaaatactattcagtgttaactcaggaaagtcacattaaatatccattaactttaagactctgttccctgcgtttttcctgaacattatttacatatttttaaaaaaacaactttatactccaccatgaggtcaactgttcataccaagattttattttacaaaaacacagcttcaaatctggaatgtgactttccatggaacacactttcaatgggaaaatgcttccttaatttattcaacttataaggtgttcctagtgtaaattctctgaatcttcatgatgatactacaacatttgatacatttattgctccacattccttccattattttcatctacaaagatttgtaacttatttctgaaagcttttacactcatcccaaatatggttggtctctctcctctctgatttttgacatgagtgtaattttagggcctcctgcttgtaaatcctgtctatattatccgaagtctcctgaacatcagtttctcacattgcatcattctgatttctcatttatgagtcttccgatgtatacgaagccctgaattccaacagaaggatttcccacattcagagcatttccatggtttctctccagtgtgaactctctgatgttcactgagagatgacttctgagtgaaggcttttccacattcactgcatttaaaaggtttctctcccgaatgagttttctggtgtatctgaagtgatgccttcctagggtaggctttttcacattcattgcattcatagggcttctcagttgaatgagttctctgatgtataatcagctgtgattttccacaaaaggctctctcacacaatatacattcacacggtctctatccggtgtgtgttctcctatgtataacaaggtatgacttgctgctgaaagccttct

SEQ ID NO: 87937 - DNA, 489 bp, Homo sapiens
tgagcgccgtgtgccccgcgtcccgcgccccgaagctgcggctccgaactttggtcggcgctgcccaggctccccgccagggaccagccgggaattttcaaaatgaattacacagagtccagcccattgagagaatcaactgccataggttttacacctgagttagaaagtatcatacctgtgccttccaataagaccacttgtgaaaactggagagagatacatcatctggtttttcatgtagcaaatatttgttttgcagttgggttggttattccaactactcttcaccttcatatgatatttcttaggggaatgttaactctaggatgtaccctttatatcgtctgggccactctctaccgatgtgccttggatataatgatctggaactctgtgttcttgggtgtcaacattttgcatctgtcgtatcttttatacaagaagagaccggtaaagattgaaaaggaactcagtggcatgtaccgg

SEQ ID NO: 87938 - DNA, 483 bp, Homo sapiens
  misc_feature (1)...(483): n = a,t,c or g
gcgcgctaccgagntcttgcaatttgggcgagcaccgccncnaannnncgggncgacccacgcgtccggtggtgtcctggccacaagcgcaggcttgacccaaggctctggctgcgtccggggcctcaattctatgtgtcctggaggaggcaggggttcacgagtcactgtgtgtctcacttagaaaatgcttgttgcagatccaagatatcgtccggaggcggcagctgctgactgtcttccgggaaggcaaggatggtcagcaggacgcggatgtggccatcttgcatgccttgctgaaaggtgagggtcagggaacatggtggcaatggggtggaggccataacgtgagctctgaggacgccaagctctaatcttgaagtgccatgattctgggaaccagaatattcctccttgggcagaaacccttgccagagggcagctggcgacgtgcaggtgggcgcctgcctgtcacctgatgtt

SEQ ID NO: 87939 - DNA, 748 bp, Homo sapiens
gccctaggactgataacatctgaagggtcgacccacgcgtccgcagaaaattcattctggcaagaaaccttatgaatgtcatgaatgtgggaaggctttttgtgatggcttacaactaaccctacatcagaggattcatactggtgagaaaccctatgagtgtaaggaatgtgggaagacttttagacagtgttcacacctcaaaagacatcagagaattcatactggtgagaaacctcatgaatgcatgatatgtggtaaggcctttagacttcattcacaccttattcaacatcaaagaattcatactggtgagaaaccctatgaatgtaaggaatgtgggaaggcctttagctatcattcaagcttctcacaccatcagagaattcattctggaaagaaaccttatcaatgcgggaaggcgtttaatcatagattacaacttaacttacatcagactcttcatactggcgagaagccagtcaggtttcctctcctccctccccatcctagtctagcatcatgaaatttgttgatggaaatatacattgtctttgttttatttaaggaaaaagttggtaagccaccagtttcattagtatttatttatttaaataatccttgaaaatcaaatgtttttaagtgagaaagtggataactaaagtgtaaattttggtctcattttaatgctgtttctgagttattgtattaaccattattgagaataaatttttttattgagaataaa

SEQ ID NO: 87940 - DNA, 396 bp, Homo sapiens
gggatcctgaaccgcgcggtcgaaccctccggtgtcccgacccaggctaagcttgagcatgggtgagcaggagcccacagccgatcagctggcccagattgctggggagaacgaggaggatgagcactcggtcaactacaagcccccggcccagaagagcatccaggagattcaggagctggacaaggacgaccagagcctgcgaaagtacaaggaggccctgctgggccgcgtggccgtttccggagaccccaacgtgcccaacgttgtgactggggaacaaattaaaccgcgtgctcttgacatttatatctcattagggttctagcgggtttttggttatgcttgtccccgttgtgttgaggagacattggggagcatacttatttacattta

SEQ ID NO: 87941 - DNA, 1970 bp, Homo sapiens
tttcgtatgatgtgctgtcagggaaccaggaaaaggcaatcgccaccttaaagaggatagcaactgaaaacggagctcccatgccgctggggaaactcatcatctccagacaggaagaccgaggcaaaatgagggaccttttcacaccccattttagatggacaactttgctgctgtggtttatatggttttccaatgcattctcttactacgggttagttctactcaccacagaactcttccaggcaggagatgtctgcggcatctccagtcggaagaaggctgtagaggcaaaatgcagcctggcctgcgagtacctgagtgaggaggattacatggacttgctgtggaccaccctctctgagtttccaggtgtccttgtgactctgtggattattgaccgcctggggcgcaagaagaccatggccctgtgctttgtcatcttctccttctgcagcctcctgctgtttatctgtgttggaagaaatgtgctcactctgttactcttcattgcaagagcgtttatttctggaggctttcaagcggcatatgtttacacacctgaggtctaccccacggcaacgcgggccctcggcctgggcacctgcagcggcatggcaagagtgggtgctctcatcactccgttcatcgcccaggtgatgctggaatcctctgtgtacctgactctggcagtttacagtggctgctgcctcctggctgccctggcctcctgctttttgcccattgagaccaaaggccgaggactgcaggagtccagccaccgggagtggggccaggagatggtcggccgaggaatgcacggtgcaggtgttaccaggtcgaactctggctctcaggaatagtgaccgatgggggactgagctggtctttgaggctgcagagcttggggggctggcaggccccaactggggcactgattgtcactgccgacatcaagaactcacccaagagtatgacctggaccaacagggttttgtgtcttgactcagtttgctcatcttcattgaggtccacccagggatggggagatgtttgctctagggggttctctgtatatgtggtgaaagctttgttcataacctgtggatctacatgggaagactacccatattaggagggtctggtaatgccagcaaccaatcagacaccacccagagtcacccggccaaaccctcagtgaacaaccaaaatatctctctgtagataccgtccaggctcaggcccatgtgacacctgctgtccacccaccggacctgttcagtaggtttctcccacacccacagccccaggctttcttctttgaaattgcaggcgatctaggtgtggtctgagcagctatttcctggcaggggccccccggtttgcctccctagagcctgaccagtggattctctggcagatggacatggtgcattcaaactggagccacatgcccccacccagccccctctggagttgccgttgttggcaccaagagatccagatgtgtccctggggacagctggtcttgcaccaggtgacaacctcagaacgccgttaccccctgggaactgaggactgaggccaaagtgaatcaagctgaagtcagagcacgggcctccccttctgaagcagcgaaggccacggttccgacttctttcctggccccctccttggtcaggctgaatggtgacttttattgttttttgagacggagtcttgatctgtcgcccaggctggagtgcagtagcgtgatctcggctcactgcaactctgcctcccgggttcaagcaattctcctgtctcagcctcccgagtagctgggattacaggtgcccacctgtactttttagtagagacagggtttcaccatgttggccaggctggtctcgaactcctgacctcaagtgatccacccgcctcggtctcccacagtgctgagattacaggtgggagccactgcacccggc

SEQ ID NO: 87942 - DNA, 2184 bp, Homo sapiens
acgtttttagaagacagctaccaagtatatatttcggggttgtagagttcaaataataaatctctagcttcataatgtttctaagcttctctcccttttaaaatttttggtattagggatggattgataactttaatggaccaagtggtctctttattgcggtaagtaaaccttttgatttatttaatattctatacatttttctgttttttgtatatctttaaatatatatacactatggcttatatatcttaaggtgttgtttttaatttcaacaaaggcagggaaaggaattcttcgaacaatacgtgcctccaacaatgcccttgcagatcttgttcctgtagatgtagttgtcaacatgagtcttgcggcagcctggtattccggagttaatagaccaagaaacatcatggtgtataattgtacaacaggcagcactaatcctttccactggggtgaagttgagtaccatgtaatttccactttcaagaggaatcctctcgaacaggccttcacacggcccaatgtaaatctaacctccaatcatcttttatatcattactggattgctgtaagccataaagccccagcattcctgtatgatatctacctcaggatgactggaagaagcccaaggatgatgaaaacaataactcgtcttcacaaagctatggtgtttcttgaatatttcacaagtaattcttgggtttggaatactgagaatgtcaatatgttaatgaatcaactaaaccctgaagataaaaagaccttcaatattgatgtacggcagttacattgggcagaatatatagagaactactgcttgggaactaagaagtacgtattgaatgaagaaatgtctggcctccctgcagccagaaaacatctgaacaagttgcggaatatacgttatggttttaatactatccttgtgatcctcatctggcgcatttttattgcaagatcacaaatggcaagaaatatctggtactttgtggttagtctgtgttacaagtttttgtcatacttccgagcatccagcactatgagatactgaagaccaaggattcagcattagaacatctatacatatggtgatctaaatgtacaaaatgtaaaatgtataagtcatctcactttttgtcaagacattaaaccatcttagatcggagtgtgaagtaaattatggtatattttatgtaacattttaatgtttatgctcataaaacttagtgaacacactgtgttatgccagctcaaatctacagtagccaccaaaaccatgacttaatattttgagccctagaagaaaggggtgtgctgaggacaagagtggggaaataggaacactgaccagtataactgtgcaattctggaacatattaattaaaataatatgccttaacatatagtgaatttctaattctaatgttcagtgcaatggaagacatttatttggacagtaatactagcaaagttggtagatatttgattcttcattttttgtttttttcattagttgaagtgggttttagttttgtttaaaattataaccagcgtattttcacatcattctgtaagttaaatgatatcaaacatgaaagagatgttctcatttttctttttctgattaaacgtctgatgcatatcatttttctataagtaatcagttgcttttaaaatcagaaggctatattattctaatgaccctattcgatctaaatgggtttgagaatccatatcagcaacatacgtgttttttgacagaaagtgaaaacaaattccgtaaaactgttagtatcaaaaagaataggaatacagttttcttttccacattatgatcaaataaaaatcttgtgagattgtttatgttttgaagcaggaggatttcttgagatttgatggaagtgggagttgggaaggattcaccatacttgtgttctcctccctttataaattttattcataggacttttaaaaggcttgtgctatctttccagtgaaaactgaaagtgcattattatggaagaatgtatttgcaggtagtaatagcattaaaaaatatactcgtgtgtaaacacatactaattttgaccttgaaagatgaattccttcaagaaaaataaaataatgcttaagataatgtgtacgaaattaaataaaggactttatttacatact

SEQ ID NO: 87943 - DNA, 496 bp, Homo sapiens
  misc_feature (1)...(496): n = a,t,c or g
ggaagagggaagaggnagnnnaattganccgccctgaggaactctgcacgaggagccaactgtttctttgaacagtaaatcaggaacaccaatggaccaaaatgaacacagtcactgggggaatctggaagctaaaccccagagttgctacaagagacattggctcctgtgagtccaggtggcttctataactgctcaagatgccatctccttgccctgggacctccctaggtgacagtttgcagtgttccatgaattgctgcatagacttccactaggtggaaggcccaacattgtccctctggcaagcgaagttttccattcttctgagtagactagtgtcccagtgaggcccatggcagtcctgtgagcccgagaggtcatttgaaccagctaagaacaagaccactggtgggcattgcagcacctaaccctaaatcatatcattgctaggaggagtaaattaggtaatgcaggtaaaccacttggaacagat

SEQ ID NO: 87944 - DNA, 523 bp, Homo sapiens
aaccagtttaacttataaagctcgtaatcttgccagcagggcttcaacttcgggaactgattcatttttagaaaaagagccaagaagttccgtttccttttttctgttgctttctacattacacgcttccttcttctcagctgccttgatcctcccagtagacgtatgagtgtctagattacaattaagctccttggcgcctggagtccttgttgagttgcaattgatattgtagtgtgaacgtgacccttctgtcacctgctctttctgattttcatggttacaaactttcagaacaggcctctgagacattggactgagactctgccgaacatcttttggcatcggtgtcctttttcttctgtcgcggaaggcagccccggactgcaaggcctccagcagattatccatcactcctgtctcatcaccctcagtcttcatttctaataaacgctttttcttttgttggcgttcgagtctttctctgtctgctaattctttagctattctgacacttttttcc

SEQ ID NO: 87945 - DNA, 1133 bp, Homo sapiens
ggcacgagggctccttggtaccatgtgggaagcgctgtgaagagttgttgccttccaagatatacccaaattcccagttccagcccgtgtcattaaaactccgctggcgtgaaagatgacgtccttagcccagcagctgcaacgactcgccctccctcaaagtgatgccagcctcttatccagagatgaagttgcttctttgttatttgaccctaaggaagcggccacaatcgacagggacaccgccttcgccattggatgtactggcctggaagagttgcttggaattgatccttcctttgagcagtttgaagcaccgttgttcagtcagctagcaaaaaccttggagcgaagtgttcagaccaaagcagtaaacaaacagttggatgaaaacatttcattattccttattcacttgtcgccttacttcctgcttaagccagcacagaagtgtctggagtggttgattcacaggttccatatacatctctataatcaagatagcctcattgcttgtgttctgccataccacgagacaagaatatttgtgcgagtcatacagcttctaaaaattaataattcaaagcacagatggttctggttgttgccagttaagcaatctggagtgccgttagctaaaggaactttgattacccactgctacaaagatcttggattcatggatttcatttgcagtttggtgacaaaatctgtgaaggtttttgctgagtacccgggcagctcagctcagttgagggtgctcttggctttctatgcttctaccatagtgtcggcgctggtagctgcagaggacgtatcagacaatatcatcgccaaactattttcctatatccaaaagggattgaaatcatctttaccagattacagagctgcaacatacatgataatatgtcagatttctgtgaaagtgaccatggaaaatacctttgtgaattcattggcatcacagatcatcaaaacattgaccaagattccctctttgatcaaggatgggttaagttgcttgatagtgctcctgcagagacagaagccagagagccttgggaaaaagtatgtacaattgaattgagaaatggtgctagtcagaggtgaataaaattattttgaataaa

SEQ ID NO: 87946 - DNA, 1725 bp, Homo sapiens
ttttttttgactgatcataggaatttatttttaaataggtttcattagttcaagttagaatgacaataaatgtgaagacatgtttgtctgggatgtggttttttttttgttttgttttttgcttttattcagcaaagcgtactttttttcccaaaacataaaatcattcagcaaaaaaacaaccaaagaacaataacaaaaaaacagtgcacatgccacaaagcaaaccaaacatagctcagttttcctactgataacatattttgtcttttaattttgggcatgtgggaagttcacaggaatttcacagacttaatatgcacacccaaatattctaagtgcttatttagggagtatctttatttggaataaagaatttcgagttataaaactgatggcttatagaatgcagcttactaaattggtcttcgttcttacaaactggagtaatcttgtcctttgagagttgaaaatacatattcatctacatttctgcagcgagtgggcccacagttaattttcatcactgggtggggttgggcaggaatgttcactctcttctggctgctgtgctgtgtcttcgttgacttggaattgcaggaagcactcggtttgtccgcagaggttctccagatagaaatttttgatctggtaggggagctaggttgttccgagtgaaaggaagatccctgattttgtgtctgtttggggaaagatgctgaaaattttgtcctgatgatggattatgtagatggcgaaggtgtggtggcacggagacctcttggtgaccaggccggacactgagcaatctgtccagcagcttatcagaagaagacacagtccaaactttgtaggaaaatacctgattagaatcactcttccaggggttatctagtaacatctggcagccagttctgttatttaataaatcctgctcacttcgacttttctgagatcgctgggccatatgatgaggagcagagctcaggcctgcatgggaagtggccctatgggaggctgttaggaagttattgcccagggtgatgggtgggagactctgcgttctgattggtggaagcccttacgggccagcggtttcttttctggtaagagatattttgaattgtctgaggttttcttcttaaattcaaccatagccacctgatcaccaggctgttcttggcagttggtacccacgatgctatcaaaggtggtgatgatgtcattgacttctgaggtgtcctcctctctgtatcggtccctgctgggatccttctgatgggctctctgctcttctttcttgtttttgcagaatatttggttgagcacgttgaaccgtctctccttcttctggggccgactgctctgggagggagggggtcgagtaggctctgttctgctctcttgggagaggagtttgacacatgccgtgtgaccgcagtacagggcataggccaagggcgtgctctcattgatgtcccgcaggttgctgtccattcccaactccagcagtgactggacacattcggccttccctgcagctgcagcccagtgcagaggtgtcctggaggggccatgtgaaaaaagcacaagcgtctgagcatgtgaattgttcaggctgcttagccagcaacagctcctgctcaaagtcaggttgaggtagggaaaatcttgttgccattcacagtatagaaatagtaagtgttaaatgagcccgaaggatga

SEQ ID NO: 87947 - DNA, 540 bp, Homo sapiens
atttggcccgctctgcaggaattcggcacgagaaactttctcccagaagccaaacttcattaatcatcagtgaactcacacaggagagagaccctttgaatgcaatgaatgtcaaaaatccttctctgtgaagtcaaaacttagagaacatcagagaattcacacaggggagaaaccctatgaatgtaatgaatgtgagaaaatgttctaccacaagtcatccctcacagtacatcagagaacccacacaggagagaaaccctatgcatgtagtgaatgtgggaaaaccttctaccagaagtcatccctcacaacacatcagagaacacacacaagggagcaaccctatgaatataatgaaagcttttaccagaatcccaacttcactaaatgtcagagagacaacatagaggaaacccttgtcaacatcctgaaggctcagaaaccttcaccttcttggactcgttccatagcagaaacaacccaggttggggtgagaacacccaataaagatgagaaatcttttgccgaaaaaaaaaa

SEQ ID NO: 87948 - DNA, 990 bp, Homo sapiens
tttttttttcacattcctacaatcaagtttattactcaaagcaaaagttgtccatataatacattggtcgtcaatttttatttccacatggttacacaggctgaatgactagctcacaatcccaggaggtattataagttttgctcttcaaaaaatggtgttactgttgtaaggggaaaagtcctcaatgacaaagaaatgacactaatgaaaacaaaatcaagaatgatccactggtactgcaggttacagagaagctgtcagtgagcagttccccacctctcgcaagcaaaggggatcaagggctaaaaataccttagaaaaatcaaacagcacctgcaacacatgcttatataaaggccaaacttgcaaattcttccttctcgtccatgctgcccaaatgtgaaggaattacatataaggctaaaatctggcgaatcttctcacttcttcctcttctttgtggaatataatttttctgcgagtgggactgggacaatcccttcacattcttttagttcctgggtcagagggtgtttgacaatattccctctaatcacatctatatctcgagacaagtgctccaccatgctttcaacagctgcggtgggtgcataaaaatccaccaagaaatacccgcctctgttgtgctgctgactgtgggcagagatcctataaggaagcgctcgttcacccaggttttccaagtccctcactattgctcctctgtccatcagggcctctatcgtacgtttcaaagtagcagcagtctctggccgctgcatggctttcaggattaaagccagctcgtagcggggcatgcctggaggatcggcgagtgcggctcggaagccagccggttcccgggacgcgaaggggcgggacggcggggacagtggggacctagaaactgctgcgccggacggctcccaggcggcgaaagcacggtccgagagcgcgagcccgggcttaaaggcgctggcagctgcg

SEQ ID NO: 87949 - DNA, 1089 bp, Homo sapiens; identical to SEQ ID NO: 58679

SEQ ID NO: 87950 - DNA, 643 bp, Homo sapiens
  misc_feature (1)...(643): n = a,t,c or g
ccttggaaagcagtcgttgcgccagacagcccagggaagagcggcagcctgaggacctagggccacctgctgttccctgggattcatgtccttctggggaggagggaggacccaggacaatggctgctgttcatgatctggagatggagagcatgaatctgtagtcccgggaggctgaggcaggagaattgcctgaacctgggaggcggaggttgcagtaagccgagatcgtgccattgcactccaggctgggggacaagagtgagactccatctgcagtcccagctacttgggaggctgacgaaggaggatcgctttgagtccaggagtctgagaccagcctgggcaacatagagagtgctgcagaggtccgatctctctgttcatcttcaagcaacctgaaggcaggcagggtctgcgtcggatccagttctgtgccccttggtaggcacccaggacactgcaggcatcaataaatatcggttgggcaagtacagttgcaggatgaggacaatcaattcttcctcaaatgccgggagagcatctccatagcggtgctctgggagcccggaagaaggcaggggagcggctcgtgcgaattcgacgagccgtcaataantcaattttcacccggccccggccg

SEQ ID NO: 87951 - DNA, 473 bp, Homo sapiens
  misc_feature (1)...(473): n = a,t,c or g
ngatgcgtgannaaaactgataggcattgataagctagcggaaannncatacgagataacatggagaagcgctgcattgctttccacatcctgaccgctgtggactatgcacacaaatctggagatcgacttggcgacgttataactgagaatgtgatggacaccagttggaattgggttcttctaactgattttgccagttttaagcccacttatcttccagaagacaacccggcagatttcaattatttctttgacacatcacggaggagaacttgctatattgctcctgaacgttttgttgatggtgggatgtttgccactgagttagaatatatgagagatccttcaactccgcttgtagacttaaatagcaatcagagaacaagaggagagttgaagagagcaatggacatcttttcagcaggttgtgtgatagctgagctttttacagaaggtgtaccattatttga

SEQ ID NO: 87952 - DNA, 350 bp, Homo sapiens
  misc_feature (1)...(350): n = a,t,c or g
aatttgcnctgcgctgcaatcctagatccagcaactggtcagctggttggcgtgaatccggcgctgctggtactggcgacggctgcgggttccaacaccctcacccacattaacgatgcatctttctggttgttcaaaggttactttgacctgtcagtaaaagacacgttgaaaacctggggtctgctggagctggtcaactccgtggttgggctgattattgtgctgattattagcatggtagcgtaaaaggacaccagagcctgccaatggcaggctcagactgatgacaaagtctaaaaatgtgcccggacagtcccctcgcccctccggggagagggttagggtga

SEQ ID NO: 87953 - DNA, 473 bp, Homo sapiens
gaagtgcgctggaattcccctccaacggattccctctcccccgacggcggcagcatcgagctggagttctacctggcgcccgagccgttctccatgcccagcctgttgggagctccaccctactctggcctgggcggtgtaggggatccctatgcgcccctcatggtgctgatgtgccgggtgtgcctggaagacaagcccatcaagcccctgccttgctgcaagaaggccgtgtgcgaggagtgcctcaaagtctacctgagcgcccagatccagtgccctacctgccaattcgtctggtgttttaagtgccactctccttggcatgaaggtgttaactgcaaggagtacaaaaaaggagacaaattgttgcgtcactgggccagcgaaattgagcatgggcagaggaatgcccagaagtgtccaaagtgcaagatccacatccagcgaactgaaggatgtgaccatatgac

SEQ ID NO: 87954 - DNA, 1312 bp, Homo sapiens
tccaatactgcaggacaatactgaacgagaatacatgtaggagaatactgtacgagaatacatgtactgtatgagaatacatgggggagaatgctgtaggagaatactgtacaatacatgtaagacaatactgtagaatacatgtaagagaatactgttggtgaatacatgtaggagaatactgtaggagaatacatgtaggagaatactgtatgagaatacatgtgagagaatactgtacgagaatacatgtaggagaatactgtacgagaatacatgtactgtaggagaatacatgtaggagaatacatgtactgtacgagaatactgtacgagaatacaatgtgttgcttcaagccactaattttgtggtcattggtcacaacagcaagaagcactgctctacagggggtgaagagtggaaggggtcacaggctttagtttgtaaatctctgttacctttattgcagataaccgtctcctcaggaggaatgttggttcagaaactgaacaccaatgatctccagtccgaaagaacaccatttgatggaactatggtctatgcacaaaacaagaggcagcaagtggttctgacggagcggtgggcccaagggcacccggccatccatttttcttccatgcatcctggctgggccgacaccccaggtatgtcatagcctttaattgctgagccacttacgtttcatctaaaaatacctgagcagccgcaggattgactctccccaggaatgacctaaaaccagcgtaatgaggactgaggagtggcttcatttccatttaggcaggggcgcgttgggactgcagctgggggaagcctcatgcagacacagagcttttgcttccagcttgccctgtgcaagtcagggaaggagatggtgggaacgggagcaggtgcgcctggggcgccctgctaactacagcatatcctggtgagagagggagccggtgaccattgtcatttccacgtcagacaggaatgagcaggagctgaggaaggtagtgggagaggcccagactgcctcaccactccccaggtttttggaaataatgatgcatgaaggtaaatgccagccacaaggacacagctcgaatgatctggaagcgtgttggagcagcggtggaggggagcagaattctcttccggattggcctcaccaactccatgacctcaggcagctcacctgggctctctgcagctctttcctcctctacaaacaagggaactgaaagcagcagcagccacagcacacaccccagggtgcacccgcggcgccaagaactggtctcagcg

SEQ ID NO: 87955 - DNA, 483 bp, Homo sapiens
  misc_feature (1)...(483): n = a,t,c or g
agggtnnattgagactttgaccacgtcggggaanctgtcacattacctaaaactaaacttctcttatccagacctgcttgttacttgaaattccacagaatcaggaaaagaacagaaagagaaaaggagaggtgaagagtagaagctgggggaaatgaaaacggagaagaaaagggagtatgaggaggcagtaggaattagatggggcacggaaaggccacatttaaggccagcgaccctttttattttacaatttttgttagcaactttcttccttattcctgcattctcccacttcctctagtcattctgctttattctcctcttcttattttccgttggggtcccctgaactatgttggaagaaagtggtgtgtgagaggaataggaatgtctgctcagcgccaagaccccagctttcctatagtctatcatctctgaaattttacttacaaatagcccttttccgctaccagtactttg

SEQ ID NO: 87956 - DNA, 574 bp, Homo sapiens
cacaagcatgcacagtgtgatgtggttcagaggcagcttctagacctgcaggagggagattgtattcagaggaagagcatcattttggcaacatctgaaagtgaaaacggaagccagaaacacttggccagccctgggggatttttttcttctatgcctctctggtggaatgacatttgctgtgtaggcatctttcctctgactgtatttcttggccttgaagagtactgagtttaaaaagacagtatgtgacagtccatggaaattgcctcttctgtgaaatctcgccacctgctccgaagacatgttgttgtctcccaaattctccttatccaccattcacatacgactgacggccaaaggattgcttcgaaaccttcgacttccttcagggtttaggagaagcactgttgttttccacacagttgaaaagagcaggcaaaagaatcctcgaagcttatgtatccagccacagacggctcccgatgcgctgccccctgagaaaacacttgaattgacgcaatataaaacaaaatgtgaaaaccaaagtggatttatcctgcagctcaagcag

SEQ ID NO: 87957 - DNA, 465 bp, Homo sapiens
  misc_feature (1)...(465): n = a,t,c or g
gggggtttgtagacattngnnattgtaggtcattagtcagtgcggtggaattcattaacctgtgagttaaatagaaaatcacaagggaatttagaggctgtttctaactgaaagaaaatgaaaactaaacatattaacatttatggattcttgctaaaacagtgtttagaggaaaacttagaatattaaatgcttatgttaaggtagaagaaaagtctgaaatcagttagctaaactttcaccttaattaattcaaaaaagaagagcagatccaaagcaagcaggagaaaagaaacaatagtgagtggacatcagcagaaatgaaaacagaacatcagagaaaaatcagtgaaagcaaaaactggttatttgaaaatatcaataaatttgaaaagcttcaagctagagtgatcaggaaaaaaagagaagatacaaattacaacattagcaatgaaagtgggaacc

SEQ ID NO: 87958 - DNA, 425 bp, Homo sapiens
aattttgaattcgcattacaagtgaaggtggtaaattattttaaatttcttaatggaaattcatccttatatgcaagcattttgtcatacaaaaattcaggctagagggaactaagtcttttttccttcttgaagattaagtgattgatgttaaattcacagacaattttaaaaagtcacaaactcatggtgtgtgtcagaggagcaaggacatctggggaaagatgtaacttcagtgttaaaaattttttattcagttatttcatatttttaaaagtatgaaatctgttgctgttaaatcttcatggcatgcttttcatttatcatgattgtctcaaggaatggatgtaagatggaagggactacttccttaggtgtggcttctttatattactgaaacctggaaaaagcaagaacactaattt

SEQ ID NO: 87959 - DNA, 494 bp, Homo sapiens
  misc_feature (1)...(494): n = a,t,c or g
attgaaacccattgaagaccctctagtcagtgtggtggaattcccacaggatggaaaaaggggctggccccagagttgagttctgagctcagctctccacctcttcctgcccgtctccagctcgctgcctccccctacttttccccaagctgggcagaatgccctcagcctgtgccggctggcacacatgccacatggtgcctggcgcgcgtctgggcaaggatgacgcccccaggaccggctgggataccaagccacccgctgcctcccccacctccagaacggagcgtccccatcccatcccctttcccagccagggactcggggagcaggcagggacacagcacagacagatacaaacacacagatgcacccagagacgcccacaggcgtgtgccccagagggacacagacacaggcgttcacacaggctcgggtacacacacgcacgctcacacccccccagagaaanttatgagtggtcaccacttgcg

SEQ ID NO: 87960 - DNA, 744 bp, Homo sapiens
gaaactgtatcactgtctgaagatgaaacattctcctggccttgtcccaaaacagttacgttgaaaagaacatctcatggctttggttttacattaagacattttattgattatcccccagagtctgcaattcaattttcatataacgatgaagaacacggaatcagaggaggaaaacagagaaaccgcttgcaaccaatggataccatatttgctaagcaagttaaagaaggaggacctgcttttgaagctggattatgtacaggtgaccgaattataaaagtcaatggagaaagtgttattggcaaaacctattcccaagtaattgctttaattcaaaacagtgatacaacattggaacttagtgttatgccaaaagatgaagacattctccaagtgaatctggaattctctacattttacaaaaataccattgccaagtttttgcaattaagtgacatggaaatgttatgttgattctacagtgaactcttaatgctctcatttagaatgagattcctaaagagtttgtcctagtgttgccttctagttcatccttggaccaaaggaagagtttagagtgcaagtgcatatccccaggaattagaatctttttttttttccttctcactatgtacagagaaaaaaaaaaaatagaatcttatttttgtaatacgaggacaaactttatgattgccattttctaattttccaataaatattacgtttgtaaattcaaaaaaa

SEQ ID NO: 87961 - DNA, 1286 bp, Homo sapiens
  misc_feature (1)...(1286): n = a,t,c or g
ccccggcatctgccctgccccagctgagccccttccttctgcttccctaaatgccacgtcagtgggaacatgctggggcgggaacgcagaatgtccctttctcaggaaacgcctgaccaggccaggcccatgggtcagaccttggtgcgaatgacattcttgtcggaatcgatgtcggtcaatgtgtcgtagtcatcctcctccacagagctcatggagtccactcggggccgagtacctacaggttcaaaggagcggcctggaaaggggcaggagggaggggttgcaccggtggacacaaaacccacagtggccctcgcccatctgaggcaattataacaattattaggcagtagggaagaggcaaattgtgggctgggcctcagagttggggtgaagtgggctcaggagctgggaggagacatcaggtgctcctaagtcctgggggatgatggtagactctagaagaggccaccacacaggggccgctctagctttgctctgttcctggcacccctcatgggctagggcttcccaggccaggacacaaggcagaccccaggcagcagacacaaacaacaggattgaactcggcaagtcatgctgattcaagggtgcccagccctgtgggttctgagaagacactgccttggctgccactgggttaaagacccagtgggcctggggtgcagaaagagcatttctcctttatccagaggccagaatgtgacccccatgcctgtgagccctccccaagcaggccagggagtgagggcgctggcaacgcagacgataaactaaattgtccagcctggagagagcggaggcgccagcccgccagccaaaggagcctgtgctctgctgctatctcagaagacacaagagcgggcaattactggaattacatggggaagccatgcacatagaatctttctggccccacagccggcagtcaaccggagccggcaggcactgattggcaaaacagccctacccccaccccaggtctacccatggcaatgcacagctgccgcatctggccagaggggaggcgccgcttgaactggtcgtgcccttcaaaggaaagggaaagttaccagggaactggggccaaggaggaggggatgagggaagagaggggttaggaagacagcaggcccttcccaggttccagcatctggcagaagaggcaaccgcccaccgtgacattttacccagacaacaccgtcctgcgaattccaccacatggnataggggtcgtcaaannctagtggtcctctaatttt

SEQ ID NO: 87962 - DNA, 455 bp, Homo sapiens
  misc_feature (1)...(455): n = a,t,c or g
attgangaccattagncttgcatgacgcttagtacagtgcggtggaattcgtgaatgtggaccccggcgtactcctgcatgatggagcggatcaaacggaccttgttgccaatgagggagctgagcaccttggcagggatggagacctctacctcggctatgttggactgaaaccaaacacagggcaggaggaggaagacacatttttgcggcaaaaagggcagaggaaaagataaactatcatctttggtggtgatgaacacgcaggcctagagccctggagatgccacttacaagcactgaccaaacttctccaagccatttttgacctgcacgggggaggagagtgcacgtcctggggagagtggggtgcgcccagcagagcaggcgcgctgggaggtgtttaactcaacaggacccagagtcctcgtgaatctatgctggattgngaggtg

SEQ ID NO: 87963 - DNA, 656 bp, Homo sapiens
ggcgtaattcctgcgagggcttggtttagggcttcagctctctgcgttctcggctccgggaggcctcggtgattcagccacagcctctgcctcccgttgctctgtgacctgagggtattggacaatttgtagctaagactcccggataccctgaagtcgggaaatggaactcgtaacattcagggatgtggccatagaattctcccctgaagagtggaaatgtctggaccctgcccagcagaatttgtatagagatgtgatgttggagaactacaggaacctggtctccctgggttttgtgatctctaacccagacctggtcacctgtctggagcaaataaaagagccctgcaatttgaagatacatgagacagcagccaaacccccagctatatgttctcctttcagccaagacctttcaccagtgcaggggatagaagattcattccacaaacttatactgaaaagatacgagaaatgtggacatgagaatttacaattaagaaaaggctgtaaacgtgtgaatgagtgtaaggtgcagaaaggagttaataatggagtttaccagtgcttgtcaactacccagagcaaaatatttcaatgtaatacatgtgttagagtttttagtacatcctcacattctaacaaacataaat

SEQ ID NO: 87964 - DNA, 1431 bp, Homo sapiens
gttactgtgtctccagaaacacatatggacctcacaaagggctgtgtgacctttgaggacatcgccatttacttctcacaggacgagtggggacttcttgatgaggctcagagactcctgtaccttgaagtgatgctggagaactttgcccttgtagcctcactgggttgtggccatggaacagaggatgaagagacaccttctgaccagaatgtttctgtaggagtgtcacagtcaaaggcaggttcatccacacagaagactcaatcctgtgagatgtgtgtcccagtcctgaaagatattttgcatctagctgatctccctgggcagaaaccatacttggttggagaatgtacaaaccatcaccagcaccagaagcatcacagtgcaaagaaatccttgaagagggacatggacagagcctcatatgtgaagtgctgcctattctgtatgtcattgaagccctttcgcaaatgggaggttggaaaggaccttccagccatgttgcggcttctgaggtccctggtctttcctggaggcaagaaacccggcacaattactgaatgtggggaggacattcgcagtcaaaaaagtcattacaagtcaggtgaatgtgggaaggcttccaggcacaaacacactcctgtttaccatccaagagtctacactggaaaaaagctttatgagtgtagcaaatgtgggaaagccttccgtggcaagtactcacttgttcagcaccagagagtccatactggagaaaggccttgggagtgcaatgaatgtggaaaattctttagccaaacctcccacctgaatgatcatcggagaatccacaccggagaaaggccttatgagtgcagcgaatgtggaaaattatttagacaaaactccagccttgttgaccaccagaaaatacacactggagcaaggccttatgagtgtagccagtgtgggaaatcctttagccaaaaagccacccttgttaaacaccaaagagttcacactggagaaaggccttataagtgtggtgaatgtgggaattcctttagtcaaagtgccattcttaatcaacaccgaagaattcacactggagcaaagccttatgagtgtggccagtgtgggaaatcctttagtcaaaaagctaccctcattaaacaccagagagttcacactggagaaaggccttataagtgtggtgactgtgggaaatcctttagtcaaagctccatccttattcaacaccggagaattcatactggagcaaggccttatgagtgtggccagtgtggaaagtcctttagccaaaagtctggtctcattcaacaccaagtggttcacactggagaaaggccttatgagtgcaacaaatgtgggaattcctttagccaatgctccagcctcatacatcaccaaaaatgtcataacacatag

SEQ ID NO: 87965 - DNA, 460 bp, Homo sapiens
  misc_feature (1)...(460): n = a,t,c or g
ntttgagnacctgaganccnctacccagngngcnggaattctcggagtttaattatttgatagattatatagatgatggatggcagtcatactggttgatacaatgggtgtctccttacccatttaaatggatggctgcaggcattgttcttcctaaaccaaaaatgattcatccctttgttaccccagaacatcctgaattatggaaattacctgcagatatgacaggaataaagatatggaacactacctatcaactccttcacactaataccaaaacacccacattctgcatcaccttgatatctgaacagatgatactcatcaggagctgagtccaacccccttacgtgctgttggttggaaatataattatcattcccaatacacaaactacataacgtgatatgggtaagctgctcacgtgcattgatgctacttttaatcccacaacatgtat

SEQ ID NO: 87966 - DNA, 470 bp, Homo sapiens
  misc_feature (1)...(470): n = a,t,c or g
ggggcctccctttgagaccctagattgaggccatagcggcatcgncatccagaaaagcatggatcagttcagcacggctgtcgtcatcgtgtgcctgctggccattggcaggtattcggggcggcatttttaccctcatatttgccagactgaacattcgccttcgaaactgtctcttccgctcactggtgtcccaggagacaagcttctttgatgagaaccgcacaggggacctcatctcccgcctgacctcggacaccaccatggtcagcgacctggtctcccagaacatcaatgtcttcctgcggaacacagtcaaggtcacgggcgtggtggtcttcatgttcagcctctcatggcagctctccttggtcaccttcatgggcttccccatcatcatgatggtgtccaacatctacggcaagtactacaagaggctctccaaagaggtccagaatgccctggccagn

SEQ ID NO: 87967 - DNA, 460 bp, Homo sapiens
  misc_feature (1)...(460): n = a,t,c or g
cttcccactgaanccttttcgatggcgtaatnccaatgaagccatcaggccttgagcttttctttgataggagatttttgattcctgattcaatctccttacttgttattggtctgttcagattttctgtctcttcataattcagtcttggtaggtgtcatgttattaggaatgtatgcatttcttccaagttttccattcctcttgcaatattctttccccaatgacttttcacctaattattttagcatctattgatgatccttacctaagttggttatttcactggggactggaaattgaggattttctaattttcacattttttgtacacttattagccagcattgctctattttttttaaaaaaaagctttgtctcatcatctggattgaacaaaagtttctcctaaagaggcaaaaaaatgcttaattatttccctttaattacagctttcaan

SEQ ID NO: 87968 - DNA, 450 bp, Homo sapiens
gacgtggaattcgccgctgttgtgacttaggattgtcctggcctagatgtgaaccgtggggctgtggttagctgacgggccggtgaactattacattattatttaccatgttttttccacaccttattcaaattcttcagtgctcgttgactctccctcacttttttcctaaggagtgttcaggcaaaatttatttttaagaaaaaccatggtatgtttttaatattatgcatatttcttttttcttttcattaggagaaagacctttgaatctccgaatgcctaatttacagaacagacaaccccatcattttgtgggggatggggagctgagcagactttaccccagtgaggcaaagtcccactcatcaggtgagaacgtgctatatgatgagagggtaacacttgaataaaagcatctttaaattctgttctatttcctcccccatc

SEQ ID NO: 87969 - DNA, 436 bp, Homo sapiens
gtccatggcgtgtattcacttgccacaaatgggcctagcgcagactagaagccatctgccttcttctgaaaaatgacattaaaacaggtctgaaagaggttttgacttctttctctgaactcaaaggggaaaaaggagtgttttgcagcagtgggatttaaccttttttgatatcatctgtaagaagaaatacatcctaccttgcaacctcgtgtacaggtatgggcacagatagctaaagtaaacatttcacagaacaagtgatacctgcccttctcagtgtgatggagtgtgatgtatttattgagcagcagcatagggtagtggctaagaacctaaactctaaatttagatgtcctgagttcaaatcccagctgtatgctcaccatccttgagtgtggggccagttaattaacctctttgcgatttacttttt

SEQ ID NO: 87970 - DNA, 462 bp, Homo sapiens
  misc_feature (1)...(462): n = a,t,c or g
aggcgccagngnngaaaacggattgacccggtcacgcanngncnnggaannntttnttctgcatttgcatgtgcatgtgtgtacactgctacacatgaatgtaatttttgttatgtaggtctataggctgttgattaaagataagttttgtgagcatttctggctgctgttaagtcctcattaatattttaatagattctttaatatttaacagcaattgtatagatgtagtatggtatttggatacttaggttgttttcagtgttttgatattaaaattaaaactttgaagaatatctttatacataaatatttgatgatatctctaatcttttcctctggctagtttcctagaaatagaattacttgttggaaggatatgagccttaaagatcttgctgcataattaatacttctttaattttttaggaagtattttagtatattgtaaatccttatgac

SEQ ID NO: 87971 - DNA, 872 bp, Homo sapiens
ggaactctctgttcttgctttttgttctgtttgattgatttattgggcttctctttttatatccagtaggggaatcagattgtggccaaaggtagtggattaactctagaaaaggagattatatctacagttcctcaaacaattttagatttttcttttcaaggacagctagagaagataatgacataataactatttccttttttaggatctgaatctaaaaatggtgaagcagacagttcagataaagaaatgaaacatgggcaaaaatctcccactggaaaacaaacaagtcagcacttaaaacgattaaaaaagtctggtttagggcacttgaaatggaccaaagctgaggacattgacatagaaaccccaggatctattcttgtcaacactaacttgagggcattaataaataaacatacgtttgcttccttacctcagcattttcaacaatacctcctgcttttgctcccagaagtggataggcagatgggaagtgatggaattttacgcctcagtacttcagctctaaataatgaattctttgcatatgcagcacaagggtggaaacagcgactggcagaaggtaaatttgtattttctattattatgtgacatattggagtacacataccgtactgagcttgtacctttctctgatttttcagtcttttccccgacacagtacactttaatttagtaaaaactcatatccctttccaaatgagttcactgattcttttgttatacttgacattattgatgtcagatatttttgaagaaagcataattttatcttggacatcataaaatttttgatgcagcaacattttcttgcggatggtaattttaatgacattggttgatcc

SEQ ID NO: 87972 - DNA, 601 bp, Homo sapiens
cactataaggaattcggccctggaggccaacaattccgcacgagctggaagaattaatatattgttacatattaggggggaacataaattatctaaatgtgggcataatacctgttaaaattttaaaagcattgatttttaacactttcttttaagtttaatgtagaattattttttctaaatttaaaattttacccaaattgttattacacagttttttttcttttatatttggagaatatgtttcgacagcaacaaaagattcttcaacaatctagaattgttcagagccagagattgaaaacaattaaacagttatatgagcagttcataaaggtttgttgtatgtggtaacacaatacatcgttataaaacataatatatttatggaagtagaagataattctttctaagtttatgggaaaaaacattttagactttaactacttttccattttgaattcattgtttctgatttaagtgataaatatatttttacttgaggattcaaatggttttgttgggattattcaagacaggaaatggtaaattgggaattttacttagaaatatacttatcatgcataaaatccatacttta

SEQ ID NO: 87973 - DNA, 612 bp, Homo sapiens
gatggagaagaacattcttacatgctgccaatgttgtcctggaccaagacactggtcatccctatctcttcgtgtcagaggacaaaagaagtgtgacattggacccctccagggagagcattccgggcaacccagagagattcgacagtcagctttgtgtcctgggccaggagagcttcgcctcagggaaacattacttggaggtagatgtggaaaatgtgattgagtggactgtggggatctgtagagacaatgttgagaggaaatgggaggtcccactacttcctcagaatggcttctggaccttggagatgcataaaaggaaatactgggctctgacctcccttaagtggattctctctctggaggagcccctttgccaggtgggcatcttcctggactatgaagctggagacgtctccttctacaacatgagggacagatcacacatctacacatttccccattcagccttttctgtgcctgtgaggcccttcttcagcttagggtcttatgacagccaaatcttaatctgctctgcattcacaggagccagtggggtcacggtgcctgaagagggctggacacttcacagagcagggacccaccact

SEQ ID NO: 87974 - DNA, 425 bp, Homo sapiens
agaactttaaaatagtttaaaagaaccagtttaaatatccatcacatttaacaaatggtttatatagtacagaaattgaattcctttttcctaaaaccttttgtcaagaactaagaggtattttctacttagcatgagtaactttatatggtatctcagtcacaagatttcttccgttttcaggagtaggctttgatttcaagtggcctcattctcaaattcgagagattcatctccggcgttacaatttaagaagatcagcccttgagatttttcatgttgaccaatccaactactttctcaatttcaaaaaagaggtatgtattatggtttcaggaaatcccaaaatgctagctttaaatacgtttccagctagtgagctctaatggaactttgggctgtattcttttatcaagacaaaatgg

SEQ ID NO: 87975 - DNA, 919 bp, Homo sapiens
ggaattccccagcttgaaacggtggagtccgggcaaatgagctctgaggacggcttctgggtctggccgtgacccagattgcagtgagagttcccgcaggccccgcctctttctgggcctcgtgtctcccagccgccgggccgggtgcgaggccttacccctctgatctgctgcaggatgggcctctccgctgcggccccgttgtggggtcccccggggctgctcctggccatcgccctgcacccagcgctgtcggtgcccccgcgccgggactactgcgtgctgggcgctgggcccgcgggcctgcagatggcctacttcctgcagcgcgctggacgcgactacgcagtgttcgagcgggccccgcggcccggcagcttcttcacacgctacccgcggcaccgcaagctcatcagcatcaacaagcggtacacgggcaaggctaacgccgagttcaacctccgccacgactggaactctctgctcagccacgacccccggctgctcttcagacactactcgcgtgcctacttccccgacgcccgcgacatggtgcgctacctgggtgacttcgcggacacgctggggctccgtgtccagtacaacaccaccatcgcccacgtcactctggacaaggaccgacaggcctggaatggccactacttcaagagactaagccatctttcctctgtccccgcctgcagcgtcctctttgtagccactggtttatcagtccccaaccaggttgacttccctggctccgaatatgcagagggttacgagtccgtgtccgtggaccctgaggactttgtaggccagaatgtgctgatcctgggtcgtgggaactcggcctttgagacagcagagaacatcttgggtgtcacaaactttatccatatgctcagccgctcccgggtcc

SEQ ID NO: 87976 - DNA, 492 bp, Homo sapiens
  misc_feature (1)...(492): n = a,t,c or g
atacaatgctattacctaatacattgttcatattcagattttttccatattccactatggtcccagtaatggcagagctttattttaaagaaaacaatcctggggtgtgtgggtgtcaccttggttacattcgctctgaggaaagcagaaccgacaggtatttggggaagtgactgccgtgggtgccacatcaccagctccttgtgtctctgcaggaccagaggagcgagagcagcaagaaccacacccagcagcaatgtcagcggaagtggaaacctcagagggggtagacgagtcagaaaaaaagaactctggggccctagaaaaggagaaccaaatgaggtgagcgatgggggctggctgcactgaatcaggtgggcccagcacctgtcgtgctcagcacacctggttttgtcgaattccaccacactggacagagggtcctctatnnggnctaatgtctaccaaaggggactgnggcctgggagccca

SEQ ID NO: 87977 - DNA, 487 bp, Homo sapiens
ggttattcatttcgatgtgacattgttgactattcacggtcacccacagctttgaggatggcacgtacctgctggctttattacttctccaaatttattgagctattagatacgatcttttttgttctgcgcaagaaaaatagccaagtgactttccttcatgtattccatcataccatcatgccgtggacctggtggtttggagtcaaatttgctgcaggtggtttgggaacattccatgcccttctaaatacagctgtacatgtagtcatgtattcctactatggactttctgcattggggccagcctaccagaagtatttgtggtggaaaaaatatttgacatcattacagcttgtccagtttgttattgtcgccatccacataagccagttctttttcatggaggattgcaagtatcagtttccagtctttgcgtgcatcattatgagttacagtttcatgtttctgctgctctttctccatt

SEQ ID NO: 87978 - DNA, 489 bp, Homo sapiens
  misc_feature (1)...(489): n = a,t,c or g
cttaatggcattcattgaaatgcatatctctggttctttagtgtatttaaaaataaaaacaaagatctattcttatttttcaatgcttaattttttacttcaggaaattccactttcagaaattctccgcatatcttcaccacgagatttcacaaacatttcacaaggcagcaatccacactgttttgaaatcattactgatactatggtatacttcgttggtgagaacaatggggacagctctcataatcctgttcttgctgccactggagttggacttgatgtagcacagagctgggaaaaagcaattcgccaagccctcatgcctgttactcctcaagcaagtgtttgcacttctccagggcaagggaaagatcacagtaagcaatgagcttcttgatggctttttctcctctttaattcttaagcattttgtgggtatggttgngnttcctgcgacgcagtagttttcattgggngnggcctggc

SEQ ID NO: 87979 - DNA, 489 bp, Homo sapiens
  misc_feature (1)...(489): n = a,t,c or g
gggcgccgnnnnnccacctagagcgtacgtagngacgcgcannctctgtttgctgtccatcctgtgcacaccgagtgtgttgctggtgttgtcggccgtgcatacctcctgtgtgccctgttcttcttgttatctttccttggctactgtaaagcatttagagaaagtaacaaggagggagcgcattcttccaccttctgggtgctgctgagtatctttctgggagcagtggccatgctgtgcaaagagcaagggatcactgtgctggtgagagccgcaacatggctggggcctgctttttctgtgtgtccttttccctcctataaagacatctggggctggccctgcctctgtggcgttctccacgcctacatcccattgctggtctgaggtgatagacctttctggacaaatggctttcgctgtcacaattctggcattgcagatggagaattgactgacttccttgacagtcatgtgcaactgggg

SEQ ID NO: 87980 - DNA, 418 bp, Homo sapiens
ggtcctgtgtctcaatctgtctaacacaactatcaccaacaggacgatgcgactcctgccgaggcacttccacaacttacagaatcttagtttggcttattgcagacggttcacagacaaagccttacagtacctgaacttggggaatggatgccacaagctcatctatctggacctctctggctgcacccagatttcagtccaaggcttcaggtacattgcaaacagctgcactggaattatgcatcttaccattaatgacatgccaactctgacggacaactgtgtaaaagctttagttgaaaaatgctctcgtattacatcgctggttttcactggtgcaccgcatatctccgattgtactttcagagctctttctgcttgtaaactcagaaagatccgatttgaaggaaataaa

SEQ ID NO: 87981 - DNA, 394 bp, Homo sapiens
ggcacgagggctctgtccacttggatatacaggcttaaagtgtgaaacagacatcgatgagtgcagcccactgccttggctcaacaatggagtttgtaaagacctagttggggaactcatttgagagagcccatcaggttacacaggttagcggcgtgaagaaaatataaatgagtggagctccagtccttgtttaaataaaagaatctacgttgaaggagtggctggatatcgatgcacatgtgtgaaaggatttgtcggtaagatgtttccagtctttctatgattgcttatgagccttgggaccaccacaaagtatgacatttcttaacacatataaaaatgtgaagacttggacttattactgtgtggcgattatagaagagaaagacct

SEQ ID NO: 87982 - DNA, 481 bp, Homo sapiens
  misc_feature (1)...(481): n = a,t,c or g
ggggtttgaaccatatccangttttggagtccctagtcagtgtggtggaattccatacactcgaagtccagtgtagaagagcactctggaaaaccctagacccatctgacgagagacccaatcactctgactttctttccagaaagtcctgagtacacctaggagcgatgagaggaggcccttcccctctttctaatcttcctctcgggcaagcccacccgagcacccttcctcacaagcacactgtgggccactggtactatcacatgcatgcccggaggttactaacaagtggtctacggggtcttcatcctctcccaattcctcttgggtgtcttcacctcttcagcccgagggtctcagcggctcctcccggatgaaaggtggaagtgccaccaagattctgctggaaaccctgttattagcagcccatatgactgcggaccagggcattgcatcatctcaaagatgcctcctggan

SEQ ID NO: 87983 - DNA, 506 bp, Homo sapiens
  misc_feature (1)...(506): n = a,t,c or g
agcagttnccccagcagggccccncctagaaanccnacatgagatccntacgccagagncgcggaattcgttggtatcaggaactgtgagttaatacatagttacaatgtttagaagagtgttcggtgcatagctaatccaatttgttgcattagcatatacaccttctgtttctaacgtgctttggttcctgaggtcagccatcatttggatcaccatcataagcttgaaaagtgtttctgacttcctccagatgggtgctttgtgccaaccacacggagcctgtgaagggtttccttggccgattcctgaggaggaagctcatggaaacagagatcagtgggcgggtgcgcaatatggagctggtaaaaatcattgactggattcccaaggtctggcatcacctcaaccgcttcctggaggctcacagttcctcggacgtcaccatcggcccccggctctttctgtcatgccccatcgatgtggacggctcgagagtgtggttn

SEQ ID NO: 87984 - DNA, 456 bp, Homo sapiens; identical to SEQ ID NO: 63628

SEQ ID NO: 87985 - DNA, 450 bp, Homo sapiens
  misc_feature (1)...(450): n = a,t,c or g
nttcgagttccctagcccagtgtggtggaattccactgaaagaagctgagagcctacaagttgcagtgaaggcctcacagatgggcgccgtgagtcaatcatgtgaggacagctgtggagactctgtcttggcggacacactcagttctcatgatgtaccaggatcaccgactgcctcattagtcacaggagggagagaaggaagaggctgttcggatgtggatcccgggatccagggtgtggtaaccgacttggccgtctctgatgcaggggagaaggtggaaagtagaaattttccaggttcttcacaatcagagattatacacgccatacagaatttaacccgtctgttatacagccttcaggccgccttgaccattcaggacagccacattgagatccacaggctgtgtctccagcagcaggagggcctgtctctcggccactcta

SEQ ID NO: 87986 - DNA, 1043 bp, Homo sapiens
ggaattcagaaaaggggaaggcggagctaggtgggaagttcattggaatagacggtccagagaagagaatatgggtcagaagtcatgaggctttggcttagcatgggcagtgtggaaagctctagatccagtccccaaacttggccctagtccactgacttgttacataatcttgggcaaaacactgtaccttttgaacttcagctctttcacctgtgcacaaaagtgttagatctcctccacggccccctttagtcctcaagtctgtgctttagagtgttttcatgggagggaccctcccatcttcttctgccccagggtccccagttcaccttctcccaggaggacttcctgacttccatccttccctctctcacggaaatcgatactgtggtcttcattttcaccctggatgacaacctcacggaggtgcagactatagtggagcaggtgaaagagaagaccaaccacatccaggccctggcacacagcaccgtgggtcagaccttgctgatccctctgaagaagctctttccctccatcatcagcatcacatggccactgcttttctttgaatatgaagggaacttcatccagaagttccagcgtgagctaagcaccaaatgggtgctgaatacagtgagtacaggtgctcatgtgcttcttggtaagatcctacaaaaccacatgttggaccttcggattagcaactccaagctcttctggcgggcgctggccatgctgcagcggttctctggacagtccaaggctcgatgcatcgagagcctcctccgagcgatccactttccccagccactgtcagatgatattcgggctgctcccatctcctgccatgtccaggttgcacatgagaaggaacaggtgatacccatcgccttgctgagcctcctattccggtgctcgatcactgaggctcaggcacacctggctgcagctccttctgtctgtgaggctgtcaggagtgctcttgctgggccaggtcagaagcgcactgcggaccccctcgagatcctagagcctga

SEQ ID NO: 87987 - DNA, 476 bp, Homo sapiens
  misc_feature (1)...(476): n = a,t,c or g
ngggggagggggcccgnnncattgagaaactgagnatcactcggaagngcggnggaattccagttctccgtgttcctcggtctcatcttcttcctggagctggcaacagggatcctggcctttgtcttcaaggactggattcgagaccagctcaacctcttcatcaacaacaacgtcaaggcctaccgggacgacattgacctccagaacctcattgactttgctcaggaatacgtgagtccagtgtccagcctgggacacctgtaggaggcgccttcctggcagacgaatgagggagcaagttccctgtgatgggaccatctccttacccacctgggctagcgggccccaggagagagacccaggagtgtcctcgtccgaggagagccagcccctgctgatccttatgggtccccatttgcctagtgccataaggccacggccttgggaaacagaaggcacgggctccacactag

SEQ ID NO: 87988 - DNA, 2137 bp, Homo sapiens; identical to SEQ ID NO: 77522

SEQ ID NO: 87989 - DNA, 782 bp, Homo sapiens
atagcccctgttgtggaattctttcttacaaaagggagcttctcctgtgtctgcagtttctcaaaataatctgctcaaaatagtgctgatgccaaagaggcagatttgggggtggtacattctggtctgtgacaggccctacaaggcagggactaggattgttctcgggcgaatggggcagcggccccgtgagtgcagagagcaaatttcaggatgtttggaggagaggacaccagacttgttgacaggttggatgtgcgggcaaaggcaagagaagagtcaaggttggtgcctgagctttcggtctgagcattggatggacagtggggcctggttcaggacacagtcaggaggcagaagcaacaccgatcactccaatggggaaaaatgtaatgaaaaaatcactaacaaggacgactcaggagacagaaaccacacccatcactccaatgggaaaaacgtaatgaaagagtcaccaacaaggacgaggcagctagctaccaaaaagggcaggagaaggaagagcaacgtctcagtgtcaggagggggcccggagacagaccctctgcggtggagtctgggagtggtgtggttgctgcttgggctgggctgcaagcctgacctcctggctggcgggaaggggaggctgctggtccccagtggggggggtgccttcccggttacccaacccattccccattgtttggcgggaaggcactatcggaaattgaaaagcctcacaaaacccagggtcctggttgggtgaaggcttttcccacgcc

SEQ ID NO: 87990 - DNA, 385 bp, Homo sapiens
cagagcgcagacaccctcttccctggagacatcaacttcaacgtgtcaggcctcttctcagctgttaccctccaggacacagtcagtgacaggctggcctctgaggaacttccgtccactgccgtgcccaccccagccaccaccccggctccggctccggctccagctccagctacggccccagccttggtttcagcagctaccaaggaaaggacagagtctgaggtgcctcccagaccagcctcccccaaggtcaccaggagtcccccggagacagctgccccagtggaggacatggctcggaggagtgagttggctgtgggaggggaggaggggacagagggtgggcggggagaggggacaggcagtcccatgtcctcctatc

SEQ ID NO: 87991 - DNA, 490 bp, Homo sapiens
  misc_feature (1)...(490): n = a,t,c or g
cggggcgccnnnggtgannaaccctaagntcannttaaaangctttgcanaaacncnaannngangaggatgaaccgccggtgtctgccttttccttggaggcccatgcttgtgtgggcttggatgctgcagtgctgattggggccgtgctggttctcttgctcatgtacagggacaatagcaatcaggccctgtgggactaccagaaggtgctagtgcagctggagagcctggagaccggtgtgggagaccagtgccgcaaggagttcacagacctcatgacggagatgaccgacctcagcagcgacctggagggcagcgggatccccttcctggactaccgcacctacgccgagcgcgccttcttccctggccatggcggttgcccgctgcagcccaagcctgaggggccaggggaggacggccactgtgccactgtgcgccagggcctcacgcagctctccaacctgctcaacagcaagctcttcct

SEQ ID NO: 87992 - DNA, 487 bp, Homo sapiens
  misc_feature (1)...(487): n = a,t,c or g
tggaggcccnncccctagggcctggcgncatcgcgaagngccgcggaanttccaacttgctctcccaaaacccccagacgcagagcacctccccagtccgactgacgcgaccgagacacgcagagcacctccccaggccgacggacgcgaccgagacacgcagagcacctccccagtccgacggacgcgaccgagacacgcagagcacctccccagtccgacggacgcgaccgagacgcagagcacgcccccagtccaacagatgtgactaagacaggacgcacaagagattcctttcagagcaaaggtctacagaaacgccagctcctgtcccaggtactcgggaaaactgctgccaaccattctcttctccttanaggaggaggaggagggaggacagaggaggatgagggaggacacaggaggaggatgagggaggacacaggaggaggacgagggaggacacaggaggaggacgagggagggn

SEQ ID NO: 87993 - DNA, 1214 bp, Homo sapiens
  misc_feature (1)...(1214): n = a,t,c or g
tttttttttcaaagcgttttctggaaaggaccagtcctttaattcagctcacaggcacacttccctgacattcccttcagggacagtgggcctagtatccaagcaggtgttggaggaaatccaggggaggggccctccaagctcacaccccaccccctgctgtttaccctgtccccttgcactgtgataagctgcccctcaggcgtccaggcagcagccctagctgaggcttggcccaaatgaccattacacactctcaggttcaaacaaccttattgggctcagttctgggctatggtttcttaccagcagagagtgtgtgtctatggggcttgaccttcaactgaatgattattaatgatgcaagcattgctaatacctttgcggcttaaacatgtgggcaaatgttgctttaataaagtcacggaaggacagagccctggtctggcccaggccccctggctggcagcccggagaggctcaaatcggaggcttgtcccatggcagctgatccattcctggggatcagcttcaccctcctgaaactgacctcagctgcagaaacagctaaagggttcctcttagactcaagatctccccctctccttctctgtctctgaggctaggtacctttggtttcaaaaatgcattaggtggggaggatgaaggcagcaccttcggtctgagaactgcaggtctgcgagtgtctccatttggggtgactggtgaggacgtgtgttgagtggccacttttctggtcctgccggaacacttgcataggctgccctgctctcctggagatagacgttgctggaggcttcaaggcttgcagggggggagctgggaacctgggaactccagggacagatcagcgccttgttactgaaggtggtggtggcttcgtggtaggtctgcagtggttttgtctccccttctcccctcctcccacttgcaaagtggtggctgtgcctgggtgggctccgttaggccagagagtagatagcattgacaggtgacgtggcctctgagctttcgttgccctctgtttcctccttgtcctttttgaccgtgtactggccgatgaaggagccgtcttcattgaaatgaccctagccaccctcgccatagtacagcaggctgtcgtcactctcctactgcttgatggtgccgtccagaggaatggctctcgatgcntagggtctgattntccctca

SEQ ID NO: 87994 - DNA, 475 bp, Homo sapiens
  misc_feature (1)...(475): n = a,t,c or g
gggttcgagaccccanancagngnggtcgtagaccactatccgtgtggtggaattcccacccagccgctgtcctttcatctgcctccagccccgccccgcgctgcctctcacctgagccagcttcctgggaaacaaaagtgccccaggaccgcctggcgtgcccatcatcgtgcggtacagctctgccatcgccattcactggtccagcggagacccgggcaaagggcccatcacccgctacgtcatcgaggccagaccttcagacgagggactatgggacatcctcatcaaagacatccccaaggaggtgagctcctacacgttcagcatggacatcctgaagccgggcgtgagctatgacttccgggtcatcgcggtcaacgactatggtttcggcacccccagcagcccctcccagtctgtgccagcccagaaagccaaccccttctatgaggagtggtggttcttggtggt

SEQ ID NO: 87995 - DNA, 477 bp, Homo sapiens
agcgcctttggatcatattcagtgcggtggaattaaaatgaaagcgctaaggcatctaaatatagtctgagtatcaactcttccagcatggagccgaaaacctagggaatgacagctagaggcatccagacgataactggcagccaggagggtggataagtcaaaggaaggggtcaaggaaagaggggaaggaaagggaaccatcacttgctgagcctgctgcctgtgctttctcatgtcacccgcacgacaacccaatgtgaatgttatcatctccaggtaactgctgaagaaacggaagctcaaagagatgtgacagacaggaagctgactatggaagaagaggaggccaagaggatagcagagatgggaaagccagtattgggtgaacaccccaaactagaagtcatcattgaagagtcctatgagttcaagactacggtggacaaactgatcaagaagacaaacctggccttg

SEQ ID NO: 87996 - DNA, 1245 bp, Homo sapiens
tggaagaagggagtgagactgctcagagaggcaggattcctgctgactccagggggacacctggcacctcagcttcctttcccacttctccaggctgcatggaggggtgccgggcaggggcctcctggaagggaacctcctgcagcctcaagcaccaggtcatgacatgacatctatccctttcccaggtgaccgactcctgcaggtggatggagtgattctgtgcggcctcacccacaagcaggctgtgcagtgcctgaagggtcctgggcaggttgcaagactggtcttagagagaagagtccccaggagtacacagcagtgtccttctgctaatgacagcatgggagatgaacgcacggctgtttccttggtaacagccttgcctggcaggccttcgagctgtgtctcggtgacagatggtcctaagttttgaagttcaaactaaaaaagaattgccaatggtttgggattcagtttcgtgcagatggagaaagagagctgcagccatctcaaaagtgatcttgtgaggattaagaggctctttccggggcatccagctgaggagaatggggccattgcagctggtgacattatcctgggccgtgaatgggaaggtccacggaaagcctcatcttccaggtgccgggggtcatgggcaatgcagctctctgtgcaggctggccccagctttgcctcttactatcctgctgccgtggaggtgctgcatttactgagaggggccccacaggaagtcacgctcctcctttgccgaccccctccaggtgcgctgcctgagctggagcaggaatggcagacacctgaactctcagctgacaaagaattcaccagggcaacatgtactgactcatgtaccagccccatcctgggatcaagaggacagctgggagggacagtgcctccccagatgcaggggaaggcctggggtctcaggccagagtcttcccaaaaggccatcagagagggcacaatgggggccaaaacagagagagaccttgggccagttccttgacacattctcctgagtcccaccctcatttatgcaaacttcaccaagaaagggatgaatcaacattggcgacctctttggaaaaggatgtgaggcaaaactgctattcagtttgtgatatcatgagacttggaagatattccttctcatctcctctaaccagactttcgacagatattttctgagcaccttctctgcatgtctgcagtgctgtg

SEQ ID NO: 87997 - DNA, 1408 bp, Homo sapiens
aaaaatactatctatcctctcaccgttgatggcactgtcttccccaaaagccccaaggaactcctgaaggagaagcccttccactctgtgcccttcctcatgggtgtcaacaaccatgagttcagctggctcatccccaggggctggggtgctcctggatacaatggagcagatgagccgggaggacatgctggccatctcaacacccgtcttgaccagtctggatgtgccccctgagatgatgcccaccgtcatagatgaatacctaggaagcaactcggacgcacaagccaaatgccaggcgttccaggaattcatgggtgacgtattcatcaatgttcccaccgtcagtttttcaagataccttcgagattctggaagccctgtctttttctatgagttccagcatcgacccagttcttttgcgaagatcaaacctgcctgggtgaaggctgatcatggggccgagggtgctttttgttgtttcgggaggtcccttcctcatggacgaggagctcccgcctggcctttccagaggccacagaggaggagaagcagctaagcctcaccatgatggcccagtggacccactttgcccggacaggacctcccacactttggggcatcgttgccactggagcctctcttcgggtgacgttgcccctccctgctgcccccaagctggccccttcccactcttcagaccttgaccaggaccccaggaaacaaggcaatcgctggcggtgcgggcctctgggccgtcctctggggttccgagaggaccccaccttacagatgaggaaattagaatcagagaggggcagtaccgtgcctgaggccacacaggctgaggccccaggataagttccttgtgctggcctcagatggcctgtgggacatgctgagcaatgaggacgtggtaaggctggtggtggggcacctggctgaggcagattggcacaagacagacctggcccagagacccgccaacttggggctcatgcagagcctgctgctgcagaggaaagccagcgggctccacgaggctgaccaaaatgcagccacgcggctgatcagacatgccatcgggaacaatgagtatggggagatggaggcagagcggctggcggcgatgctgacattgccagaggacttggcgaggatgtacagggatgatatcactgtcactgtggtgtattttaactcagaatcaatcggtgcatattacaaggggggttaagaatctcccatcctattgtcaaggttaacataaatgctcttctaaaatgtttcacttactcctaaactagctatccaaacctatgatgtgagtgcccagacatctacatatcacctttccttttggtttttgctctgagctacctcaatcattctaaagctttaagtt

SEQ ID NO: 87998 - DNA, 470 bp, Homo sapiens
  misc_feature (1)...(470): n = a,t,c or g
tggagggccggaaaaantttgaactgattgcctantcagtgtgcgtggaattcctcagaacaactccatgtgtgtggccgaacaggtgggtggtgacttttatgaagataagaaagctatgggagttttgggaccgacaggcttctgcttccaagctgttccagggcccccagagacccccgggaccccaggccctcactggccacacccccacaggtcatgcgctgggacggctccatgtttcgtctgctgcagcaacttccctcgcgcggtgcccacgtattccagccactgctcatcgccagggaccaattggccatcctaggcagcgacttcgccttcagccaggtcctccgccttgagcctgacaaggggctcctggagccactgcaggagctggggcctccggccctggtggccccccgtgcctttgcccacatcactatggccggcagacgcttcctctttgg

SEQ ID NO: 87999 - DNA, 2887 bp, Homo sapiens; identical to SEQ ID NO: 59477

SEQ ID NO: 88000 - DNA, 497 bp, Homo sapiens
  misc_feature (1)...(497): n = a,t,c or g
cgcccccccnnnnnnnnnttttgatcgagtccataggccangccgcggaatttgttccaggcagtagagatcctagcaggaactgccaatctggacatcagcctagccaacatggagatgcactcacctatgacagggacctgtaaggttctgcaaggctgaaggaggtgaagggacagcaacaaggatctcccactaacagaccaccacggagtccaagggagtagtccatagtgtcctcttataatccttttattatctgtaataataagttgatagtaacgttcccactttcacttctgattgtagtaacttgattcttctcacttttcttcatagttcatctaattaaagttttgtcaattttgttaatcttctcaaagaaataactttttgtttgttaatttttttctattggttttcctgcttttattttatttacctcagctctaatctttatcatttccttccttcagtagctntgggttcatttgcct

SEQ ID NO: 88001 - DNA, 411 bp, Homo sapiens
aggcactataagtgtaataattcttaagcctgaggtttttgctcctgatcttcctgaacatctctaccattgaattaaaaaagcacttgctgttcgaaagcctctctagaggaacagaaaggataacgatgctaaattccgcctgattctaatacagagccggattcaccgcttggctcgatattataagaccaagcgagtcctccctcccaattggaaatatgaatcatctacagcctctgacctggtcgcataaatttgtctgtgcactcacgcaataaaccgattgtttacctattttatgaaaggcttgggcgcccgttttatgagagaccaggagggccctttcccgtcgctgactctgaatgtggtaactttttgctcagaggggaaccattttaattctggctt

SEQ ID NO: 88002 - DNA, 402 bp, Homo sapiens
  misc_feature (1)...(402): n = a,t,c or g
cgaattttaatcaatagaatttttgtatatatacttgtatccatatacactaaagtctaaaattggaacataactatacggtgatgcaactaggagcccctttgtatctctactgtcttttgggcttcctatttttgcattatttccacttttattgataaccaaacactttccaaatgttaagtgtataatctcagagggctagttaggaatttgctgaagagtggtagagaaagccatacttttaactatctttaagcctcctcatgctttctaagaaattaatcttctttttctgtttcccgatctcttcccttctgtctgtttcacttggtactagatcagctcttatcattcctcctgcagttgaatccacattctgtttccaggattttacgaatn

SEQ ID NO: 88003 - DNA, 455 bp, Homo sapiens
  misc_feature (1)...(455): n = a,t,c or g
atttgaagaccttcgagagcctggcggaannccnngaaagtgacaacgctgaacattggtatggaagctcaccagaatgtggccctgacataacttttatcaatggactttcatgcaaaaataataagtttatttgttatgacggagactgccatgatctcgatgcacgttgtgagagtgtatttggaaaaggtaatatctttttgttacatctcattagcccttaacattgttattaacattaccacgataatggggaatattttcatatatataaaatgtggaatgttttatatagaataaaacgcgcaacattggatatatatattttattatatatatcagccgaacgttttatatagtataaaatgtggagtatatatattttattatatgtataagcaaacatatacgcgctaattcttcttgctaatgcttatatttcttccatcttg

SEQ ID NO: 88004 - DNA, 488 bp, Homo sapiens
  misc_feature (1)...(488): n = a,t,c or g
tggcgatgagaanaattttgagaccctaggctcgagggccgtattctgctccaagaacttactcaacatcagagacttcatacgggtgaaaaaccctatgaatgtaaggaatgtggttaggcctttagagtacatcagcaactggctcgacatcagagaattcacactggtgagaaaccctatgaatgtaaggactgtggaaagacctttagacagtgtacacaccttacacgccatcagagacttcatactgctgaaaagctctatgaatgtaaggaatgtgggaaagccttcgtatgtggtccagaccttagagtacatcagaaaattcattttggtgagaaaccctatgaatgtaaggagtgtggaaaggcttttagaatatgccaacaacttactgttcatcagagtattcatactggtgagaaaccctacgaatgtaaggaatgtgggaagacttttagattaagacaacaactagttcgcca

SEQ ID NO: 88005 - DNA, 1076 bp, Homo sapiens
tttcgtgaagaatgattttccccctccacctgggaggggccgcagtcctgtagcatgtgctggcctctagaggccttgggtggccaggccccctcttgggaaaggaccgggcatccccttgtgagttgggaccttccagctcctctttgtagaggaacccagcttatgggactgacagcactacattttttcaggttatcggttttaaaagttggaggcccagaaaaagtgaagaggctttaaggaaggtcaagctttctgtgttgtgttttgcgtgttacttaattcactccacttgctgaggttggtggtgtttgtgaagacagacagccgaggctcacagaggttgagaacttcaccaaggtcacacagcagtgagtgagtatcaggacaatcggtccgacttccgagctggttctctgggtgccttcctcagggcagtccctttcaagccctataacccagacccacagtaagaagtctctgttagggctggactggaccagcacctgcccgcatacttgtcattgacagcggggcttcaggaagccaccccagctcactgctgtactgtgtgcactgccccgggatgctgtcttgtcgatttcatttttcagcgtaccttggccctcatgatccacaggctcgtttctgtcactcgctgctttttggagattgttgccttggtgtgggcctggtagggagtggaccctctggaacaggacagtggttgaaagaataaatgtgtctgcaggataattcatagctaatggcaggatgggaatgaacccaagtttcaggttgtacaaacgtgctgtaattataagtctgtggtgcagttccattttatgctacacattaaggcttttaattttgtgtaaaaggaatttttggaatagtcttcattgagactctttttaatcttatactttctaatttagaattataagacattcaatttgaattatagaaaaattacattgggaggccaaggcgggcggatcacgaggtcaagagatcgagaccatcctggccaacatcatgaaaccccgtctctactaaaaatacaaaaatta

SEQ ID NO: 88006 - DNA, 56 bp, Homo sapiens; identical to SEQ ID NO: 86634

SEQ ID NO: 88007 - DNA, 11186 bp, Homo sapiens
cctggttacagaaaagtcctccattcaggcctttcttgtaagtgaagaaaaaggaatgcagcaaagaagagttcgacattggagtccttagttccatcaggatcccattcgcagcctttagcatcatgtagaagcaaactgcacctatggctgagataggtgcaatgacctacaagattttgtgttttctagctgtccaggaaaagccatcttcagtcttgctgacagtcaaagagcaagtgaaaccatttccagcctaaactacataaaagcagccgaaccaatgattaaagacctctaaggctccataatcatcattaaatatgcccaaactcattgtgactttttattttatatacaggattaaaatcaacattaaatcatcttatttacatggccatcggtgctgaaattgagcattttaaatagtacagtaggctggtatacattaggaaatggactgcactggaggcaaatagaaaactaaagaaattagataggctggaaatgcttactttctgctctcattttctttcattttgtctgctgtctttttgaatgccaatactttcatttaaaatgttttgggagcacggcaacccaaaatgactgaacggtggtccaaaaatccaaaccaactgataattacttctcgaggtgataggaaaggcacaggaagttaggactttggctgaaatgatgaaaacacatgttcgccattttagggatcagcgcctcgactcctgccacctccggctccaacgatgatcatgtttggatgtatttattgaattgtcctttgctgatgaggaatttttaaagtatttcatagaataagtcctttggtatgcagatgggttcatgcaggtaattttaggtatagcccatcttccatttcctaagcaccggatagttggaaggtgacgttgaatgaaaccatctttgcagtggtatctaatcagggagttgatttcataacgaggtttcatctttccaaaggtcttggcattttctacaacagggggctggccgcaagcaactgttcctttcttgcacgtataggtgagatggtaattgcagggaacatcattccactggccattctcatgccaaatgattacaacacagtcttctccagcagaaaagaagctgtctggctggttgggtctccaattctcgtattgcagtgtgctgccatcagtccaacggaagtcatgctcaaacatcttgtcattgaggcctatccactgataatcatggcccacacgattaacaaacatttgttcttcgtgagacaggatgcttgtgagatgggcaccctgcagacggcattcccgttcagctgcatcccatgtgcgtcgatgggcaaagtatttgtagcactgcccttggaatttgtgccagccatagtcacatgtctcggtatcttgctcacaaagtgcaccaacataacttggaaggcagaggcacctgaatgtgttaaaaccatcaacacaagtggctccattacgacagggattagagtgacattcatcaaaatcaagttcacactggtctccgctgtatcctggcacacaggtgcatacgtaggaagtttcagtaggataacaggtgcctccgttaaggcacgggttcattttgcagcgatcaggtcctggtaaatagattgccgtgccttccactgactcttcattaatgccaatcaggaaatctgtttcattagaagtctccagaagggaaaatggtggtgttgcaacctcagtattaaattccacagggtttactgttgcctgatcattggaatcaagaattctcgctgccacttgctgttctgatgctgctatcgtggaatcctgccctctgattaaagctgcttgagtttcagggtttatttctggagaagaagaaagcgtgggcctctcagaagtctgtggacttagccaaggcaccacacctgcctcgaccccataggtggcagaagcagaagtagagtgtggccactgtgtagcaccttctaattcaatttcatcggcagttgtaataacagttccagcctcaggtgttttaatggtgggaaacatcttgattgcttctccagaaacttgaccatcggttttgttttggaaatcttggagaatctcagttccttccacagcaataagttctgtgggagaagcttccatttcttctaataactcaggtttaccatcatcttctgaaggttctaattttgtgtcaggagataaagagggaggctcagttatgtgaaggtattcctcacttgatggtttgaaagttgcttcaatatttacatgaatttccttaaaagaatcctgtggggacattacagatgagccgacgtctattcctggcagagcactgggctgggggatctctgtgtgtccagaggcttcactgcctgagtagatagtgaggggagatgatggtgtctgagaagacaacttcgcaaatgttgaaactgctaatgttgtatcagtgtaatatgggggattggatccttccatcacatcaggcacctctgttacactctgatccataaggtgggtagtagcaatacttagatagggagtatggtctactaatgcctcctcagctcctgaagagaattctggctgaaaagaaggaccagcatgttttttgtcttcatactcctcctgagtcctttcaaattggcccaatgttggtattatttcactttggtctgcaatagcttgaccatcagacaaagtgcttgattcaaacatgtcatccagggcttttgcttcagcttttattccttcaatctctggaataactgtggcagacttacgaggaattggcagggatgttgccgtgggaagtaaaacgtctaattctgtttctgtgctaggagcagggatcccagttgtgaagtgaaagcccatgtgatctagttggcttctatcttcataagtcattgattcatcatgtgttgcctgagtgtagctagccagaacatcagcagagccctcaaatgtttcctcagttaaagaaaggttgacagctgcctcatagatctcttgaacttgagtgctgtcatcattactttcatcattactgtcatgtggttctgatggtacctctgtatctatatctgtttgcattccaagaatgtcttcatacacaggtttagtatgatcaatatctatgatagtatttttatccgatgtcagctcaggtagaatttcaaggatggtactctctgtaattgtcaatattaaatccttgtcctctttgtccaggtctatgataatattttcagtgggtttttttctgttaggttttaaggtggaatcctcgaattccctgaaacggtcttggaaactaccgtctgtggacctctcatatgacactgtatttgacagtgtgctagttggatcaggggagcttttgttctgctctgaatgaagaggcagcatcactgaaactgttgggaatccatcagcagtaacagctttagcgcttggcacctcaggatgtttttccagggacccatcagaaacaaatgtggtgctgctttcttgtctggttgcctgagtagttgcagaagtgtgaaatgaatcaacaatatccacttctccagatccttctccagaaggttcataatacaagtcagatggttttggtgctgatgtaacaaattctttggccatttcaaaaccataagctctagccagaaaatcagtagatgaggttgttgtttcgttaatttctgctgttgaagaattcttgttagagtcttgttcagttatggtttgtggtctactagtctggatttcttctgcccacctgacagtctgattttgaggatgtccgatgtccgtggagaaagggagaggtgccaccgtgggtccttctgctccagtgtcacttaaaatttctattaatgttgtgctggttactgacccactaccttcaaagatgtctgtttgagatacgagtggtccaacttcttttgccacattttccattctgttaaagtcttcaattttgtcacttgaggtactttccacttgagaagtgtggggatataatgtgttattgatttgttccacttcagtaaaattcactgactctgttggtagagtaggtaaaacttcttctcctgatcccagtccagagaataagagctcagtatctgactcttgaattgttggtctcatgcctttcggaaaatgttttgtactttcttcctttttgattggtgaatctgtgactacatgttcagctggtatagattcagttactaatgcagtagctaagaaaaaatgtgacttttcagtagcttcagggagagttgtgtaagattccaagccatttgcatctggatctggagtagacatgttaactaaagaagtgtcttcctccttcatttctttatcatcactgtaagttttctttgttgttagtacagaataatctgtggttttgagttcagtttcagtaaatgtctgtgaatcaaagattgtttgttctgttgcaggagagttttgaggggattcaaatgacttttcttcttgaatttgttcctctgatgttgtttcactttcaatttcttgtcttacagggttgacttcttgcctagaccataatttggctggctctatagtttggggaaagtttgttgaaactgtgccactgacctttacttcctccttctctactggagctttcgtaccttccacttctgctgttggtaaaatggtggatcttctatcaatttcattgacagtacccacttctcccaatccttcgtcgataatggaggaagctgtaccagaaaacttttgcacagcactgagaagcactggaacaacagagctgctgactgtgaccagttgctcacctgagccctcagctgaggatgtaaactcttcccaggggaaggctgaagtgctgaccatggtgctactgggtccttctgagtcagatatgtgactgatgtgaactgaagtaggtactgtagatggtgaagtctgggtgtccctaaatgctgcatctccagagccttccatcattaccgtttcttcttttgctatgggatgagacactgttgagtattctctaaagtcaccactgaaatcttcctccaaaggaaaacctgtggaaaagccccttatttctgccccataatttggttctcctaatcgctctgaaatcactatttccctggatgtttgggttatattttcagcaactactctgtccattactgtactcaaaaccagtcctgttggctcagtggagaatgtagtttccacatgcggagacaaagtgccagctacttccttttcggcttgaattgcatactctacgtttaatgaaaatgaagaaacagtggtggcttctgggtcggtagcagcttttccagagcccctgtttcataaagacagaggcaggactacgtgggagagtggtcagcccttcctgaaccccaggttgatggatactgctgtgctcagtggtctgtgcccccaaattttctaatgtatttgtttctgtaaagacaggagtagaatctgtcatttccctttcagactgtgttggtgttgtcaaggacataaaacttttcctggtacctgaatcactagatgtagctacatttggactttctaattcaaagggtaaaattaattgatccgatctctgtgtagatgaatatacctcaaatgtagaagccgtacctgtagttccctcctcctccttccttttcttttcctcaacagtggtactggaaatccactcagaagtgtctgtttcacttacaaacttggtaggcaccacttttgcagaaggttgttcagaaactggataaatggtggttgcaggaacctcaaaaaagctttctgtgattatcctgctagtgtctaaagtaatgagtgtatcagtagtatttctctgtgataaatcagttaccatggtgaacattgtatcttcatcttcttctgcttctccagagccttctgtaattggaatcgaagaactccctgagagctctacaacttgtctaggagttgcttctacccagctttctttggtagacaacaggtcatctggccaaggatttcctattagggtaactgcttcttcctctgaaacatatgctgatgcagaacttggaactatagtgggagtgtatgtgacagaagtacttttttctacctcttcaccaaatgttacttctgtagcccttgcaaaggctattttctgagattcttggtcaatggcaatctctcctgaagactcttcaggaaacagagatacaggttcagtatgttcatgtgcctgatgaccaacttcagtatctctctctgtgactgattctgccccttttttggctgttccactttcaaattcctcatggaatgggactgtggggaaaacatcaggctcaccacctgaaaaatgttctgatgtttcagggtaagtctcaggcttccatgtaacttcaagagactcagttgtttctgtagattcattaggttgcacagcagtagacaattccgttttggctattacaaatggatgagtatcactttcagagctgtccgagaaattctgagaaggtgcaacactttcaaactggccacgcctagcttctgcagcttctgggtccttgggcacagtggtaacgagatgcttcccatttatgtactgcacagatggggtggttgtcacatcagtagcatttgcacactcttcttcttcttcttcattttcttcactgtggtataggtctatttcaattatgtcagggaattcaggtaaaatttcagccattagatcatgcactggatctgtttcttcactacaaggttcatcttctttagattctgaatctattggatgaccaattacactcaaatcactcattcgacctgtcttattttctctgacctcaataatataaacattaatgtcagggtgaaattttgtgcttgctgggggctgtggcgtagaaagcgcctgaggtccaaaggcctctttgtcttccacagtgggtggtcttgttggctgtgtagcaggaggacttgaagtcgtgaaatactctctatcaatatcggtttctgtttccttggctacaatatcttcaagggtagtgggaggaacatgagatgttgattctccaatgattaccatgtcactggttgtttcttcaccaggttccctgtcgatgagaggtggtttcttagtgatcgcggaagatggcttgaatgctgaagttgtgtgaagtctgtctactgaactgaaggcagtggtaatatcacttggaactgtgactttgattgttgaaaattctatgagttctgtggctttgggcttttcaaataatcctgagcctaaatcaatatcctctagggatgttttctcagtagtggtttcttccataagctgggtaatgtgggtactaaaaggactcaaagatgatgtaaatcctgttgtactactaccttctgtttcatatttttgttcaggccctggacttaaagatacttttggcccaatgcgtggtgttagtgttaccacttcatctgttttcactttgtgctcagttacagcacctggtggataagacacactgtgatcaatttttccaactggagttgtttctaaaactgggaccctctcagaacctgtcaacaattcatcttcagagactgtatatgctgatccatcgccctcttgttcatccagtggtgttactgcctccttgggagtccaagctgtagaactgagagcaggaactggtttctctgcagtctgttctttccaagggaattcttcctgagttgttccctctgtgatttttgttgttctcatagtttctggagaaatagtcgcttcaaggcgagtctgatcaatgacaagtatgtcttgagagggttcacctagaacttcatcttctgatggaacagaaggtactaacactccccagtctgtcttgggaattacagaaagaggaatggtatgggaagagtctacataagtagtaggctcttgggtgctactataactaacaaatgctaatccttccacctctgaagtgtgtgcaaattggggaacagtagatactggcttagagaggtccacatcttctacttcacccaaagcacttccttccatggttgcataaacttggccttcagtgcttgtgataggtggaactttttcttcagttgtagaatctctcaaagttgacttttctgcaataccagttgatgtagttggctgaaatctaattgtgaattttccatgggctgctatgtcttcatcagtaacctcctctaactgcttttgagtactatctggaataagagtaaattcatctgctccatcttcagtgaaacttgggatgtctttatcctttccattcatccccacagttgtgagtaaggcagggggcaattttgaagaggctgaaggttctgtagactctaaaggcttggatgttgtattatcttcatcccatgaccattttgatacagtggctgcttcaacacttaaagtaccatgggccaaaagcactgttgtaatattttcatcatattttgtagtacctggagttgctgtaaagtcttcctccatatctcttacttctgttggctctgcacttaactttgttatcaatgttgggaaatcaaaagacttggtcatttccacagaagactctgtaacatgaattggctctgagagagatgtagagagtttcatcccagagaagacttcttcttctgtttttcccataaatggacttttagtgatctcttcttgtatttcatctgtataagtatctgttctcatctctggtattagtgtttctgttctttctcttctatgtgtcatttctgtttgtagagaaggataaataactgtggaaattccctctactaatattttatcaccagaataaggaaacaattctatttctgtacgatgctgtgatggaaaaggtgtagtagacagatatttgccaagaaactcttccgttatcctaccactagtttgtctctcttcccagtcatccatggatgatccattattatcaggcataattaaaggggaaacagttgtggatgctgagactgactccaagtcttctaaatgagtgtggatggtgtcttctgaagtctttgacaccgtaatgacttcaggaatttggtcaaagatcaaggtgctctcatcagatccaactgtaagtgttctgtcttcatcatcctcttctcccaaggtgaatccatagtgacctgtggttaccaattcagaaacagtgcttaccattttcttttcagttttggattccaggatcattcttgcagttaccaatggtgtttcagttacagggaattccttggaaggaatgtgctttaagatttccatagatgttaccaaaggacccacttctatttgttcaatctgtgtaaccgattcttgtgtttgtttatcttccacgacaccatcccatgaatccgtagcataatgagagacgccagttgtactctggagcacttcttccttaatttctgatatgtctagctttccaagaggtcctgaagcagaaggtgagtagtcatccatatcccagggcttcttggtactgccagtaggtgtgggtaatttggtggctaaactatctgtgatagcctgaggttggactgtggctttctgttcaaaactgacaatatttcccacgggagggaactctgttggaatgacaggtaattcatcaactaaagggatgattggtgtagttctatcagaaaccatttgtggttctttggataaactgggtgatgcagtttctgcgaggatactcaaatcgatggttgtagcctctttaggtttaaagcagtaggcatcaaatctgctatcagggggagggaagcctgtctggttctcaaaacgatacagggttctcaccccaagtagaccacctccacactgggccctggccacagtcacagggtggcgcacgctggcatccgacagccacccgtaatcgcactggtcaaagccgttcctccatgccgcctggagttcccccactgttgccagcctggcatcctggttttcacactcttttgcagcctcctcgaaggtgaatttactggggacagtgaggtggaacacatcaccatccagatgatccacataacaatacacatcgtaagtttcctggggagaacggaatccataagtcctgactcctgcctttcccatcttatctccataacagcctactctgggagcccggatgggatatctgacagtctgatcagccagccagcctgcgtcacactgctcaaatccatcttcataggcagcaaagagctgctctggagttgctatgactgccccaacgtccaaacaagccttctgagcagcctcaaaattcagtgtgtacctgctggttgccgccctgtagtgaaacacaaccccatccacagtcagtgacaccgtgtcttgtgtgtcttcaatcccgtacatgacgtcacagcggtaaagacccgcatcacttgccagcagcttgaccacagtgagggaggcatcgcccacagcctcgggatgtgtgggcacagacactctccctttgtagtcctgaccaatcttgatatttccattttgggccacaaggacagtagtctctttcaaatcttttccatttttgtccacttcaatcttagaccatttgatgcggagaaattcactggtgttgtaactgggtggcaaagtaggcatcgttgaaaaatgacaaggtaggctgacttttccagagagggagcccctcaccggtgggctttttcccactttgactttatgtagcgcatgggttactattaaggttgaacacatccataagatgctctttatatttatgaacatcttggccttggaaggcggcttattgcagtttggggggaaaattcactgcagcgctgcgcgactgggttcggcgttgcccaggcgggtcacataggaagcgtggtggcccggggaaggatgcggagggtgcgggacggtgctggaagatgcgggaggatgcggggctggccgaagatcttggtcccagctcctgtccacaacacctaatgttctcggctgttgcgtccgcacgcctggagttcttccccagaaaggctcggggcagc

SEQ ID NO: 88008 - DNA, 361 bp, Homo sapiens
tcaaaaccagatttaaaaaacattctactgaattccttgtactaaataattcatagtatgaattttatcataacgaagttgataaggccttatggaatacaggctagtacttggaaatactttcattagtatgaattatttatggtaaggtcatttgtttttaaaagcctttggtctgtaacaagtactcaataacagaaaaatcacacacaaaaaatgaaaaacacatttaaataaaagaaaaatttaatggaattttcaaaattaacacatggttttacatttaatccttatagaaagacttatcaactgctcatatttattcatttaacaaatattttttgcatacctactctattac

SEQ ID NO: 88009 - DNA, 422 bp, Homo sapiens
ttgcaccaggatctaaagtcaggagaggtcacccttgcagagattgatgtcatcttcaaggactttgtgaataaatacacggacctggattcagaacttaagatcatgtgcaccgtggaccaccagggccaaagagattggatcaaggaccgagtggaacagatcaaggaataccatcacctgcaccaggctgtccacgcagccaaggtcatcttgcaggtcaaagagagcctgggactgaacggtgacttcagtgttctcaacactttactaaattttactgataacttcgacgactttcgccgtgaaacactggaccagatcaaccaggagctcatccaggccaaaaagctgctccaggacatcagcgaggcccggtgcaaggggctgcaggctctgtccctgagaaaggagttcatctg

SEQ ID NO: 88010 - DNA, 1014 bp, Homo sapiens
gtggtaggctgcgaccccttcctcccacagccccttcccgcccctcgccgggcatccgccgacaggtacataccaagaaattgaattgctgagtcacaggagagatttacaaatagtgttttggcatcatggaacgtgtaggttgtactttaacgacaacttacgcccaccctagaccaacaccaaccaactttctaccagccatcagtaccatggcctcaagctacagggaccgctttccccactccaatttgacccatagcctgagccttccttggagacccagcacatactacaaagtcgcctccaattccccaagcgtggccccgtactgcaccagatcacagagggtgtccgagaataccatgcttccctttgtttccaacagaaccactttcttcacaagatacacaccggatgactggtacaggtccaatttaaccaactatcaagagtccaacacttcccgacataattcggagaaactaagagtggatacatctcgcctgattcaagacaaatatcaacaaacaagaaaaactcaggcagacacaacccaaaatctgggagaacgtgtcaatgacatagggttttggaaatctgaaatcattcatgagttggatgaaatgattggagagacaaatgcacttactgatgtgaagaaaagactggagcgggctttgatggagactgaagcccctcttcaggtagcccgagaatgtctatttcatcgagaaaagagaatgggaatcgacctagttcacgatgaagttgaagcacaactgctgacggtaaatgtgggggaaatgcatcagtcacaggcagcttagttgtaaatgtatgttgaatatgtagaagcaaaaaaggatgttacataaaatgacttataagtaaagcattatcgtatcagatgctgatagcatttagcaaagacatgtttttcttggttataacatatattcaatgagaatatgaaaatgcaaacgagtaaataaagatgaaaatcacttgaaa

SEQ ID NO: 88011 - DNA, 477 bp, Homo sapiens
  misc_feature (1)...(477): n = a,t,c or g
tgacgttgaanaaantttgatnaccctgataaccgtcgganangcccggaatgcaccaaagggcacggatggctcggcactgggaggggcccggcgctcgcagctttccacgcttagagaggatgcggcgcgccctgagagccgggtagcctcggatagcggcgctgcgtgcgcgatgatggatgagccgtggtgggaagggcgcgtcgcctcggacgttcactgcaccctgcgcgagaaggaactgaagctgcccaccttgcgagcccactccccactcctgaagagccgccggttcttcgcggacatcctgaccctgctgagcagtcactgccagctctgccctgcagcccggcacctggccgtctacctgctggaccacttcatggatcgctacatcgtcaccacctccaagcagctctacaccgtggccgtctcctgcctcctgcttgcaagtaaggtcgaggatcgggaaga

SEQ ID NO: 88012 - DNA, 514 bp, Homo sapiens
gactctgtgggtatctggggagatacctacacgctggcatccagcccactctataaacatgagaaataattagccaaaacgtcgcagtttagagcacataaaagatcaggaagtatgagcctgtatttctagaggacagagagtacctgtgatgtcatacacctttccatccatcagtgcaaagtaggtgatcttgaggcccaacatgcttgactctgcccaaaagtctccttcctcagcaggatgcagcctattacactcagcacagtatctggcactcttaggttcccggtccatttcaaacctcctgcaaccaacaaaaggatagttccttaataatttgtcaagcctacctagggcactgctagtagtcttaccattattcacaaatagggctgaaacatctaaaattaccccacttagtatttcatatcccttcaacgttctatcctaaagctaatgtttcttagtgctaattaaaatcgtcagtctattgacaatatgacaaaggtag

SEQ ID NO: 88013 - DNA, 486 bp, Homo sapiens
  misc_feature (1)...(486): n = a,t,c or g
agcctttggatgatgcctgcggantccgtggtcatgcctccttcaaggaccactcagcccccggagtccagcgcagccccgcagagctccagggtggccaagtggatctcaccggggccacctgcccctacaccctgtccaacatgacctacaaggaggaagacttcgagcgcctgctgcggctcagtgactacaacgtgcagaccagccagggtgccatcctgcaggccctgaggaccgcgctgaagcaccggactctagaggcgaggcctccaagggcacagacctgaggttgctcagaggctgcaggaccctccagggcctgcgggcataacctgatctgtagctgggctcagccacaggccttcctggttggagttctgggctctcccaggcctgggtggcctctgtagctggtctcactgcccagagggaactgcacacacagacttctctcttacgttcatggctggcttgagatgagtt

SEQ ID NO: 88014 - DNA, 498 bp, Homo sapiens
cggcatcccttgtgaggaatatctgacatgaactcaatgacagtgacagggaatgtgctctactgaatctcaaactctattgtaaagaaggaaagattccctgggatgcactaatttacattactggtgaaattacttatggcggtagagtcacagacagctgggaccaaagatgccttcgtactatcttgaaaagatttttttctcctgaaacattagaagaagattataaatactctgaatcaggcatctattttgcacccatggctgacagcctacaagagtttaaggactacattgaaaatctgcctttgatcgatgacccagaaatttttggaatgcatgaaaatgctaatctagtcttccagtacaaagagaccagcactttaatcaacaccatacttgaggttcagccaaggtcatctactggtggagagggaaaaagcaatgacgaaattgttcaagaacttgttgcttctgtccagaccagagttccag

SEQ ID NO: 88015 - DNA, 408 bp, Homo sapiens
  misc_feature (1)...(408): n = a,t,c or g
cttaaaatcccctagagggcgatactgtcccttagcctcagagccatcctgttcagcaatttcccctcccttcagcccctggctccagggtagtagactttgtctcttanagttgtgcagtgagtgttgggccctgctgggaggtggggaacctcagattcccataggtcttttgcaacccaaatgtctgatggggacaggcctgtcttcataggtggctgccacactcaacaatttggctgtgctctatggcaaaaggggcaagtacaaggaggcagagcctctgtgccagcgggcactggagattcgagaaaaggtcctgggcacgaatcatccagatgtggcaaaacagctgaacaacctggccctcttgtgcctaaaccagggcaagtattatgccgtggaacg

SEQ ID NO: 88016 - DNA, 405 bp, Homo sapiens
atggtctcagggcaaggctgcaactctaccggacgcgggacatgggctggggcgggcgggccctgcaggacatcccaccaggcacctttgtctgcgagtatgttggggagctgatttcatactcataagccgacgttcgagaggaagaatcttacctctttgatctcgacaataaggacggggaggtttactgcatcgacgcgcggttctacgggaacgtcagccgggtcatcaaccaccactgcgagcccaacctggtgcccgtgcgcgtgtttatggcccaccaggacctgcggttcccccggatcgccttcttcagcacccggctgatccaggccggggagcaggtcgggtttgactatggagagcgcttctgggacatctaaggcaagctctttctgtgcc

SEQ ID NO: 88017 - DNA, 414 bp, Homo sapiens
ggggccgatgatggaaatcaagataaagactaaggagcactacacgtggcgctatatgcgctaccaaacttctgaacctgacaagcattatgacttttgcctcacaccttggatcctaaaagaattcgctgagggaaatgtgaacactgttttacaagcttgtatgtttgcgatttactttgactgaaagccttttggggtttacactcaccatattacaatggaaaatacaagtctaatcgaacattgctttgacgaaagctaagaattacggccaacatggcagttctcctattttaggagaaatactgtttttatcatatgacatgccttgagccgttcataaagcagcctgaatgccatcatcttcctttttcattccaggccttattattggaagtattacttttcctc

SEQ ID NO: 88018 - DNA, 1685 bp, Homo sapiens
caattaagtgtcaaaacattgaaattttatgtaggtaagctttttattattgttttctttacaggaacaataatccaaacaaatcttgaaccaatctataaacagaaaacctgttatataaattattatctatttttgcaatacatcaaaatactgtattgatgaaaataaatagataacaaaaaccaatattacattcatttctatgtttgctatcagaccccacaagtatgtttgtttttacaattcattataggtgaaaaacaaactgaaacacaacaggtacgtacaattacgccactgttaaggactgcagattacacgtgttaaagcttttcttaataaaatgggaacacattgctaggtacacagaaacatgattttgccctaaagaacagctgaactgttgagagaagcaagggcttcctagcggccttccagtgtagcagataatattaccctgtgtaacagagtattacagagttttgcattttccaagtctgtaagtctaaccataaacaaaacaaagacaaacccaaacattaagatatactgacaatcttgttcccatatatgatagaatagttctcatacactgttaagattgatttacttttttattaggagcacttctcaggtttttggcatttcacatgtctacactcagtgtccattggctccttctgagagtatccttgaaggttcggtaaattttgcagtgaacaagtaaaaaagggctggtgtaggtaccaaagccaaaaggggcaaatcttgctcaagtttatccactctggaaatggagattattccataggcatgaagtaaccagtggctgaagagaacaataagtcttttctttctgaccagaagatcatagcagttctctatttcagaagcagacatgtacacagccagagtaaccaaagataacactaatataatgtatgggaaggcgtaatataaaaggcctccaccaactgcctgaagcacggttaaaattgggaagaagtaaagtgcagcataaatacttttaaatcgatcagatttccctaacccacatgcaatcttcttcaccagaagaggtcggagcagcatcattaataccaagcagaatgcgtaatagataaatacaatggtatatagtgggtagacggcttcatgagtacagtgtactgtggtaacgtaatctggacttgggttgtaaagcatcgtgtaccagtcagaaagcatcaatactcgacatgaacgaatataaagaacaccaactggatcactcacaagtaaggtgataatagctgccatgctgcattcaaataatgcagtgatgtgttggaaaagtgcgctggaactctttttccccgagtaccattcaatgaagaaccaatgtaaaaccagaggaagcattgccataaatccaagatagagccaatcataaagttcaggagattctgtgcaaggctgacaatatttctgtgcattcgttctctgtcctcttgggcataccccacattctccatatatttcagttgagccatttttaaataatagggtcttcccacaataaagtccaaggcatgctggttgaatatcgacagccatgggccgcctgaaggtttttttcgagaagcgctagatcagcggatctggcagctgcaccgaacatccgggccacagcgagctcggcg

SEQ ID NO: 88019 - DNA, 435 bp, Homo sapiens
ggaacacgctgattaatttcctatctaacctgaatgcttagtaggggtataggactcgccttactgggccatggtgctaaagaattttgagaagctgaagggaaggacaacacactatacacctcttgggtgtgggtcaaatgctcggattagaaagattggggactatatcacgactggttacattaatcctgacgcgccctataacccctcttcccatgagggggctacctggattcgacggatacttctagaggagaaaacagggcgcagtgggactctgaatcccaaagtgactggttggtcaaacatgggcatagaacgagccactcgcttggggaattctctacacattgcaagctgagaccttgttgggattgtccggctgcgctatgctattgaaggggggacccaactttctatggccctatagag

SEQ ID NO: 88020 - DNA, 518 bp, Homo sapiens
gggtgatacaagagctggaaggcggctccggcgcagaccttggagagcacagctgccggcccgcgagccagcctcggttcccgcggcccgccgaggctcggagccatccagcgacccggcgaccggcctcaggccccgccatggggaagaccaacagcaagctggcccccgaggtgctggaggaccttgttcagaacactgagttcagcgagcaggagctgaagcagtggtacaagggcttcctgaaggactgccccagcggcatcctcaacctggaggagtttcagcagctctacatcaagttcttcccctacggcgacgcctccaagttcgcgcagcacgctttccgcaccttcgacaagaacggcgacggcaccatcgacttccgggagttcatctgcgccctgtcggtcacctcccgcggcagcttcgagcagaagctcaactgggcctttgagatgtacgacctggacggcgacgggcgcatcacgcgcctggagatgctggagatcatcgag

SEQ ID NO: 88021 - DNA, 480 bp, Homo sapiens
ggcgtggtaaaaatagcggtcgaggtggtctgccttcttggactgcaggggcggcggggtggccacagcgggcttctccgccaggctgttgctcatcttgaaaagcatgctcatggggtccagggcaggcagggagggcttggcggccttgcccaggtgaatgttcatgactgactgcagggcgctcaaagggttaacaaaaggctgttcaggcgggtggtcggtgatgatggccgtgctgccactcaaactgctggctaggggcttcaccagctccttgccattctccaccggctcagcgagggggctcccatccttgcacccatcccgcggggggctggggctgttctcctggctgcggaagcccccatcgctggatgcctccatcttgatgggttccccgacttcgctgctacatggggagggagctgcgccttgggcggggaaagcttcccatccggctccttcatcttctcctcc

SEQ ID NO: 88022 - DNA, 403 bp, Homo sapiens
ggacaagggttaaagaaagacatacacacagagggcagttcaacaggaaatgcaggctttatgtccagcataacacctacagaggtggggaaccagcctaatgccagtgcccaccaccgcttacaggctggggtacttataggcctaggtgggaggggtctgggcagtatggcttgctgctatgtactgctatgtgttggtaaggtgttcccatgatgaggcagtttggctcttgttcccacagaatgtgatgttccttgcactttttcccagcagaatatgataaaaggcaggctgtttctcacagcccgaacccccgtggaatgattcactttgatcaaggtctgagaaatggtgggagacttacaaaatgatgcagttggaactaacaagagagaaagag

SEQ ID NO: 88023 - DNA, 427 bp, Homo sapiens
gaaaatattgaaagtaggaagagaaataacactttacctataaggaaaattaattctaatgacagtggatttctcatcagaaaccatgaaggtcagaaggaagtggcacaacattttccaagtgctgaaagaaaaaaatcaaccatgtaaaaatatgctacaggaatgaagaggaaatcaagacattttcagatgaaggaaaactggaagagaagttgtcactagcatacctatcctaaaagaatggctaaagaaagttctctgaacagaaaggaagcaataaaaggaggaatcctgagaccccaggaaggaagagagaacacagtaagcaaaaaaacctcctaaatctaataagtgagtttagtgaggtcacaggataccagacaatatagatataagattaatatacaaaagtgagttgcatttc

SEQ ID NO: 88024 - DNA, 475 bp, Homo sapiens
acccctcggagtgcgctggaattcgtcgactaaagaagacagacattccgctactgcagaggctcctacagggaccttctgaaaagaatgctcgcattttcctcatggataaagatgcagaagaaattagcagtgatgtggctcagtacattaactttcacttttctctcttggaatccattcttcaaagattaaatgaagaagagaaaagagagattcaaagaatagtaacaaaattcaataaagaaaaggcgattatactgaaatgtcttcaaaataaactagtaataaaaacagagacaacagtttagcagtacaagcttctattgctaaaacatttcaaaaaactcagagatattactctttgatgaatgcataagttctgtacttgcatttatacgaacatatatgagacttgaatcgtaggaaaattgaatgtcaaaaaaagctcatttctttttgaagtgatgaggtt

SEQ ID NO: 88025 - DNA, 472 bp, Homo sapiens
  misc_feature (1)...(472): n = a,t,c or g
nattgtagatctctagtccctgtggtggaattccatcattgaagaaaccagaagcaacggccagaccatcatggaagaaaagagccttgttgatactgtttacgccttgaaggacgaggtcagagaactgaagcaggtaataaaatataaaatcattttctcgggtaatagaaccattctctttttcttgcctcacgctgctcatgctttcagggaaggcctaggagcaaggtagcgaggggggatttttgttttccttgtgtcatcaaggtaggttttgttgattttatcatgtaagccttgaatttaaatttccgaggcttgcttgtatttctatgtagtagttcacaatagagtcccaaagttagttacaactttcctgttctctgacatccataaacagactttaagaaaagactagtcattcatgagtgtgtaagtgtaaagagaaccattcatcatgggttgtggg

SEQ ID NO: 88026 - DNA, 825 bp, Homo sapiens
ttttttttttttgctttgtacttgagtttatttcacaaaaccacggagaaagatactgaaatggagctctttccagcctccaagcaaggaggccccagcagccagtctccagccccttgagccctttttgttaggcccacagccaaaagaggagaaccagtgtgtgcgcgaaggtacatggcaaggcacttttgaaaacatcccagtttaccgtggtgaaattgaacttactctgaaacagatgaaaagggacatgcaaaattgctgagcacgtggaggtgttagtaggtgaaaatcatgtcctgggtataacccagcttctccaggttagggtgagccgccgtctggatcagtggtggcgggccacacaccaggatgagcgtggacttcgctggaggaggaaggtgctccttgatcatgtcggcagtaacgaagcctgagctgtacttccagccaatgggaggcctgtccagggtgtaccacaggtcgaactggtctgggtgagtcctggcaatttcttcaagctcttttctgaccaagatatcctcctctgtctggttggcaaagatgagggacatcctggtcctgtcactggggtccttggtgatgtggcgaatgagctgcaacatgggtgtgatgcctgtgcccccagcaatcattcccaggtgatcggccagtgtttttttaggctcactcgtctggtctggtctgattccaagattccggaggtgaaccagtgagtaaacaatggctatgtgagtaaccaaggagcatggactccctccatccatttttcagtattagcaggcaccatttatgtatcag

SEQ ID NO: 88027 - DNA, 2725 bp, Homo sapiens
  misc_feature (1)...(2725): n = a,t,c or g
ttttttttttttaagttcaaaagtacatttatttaaaatgtgggcaagatatcaatataaaagaaaacagagtataagaaataaaaataatcaaagtacaaaacatttcaaatctttaacatccataatttagagatagcaaggtctttatttacaccattttatttctagtttgaagtcccgtaacagttttgtgaaaacatttaaaaacctgggcaaatgaatcataaaacctaatgtggggctcttaaagtcatataatacaaaacataatttatgtttccctcaggattaaaattgcaccatctttaaaagggtgccggtatatttattatatcctgtccttccccgcttcacagtctggatcccccaggaaaggcagctgggaaaaccagagcctgtgaagggaagcgcagcagcttcctcgccagaccagaacagccagccccgcaccgcaggaagtccgacatgcacggcagcctagacgccatcagttaaacttatatgattcatagtccagcgtttgagtgagcactccagtcagaacgaactctgcattgtgaacatctatgcctctggcaaaatattctcggcataaatgaaggtcattttcacaggatattaaaattatttccgacaaactcgagttctgcttgtgctccatgagcttccggaaagatggctgcttggataacacctttcctcctgcacactctacgattgccttcatagtggaaagacttgggcagattccaggtgtgatgtaaaaatattttgccttaaagagtggagaaacgtgtgcccgttttaaggattcttccaagctgaaagagaaaagtacttctgcctcagcatctcggagaatgtagttctgctcatcaatgaacttctgacacctgaagcattcttccagccactctggcgtcactatgtgcttcacgacagaaatcgccgtcaggaacttcacggtgcgagtcactttgctggcaatgaggtgtgtgcacttctgtgcagactccgcaacctctccaccaagaatgtagagcttcttaatatactgttgaacctggacaggctcgaatccagtgaaaagcacaaaaggggtcaattctggagttagctttttagtgggaggtggtacgtcttcaattctggctcttttggaagaaggctggacattagctacttcattctgtttcagtttgggaggtagtcttatactcatcaacaactctgcagacacttttaagggaactctccaagcatctaaaagatttaaaactaaatgctgggtaggggcaaatggatcctgcagactgaatgccgtgtagcgactatactgaatctgcctcagtgcctcaaagtttcccagaagaatgtcgccaagccactgggcgttgacacagggtatcctccactctttggctttttcatactttaaaccagttggttctttacagatgaggactgtgttgctgcggcatagataacccgtatatttggcacctgccaaataagccattaattttaggtcatctctgtcactatcaacaaatccagtcacagaaataatatgctgtgaacatggctttcctcctggtgggaaggccactgggaagtgaagggctcggtgcggcggtaccattttcttcttctttaagactgtgtttaaccagtgtgcagtaacacatctctttctttctcttattgcctgtgcaatacgcgctgctgacttgactctcacagagaaggtgcgtgcatcgactcgtgaaggtgggtcaacagtnccgccatgtgcctggattatccttttccaggtggccagcagttgcttatcagacatctgctctggataatccgcaattgcaaacacacatcccaataagaagccttcttctggaatctccactgctggatcatgtccaaaaagctgatgctgctgaggcgatggtggtggctgctgttgctgctgctgctgctgtgaaaatggatgcggcggctgctgggggtaaggttgctgagagatctgctgctgctgctgctgctggagctgcattatctgctggggctgaaggtgtaaaaccgggtgctgctgctgctgctgctgggcctgctgctgctgctgtagcatgtgtgtctctggagtcactttcacttggctaaacagcactgcattggcatttgtatgtccctgctggctgtgattcacctgctgttctaaatttttcgtaggtgctgaaagagtctgtaagatatgtgctacatttgatggccggttcatctgctgaatgtcagcattattagtaatattcctcagtgtccgtacagctggactccaggtagctatcatttctgatctttcagaactttggaggttttgtccagcagccattaaattaccccggacctcagggggcaaaatgttacctgggacgggtgggacattggcacacaagttaatcaacccaggctcctttccctgaggcagcctgcgttttgctgcagctaactgtgggacttcggccggggtccagtttaaatttctctcctgtttttccggtgatgaatctgaagaatcatcaaacattaattcccctttagatttttcagtgttggatttaggagaaaactgctggtcacctgaaggagacccttcttgagagctggcagggcttgacttctcatctgtactaccctcattctgagaatcttgttcctcattttc

SEQ ID NO: 88028 - DNA, 1090 bp, Homo sapiens
cccacgcgtccggtccgcgccatggagcgctacgcggccgccttggaggaggtggcggacggtgcccggcagcaggagcgacactaccagttgctgtcggcgctacagagcctggtgaaggagttgcccagctctttccagcagcgcctgtcctacaccacgctcagcgacctggccctggcgcttctcgacggcactgtgttcgaaatcgtgcaggggctactggagatccagcacctcaccgaaaagagcctgtacaaccagcgcctgcgcctacagaacgagcaccgagtgctcaggcaggcgctgcggcagaagcaccaggaagcccagcaggcctgccggccccacaacctgcctgtggttcaggcggctcagcagcgagaactagaggccgtggaacaccggatccgtgaggagcagcgggcgatggaccagaagatcatcctggagctggaccggaaggtggctgaccagcagagcacactggagaaggcgggggtggctggcttctacgtgaccaccaacccacaggagctgatgctgcagatgaacctgctggaactcatccgaaagctgcagcagaggggctgccgggcagggaatgcagccctgggactgggaggtccctggcagtcgcctgctgcccagtgtgaccagaaaggcagccctgtcccaccatagccacaggcagcagaagtctgggcagagttcatcttcttgacctttggccactgccttcccagctgcccgcagggggttccccctgctgaggagagaccaggtggaccccagctgcctgtcacccttcatctgggacttgctgtcaaaccctaggatagtctcataaaggggaggctgggccagcctgctgctgtctgcttcaggaccaggcagagagtgaggctgggggttctcacaccttactccaccgggcacatcccaacctgcactggggcccacccgagcgcttgttctggtctcagccgctcccttggcagctgcagcccccatgcagaaaaggctcccaggcccaagctctgtgtgacccagagaaataaagatgcctcagtgtggcccaaaaaaaaaa

SEQ ID NO: 88029 - DNA, 481 bp, Homo sapiens
  misc_feature (1)...(481): n = a,t,c or g
ntttgaaaaactgagncccatacgacagngcggnggaattcgcagggcctgcctctattctccctgcccttcggccctccctgctgtcagctcaggttctgtggcgtgccctttcccctgggctccaccacttcccctcacctcccctctccctataacctcaactcctcatctttctggtttggctctaacaaaactgaagaagttggaatcctgtgagaagcgcaagctgaagcgtgtccgaatctccctggcagtaagtatgcctgctcttctagcatctcggcggcaccgggcagggagggcagggtctaggctggataaactccagagcccctagctgccagcctccctccctctctactagagtgacgcggacctggaaggcgagatgagccctgaagagattctggagtgggaggagcagcaactagatgaacctgtcaacttcagtgactgcaaaattgatcctgctcccttt

SEQ ID NO: 88030 - DNA, 517 bp, Homo sapiens
  misc_feature (1)...(517): n = a,t,c or g
agggagccgcnnccccnnaactgagnnactgacgaacatacgacagngcggnggaattcaaataagttaaaannnttaccagatctaangaaaagtggcctggcacttggttatagcacagtagtanaatatnntagttcgtattgtntgctggtattatgcccatangacttatttaatanaaatgtctgctgatggagatgagtaatnctcatttaatctaattaaattaatctttccctttaattggaattttaagttgctttctttttttagcatgttaatattttataggtacaggcaattaaacttctggtaaggtggctgttgggtatgaaaaacaaccagtctaaatctgccaattcaacccttcggttattatcagcgatgttggttagtgagggtgacctgacagagcaaaagaggatcaggtgagatttttctttctttccagttttcttagtgctgaaattttggtggaatttacataggaattatttacctaatgaatactgag

SEQ ID NO: 88031 - DNA, 445 bp, Homo sapiens
  misc_feature (1)...(445): n = a,t,c or g
gcagaccnnnnnaattgagcctgangaccatacgacagngcggtggaattccatcatcatgggcctgaagcagacgctcagcaactgcgtcgagtacctggtcccgtgggtgacccacaagtgccgctctctgcgggcctccgagtccgggcacctgccccgggaccccgagctcagggactggcggcgcaactaccttctgaacccggtcaacaccttcagcctgttcgacgagttcatggagatgatgatccagtacggcttcaccaccatcttcgtggccgccttcccgctggcgccgctgctcgcgctcttcagcaacctcgtggagatccgcctggacgccatcaagatggtctggttgcagcggcgcctggtgccgcgcaaggccaaggacatcgggacctggctgcaggtgctggagaccatcggtgtgctggcggtn

SEQ ID NO: 88032 - DNA, 1436 bp, Homo sapiens
cccacgcgtccgcccacgcgtccgcccacgcgtccgggcagaacataggttgccttagagaggttccccggtgtcccgacggcggctcaagtcagagttgctgggttttgctcagattggtgtgggaagagcctgcctgtggggagcggccactccatactgctgaggcctcaggactgctgctcagcttgcccgttacctgaagaggcggcggagccgggcccctgaccggtcaccatgtgggccttctcggaattgcccatgccgctgctgatcaatttgatcgtctcgctgctgggatttgtggccacagtcaccctcatcccggccttccggggccacttcattgctgcgcgcctctgtggtcaggacctcaacaaaaccagccgacagcagatcccagaatcccagggagtgatcagcggtgctgttttccttatcatcctcttctgcttcatccctttccccttcctgaactgctttgtgaaggagcagcgtaaggcattcccccaccatgaatttgtggccctgataggtgccctccttgccatctgctgcatgatcttcctgggctttgcggatgatgtactgaatctgcgctggcgccataagctgctgctacctacagctgcctcactacctctcctcatggtctatttcaccaactttggcaacacgaccattgtggtgcccaagcccttccgcccgatacttggcctgcatctggacttgggaatcctgtactatgtctacatggggctgctggcagtgttctgtaccaatgccatcaatatcctagcaggaattaacggcctagaggctggccagtcactagtcatttctgcttccatcattgtcttcaacctggtagagttggaaggtgattgtcgggatgatcatgtcttttccctctacttcatgatacccttttttttcaccactttgggattgctctaccacaactggtacccatcacgggtgtttgtgggagataccttctgttactttgctggcatgacctttgccgtggtgggcatcttgggacacttcagcaagaccatgctactattcttcatgccccaggtgttcaacttcctctactcactgcctcagctcctgcatatcatcccctgccctcgccaccgcatacccagactcaatatcaagacaggcaaactggagatgagctattccaagttcaagaccaagagcctctctttcttgggcacctttattttaaaggtaacagggtaacaaggaggtaaggccctaggctgccatcctgaccttgaggaatggggaacctagtcctacatcagatccaaggggaacttgaaagcattaaatagatccacattcctaaagcataggtattagctgaggttctcttcacctctggtccctccaggtggcagagagcctccagctggtgacag

SEQ ID NO: 88033 - DNA, 1043 bp, Homo sapiens
ttttttttttttaataaaaataaaggggggtttattataaaatgctaaaaatgtactttaaagtacagtcatgagaatactgcataagtagaaatgtgtcttcatactgcaaacaatcacacagattttatattgtccatggaattaatacttaaaaaaattcttctttttagttaagaagagtcttcagagcaccattattctaatagaagttattttgcatatcaaagttcatttttggtctttttccctatgggcaagtaccaagggaagaggtcgtcctcagtctgtggttctacccttttcatgccctcccggatttggggctcactcacttgtaaattggcatattcctgggaaaagtttggaaataataacagaatatgtcatcgcccatgagattatttcttgcaaattcttgtcctgcttttgctatctttttggcctcttcatcgtgatctttcgcccatttaagtttttctagcagatcgctcaggttgctcttaactggaatgtagtgtttccagggctgcagctcattgtaaaaatgttcatagtagatggaatcctgcttcagcacaacactgtcaccaactagcaaatatggcaggcgataagctgctacagtgccatcgatatttatttgatacttatgcttgaagaaatcaaaaaatgaaatatgtttcacaatgggaccatacaggttttcatcgtgtttaaagaagaaaaagttggtgaaagcagcgtctatgagttctgggtgttttctactgagtttaaccagctcgagtctctctttgcggctgtctcgccctctccagacggcagtggaatttttgctttcccagggaggacccgtgttagcttgcacggacatcatatccagacttacccggcccatggtttccagaacagaatcagtcaaatcgtacgtaggcatcacgatatccttggaatctgtggagccacaccaggaaaagatcggatggatgtttgaattggatttctttttttccaaaggccagtctccccggacgcgtggg

SEQ ID NO: 88034 - DNA, 1578 bp, Homo sapiens
  misc_feature (1)...(1578): n = a,t,c or g
agcgctggatcattccatgtggtggaattcagactttagagaaaaagactcatcttcgaatttatcttaccaaagtcatgactgctctggtgcttgtctgatgaaaatgccactgaacttgaagggagaaaaccctctgcagctgccaatcaaatgtcacttccaaagacgacatgcaaagacaaactctcattcttcagcactccacgtgagttataaaaccccttgtggaaggagtctacgaaacgtggaggaagtttttcgttacctgcttgagacagagtgtaactttttatttacagataacttttctttcaatacctatgttcagttggctcggaattacccaaagcaaaaagaagttgtttctgatgtggatattagcaatggagtggaatcagtgcccatttctttctgtaatgaaattgacagtagaaagctcccacagtttaagtacagaaagactgtgtggcctcgagcatataatctaaccaacttttccagcatgtttactgattcctgtgactgctctgagggctgcataaacataacaaaatgtgcatgtcttcaactgacagcaaggaatgccaaaacttcccccttgtcaagtgacaaaataaccactggatataaatataaaagactacagagacagattcctactggcatttatgaatgcagccttttgtgcaaatgtaatcgacaattgtgtcaaaaccgagttgtccaacatggtcctcaagtgaggttacaggtgttcaaaactgagcagaagggatggggtgtacgctgtctacatgacattgacagagggacatttgtttgcatttattcaggaagattactaagcagagctaacactgaaaaatcttatggtattgatgaaaacgggagagatgagaatactatgaaaaatatattttcaaaaaagaggaaattagaagttgcatgttcagattgtgaagttgaagttctcccattaggattggaaacacatcctagaactgctaaaactgagaaatgtccaccaaagttcagtaataatcccaaggagcttactatggaaacgaaatatgataatatttcaagaattcagtatcattcagttattagagatcctgaatccaagacagccatttttcaacacaatgggaaaaaaatggaatttgtttcctcggagtctgtcactccagaagataatgatggatttaaaccaccccgagagcatctgaactctaaaaccaagggagcacaaaaggactcaagttcaaaccatgttgatgagtttgaagataatctgctgattgaatcagatgtgatagatataactaaatatagagaagaaactccaccaggnagcagntgtaaccggcgnaccacttggntnatncantattnaaagagncaatggggttncatattcanaaaccccaanaggnagttctacaggcatgtcaaagacagcaggtattttgtgatgaagagttgtttaatgnaaaccganatanttnctatcnttttctcnaacagattncaanagagntgagttttttnatgggnagnccacaaaaaaaaaaa

SEQ ID NO: 88035 - DNA, 473 bp, Homo sapiens
  misc_feature (1)...(473): n = a,t,c or g
nattgaaactcgagaccactaggccagngcggnggaattcggatgttagtgtccagaagattaccacatcaggggtatggtggtcaagagaagctgactatccaccatccctcacaaatatggataatctgaggatagaggttccttgaaacctttcttgtaaagagaaactggaagatattgcagctgtttactcataagacagcctcagctggataagcacagagacacttctggaaggaacgtaatggtggctgcccaaggagagccccaagtccagttcaaattggtattggttggtgatggtggtactggaaaaactgcattcatgaaatgtcatctgaccagtgaatttgagaagtgtgtagccaccttaggtgttgaggtttatcaccttgtgttccacaccaacagaggatctattaagttcactatatgagatacagctggccaggagaaatttggtatactgg

SEQ ID NO: 88036 - DNA, 459 bp, Homo sapiens
  misc_feature (1)...(459): n = a,t,c or g
gggcgtgcccgntnnncctgatgagtncataggacangcggnggaattcgagttttctcattacagcagcccccacctggtgaaggcacctgggaaccagaacacacaggaggtgcgtgtagggtttcttttaagcagtaaagtgtgaaatgctacaatccacgttagcaaaacctgaagggaataagaattaatgggtgaaaaaattcatcaatgaaaaggacttatcattagaaaaaaattactcagatttgggctatcagataacatctttgaagatttttttttgttttggttttggtctattactgcataaatttagtgtctgttctattggtgagccagaactacaaggaccaaaaaatatttggatcatttggggaaaggaggcatatgaaattcaggataaaaattcttacaattgaatatttttcattttgctcaatggaaatacattga

SEQ ID NO: 88037 - DNA, 1014 bp, Homo sapiens
ccattgaggagccatatccacgcgtggtggaattcggaggctcaacttcaacatggccgaagcaagtagcgccaatctaggcagcggctgtgaggaaaaaaggcatgaggggtcgtcttcggaatctgtgccacccggcactaccatttcgagggtgaagctcctcgacaccatggtggacacttttcttcagaagctggtcgccgccggcagctaccagagattcactgactgctataagtgcttctaccagttgcagcctgcgatgacacagcgaatctatgacaagtttatagctcagttgcagacatctatccgggaggaaatctctgacatcaaagaggaggggaacctagaagctgtcttgaatgccttggataaaattgtggaagaaggcaaagtccgcaaagagccagcctggcgccccagcgggatcccagagaaggatctgcacagtgttatagcaccctacttcctgcagcaacgggacaccctgcggcgccatgtgcagaaacaggaggccgagaaccagcagctggcagatgccgtcctggcagggcggaggcaggtggaggagctgcagctacaggtccaggcccagcagcaggccaggcaggtgcgaagcccagcggtgcagagtccagcaaaggtgcagcctttgtgtccaagcaggagggcagcgaggtagtgaagagacccaggcgctacctgtatcaatggctgggagccccagtcccctacccggatcccctggagcccaggagggaggtgtgtgagctcaatccggactgtgacgagttggctgaccacatcggctttcaggaggcctatcggcgcttctacggcccggtctagggtgtcgctctgctggcctggccggcaaccccagttctgctcctctccaggcacccttctttcctcttccccttgcccttgccctgacctcccagccctatggatgtggggtccccatcatcccagctgctcccaaataaactccagaagaggaaaaaa

SEQ ID NO: 88038 - DNA, 473 bp, Homo sapiens
cttcgagattcgtagatccctagtcagtgtggtggaattccaagcgcgagccaccgcaccgggccggaattgttttaaaaagccaatactggtgacaggattagagtatattaacagattttacttagggtttccattcccacattaattaggtctcaaaatttatttgcatgctacaaaagagctcaacaatttttttattacgtgcaatttttttaataggaataaagcaaatacgttggtggcgctcattatcaagacgacatctgacccaacttgtgtagagaaagaaaaggtgtatatcggaaaattaaatatgatccttgttcaggcaagctttaacttaactggcttacttacaagaattatgcttattatttgaacaaaatgctcgacctacttatgaaatatagtatactaatattttgcagaagtagcgatagtattcttataataataggtaacctactgtc

SEQ ID NO: 88039 - DNA, 439 bp, Homo sapiens
  misc_feature (1)...(439): n = a,t,c or g
gtgaaaacaggctgcacaaggttgggcattgctaagagaaaatggtttgctcacacaccatttgtgtaaggccagtctggcagtggctgattgttaaaatgattgaaactcttccagtgaccagtgcagtattgtgcctagggaagtaaagtggtcttcaccctaggctgcagttctcgtgaatggtaatgttcatagggttcacatttgatgtactttcaagtgactatgagccagaaagtatggctggtttttttttctctgcaacttctgctgtatagtaacttcatctcttacatttgttaggcaaacctgtatgtgggactggtaggcatgtgtggcttcgtcctttttgatactcaactcattattgaaaaggccgaacatggagatcangattatatctggcactgcattgatctcttcttagatttcattn

SEQ ID NO: 88040 - DNA, 423 bp, Homo sapiens
  misc_feature (1)...(423): n = a,t,c or g
tcctgctgcccctggaggctgccactggctacctgcaccacatcactcgacttgtggtggcctccttcaacatccacggtggccgtgatgctcctgacctgctcaagatcatcacagagcccttcacgaagctcatcatccaggtgacagcagggcctggcatggggtgagggtgggggtaacaagggacccagcctccttcactccccctgcccacatcttgcccacagctggacgagtctgtgataaccagcattgccactggtgatgagtccctgaggaaccacagtctcatccagatctggtgccacccagactccttacagcaaaatctggaagggagagaaatcacacactttgatcttcgcaaaaagcaagccatggaagacagctctgttcctcactgcccctgagctccctgcn

SEQ ID NO: 88041 - DNA, 392 bp, Homo sapiens
gcggagtcaggtaaaacaagctgttgcctttatggttcatgagtgctggacttatgttgacgagatcaccgaccttcctatcaaacttcgatgcattgatactctacgaacggctaccgaaggcaagatttatgttgaaattgagcgtgcgcgactgactaattcattatcaactattacagaacaaaatggggatgtgaaggacgcagcctccattttacgggagttactggagggaacctaccggtccctggaaaagaatgagcgagtggaatttattttggagcaaacgaggctctgcctagctgggaaggattacattcgaacactcttcctgagcgagaagattaacacccaacttttcctggaagaaaatacatagaagatgatgg

SEQ ID NO: 88042 - DNA, 448 bp, Homo sapiens
aagaaagccacagggcatcgggggtgagcaaggcgagggtgggaggaggtgaggtcgtgggcttggcaaggactagatcccatagggcttgtgggccatggctttgtttagaaacgcttcacggcagaaggtccattctgggtcaggtttgtgcggaaagtggggaggtcattcttagggtgggtggaaggagctctgagggacggtaaacagactcgctgttctgaaaacaaactgggagctgggcgtgtggagcggccccgaggcaatctctcttctaccactttttcatgccttgcagcactttgcccatagggaggaaggggaagtgccccagctcgctgtacatggcctggctggagacccttgcccaagacctcagacctccagtcatcctgatccgaggaaaccaggaaaacgtgctcaccttttactggcagtaactccc

SEQ ID NO: 88043 - DNA, 2820 bp, Homo sapiens
gtggcgatcatggcaagttagaagttttctgactcctttcggaggagcctccgggaccccggggagtaacaggtgtctggaggctgaagggtggaggggttcctggatttgggttttgcttgtgaaactcccctccaccctcctctctcgcacccacccaccccctcacccccttctttttccgtccttggaaaatggtgtccaagctcacgtcgctccagcaagaactcctgagcgccctgctgagctccggggtcaccaaggaggtgctggttcaggccttggaggagttgctgccatccccgaacttcggggtgaagctggagacgctgcccctgtcccctggcagcggggccgagcccgacaccaagccggtcttccatactctcaccaacggccacgccaagggccgcttgtccggcgacgagggctccgaggacggcgacgactatgacacacctcccatcctcaaggagctgcaggcgctcaacaccgaggaggcggcggagcagcgggcggaggtggaccggatgctcagtgaggacccttggagggctgctaaaatgatcaagggttacatgcagcaacacaacatcccccagagggaggtggtcgatgtcaccggcctgaaccagtcgcacctctcccagcatctcaacaagggcacccctatgaagacccagaagcgtgccgctctgtacacctggtacgtcagaaagcaacgagagatcctccgacaattcaaccagacagtccagagttctggaaatatgacagacaaaagcagtcaggatcagctgctgtttctctttccagagttcagtcaacagagccatgggcctgggcagtccgatgatgcctgctctgagcccaccaacaagaagatgcgccgcaaccggatcaaatgggggcccgcgtcccagcaaatcttgtaccaggcctacgatcggcaaaagaaccccaccaaggaagagagagaggccttagtggaggaatgcaacagggcagaatgtttgcagcgaggggtgtccccctccaaagcccacggcctgggctccaacttggtcactgaggtccgtgtctacaactggtttgcaaaccgcaggaaggaggaggcattccggcaaaagctggccatggacgcctatagctccaaccagactcacagcctgaaccctctgctctcccacggctccccccaccaccagcccagctcctctcctccaaacaagctgtcaggagtgcgctacagccagcagggaaacaatgagatcacttcctcctcaacaatcagtcaccatggcaacagcgccatggtgaccagccagtcggttttacagcaagtctccccagccagcctggacccaggccacaatctcctctcacctgatggtaaaatgatctcagtctcaggaggaggtttgcccccagtcagcaccttgacgaatatccacagcctctcccaccataatccccagcaatctcaaaacctcatcatgacacccctctctggagtcatggcaattgcacaaagcctcaacacctcccaagcacagagtgtccctgtcatcaacagtgtggccggcagcctggcagccctgcagcccgtccagttctcccagcagctgcacagccctcaccagcagcccctcatgcagcagagcccaggcagccacatggcccagcagcccttcatggcagctgtgactcagctgcagaactcacacatgtacgcacacaagcaggaacccccccagtattcccacacctcccggtttccatctgcaatggtggtcacagataccagcagcatcagtacactcaccaacatgtcttcaagtaaacagtgtcctctacaagcctggtgatgcccacacaccacttacttcgtgcgcaacaacaaggaccctgtttgccacaccatcaccctctgggcagctgtcatggaaaagcccagtgacctgacaggcacctgcgagaggtccctgcttacctgacggacgtcctgctggcacctcagacaatccactctcaggaggcgcagcccgaagcccagtttcccttctatgcagtattgccacaatgcctctcccacgatgtcaaggactcctgtctgtcctggaggtgggagacaaggaaccaccgaagaggaagcaagaaagccgtactgtctatgttgtgatccttcatcgaacaaactgatgcgaaaacttgaatctgttactgaaatgaggagagaaggacatgtgctattgaactgagccaaacacactgtaaatatccacagactccctcccctgcccccatcccaaatgatcttgagatttcttttaaagaagtaaatttgtccaatggctgtaaactataaactactgtaattaagtgcaatttcccctctgtgtcctctcccctctgccctgtatataatactaaagtgtctattagttttctttgtaaaggtcagagtcaaaatttcaaaagtgatctgtcccctctcccctcatggagaaacatcctaagtgggaagtgaagccccttgtcctctcccgcgggcctggacacttatggggacagcataccttggactgactaccagctaactccagtctcctgacattaagacacacctctggatccctggggggggttgaatgtagtgtgtcatgattaacatgccagcttcctgtgggccaggagctcagccgtgcactccctaagaaaccccagggcagggaaactggctgtttgatagcagaagaaaaagttgcagtctcagaaagccttccattaaaacaatttattttatcactaaaaaaaaaa

SEQ ID NO: 88044 - DNA, 1703 bp, Homo sapiens
cgcgccccggatggatgtgcccggcccggtgtctcggcgggcggcggcggcggcggccactgtgctcctgcggaccgctcgggtccgtcgcgaatgctggttcttgccgaccgcgctgctctgcgcctacggcttcttcgccagcctcaggccgtccgagcccttcctgaccccgtacctgctggggccggacaagaacctgaccgagagggaggtcttcaatgaaatttatccagtatggacttactcttacctggtgctactgtttcctgtgttccttgccacagactacctccgttataaacctgttgttctactgcaggggctcagccttattgttacatggtttatgctgctctatgcccagggactgctggccattcaatttctagaatttttttatggcatcgccacagccactgaaattgcctattactcttatatctacagtgtggtggacctgggcatgtaccagaaagtcacaagttactgtcgaagtgccactttggtgggctttacagtgggctctgtcctagggcaaatccttgtctcagtggcaggctggtcgctgttcagcctgaatgtcatctctcttacctgtgtttcagtggcttttgctgtggcctggtttttacctatgccacagaagagcctcttctttcaccacattccttctacctgccagagagtgaatggcatcaaggtacaaaatggtggcattgttactgacaccccagcttctaaccaccttcctggctgggaggacattgagtcaaaaatccctctaaatatggaggagcctcccgtggaggaaccggaacccaagccagaccgtctccttgtattgaaagtactatggaatgatttcctgatgtgctactcctctcgccctcttctctgctggtctgtgtggtgggccctctctacctgtggctattttcaagttgtgaactacacacagggcctgtgggagaaagtgatgccttctcgctatgctgctatctataatggtggcgtgcaggccgtttcaaccttactgggtgctgttgctgtgtttgcagttggttatataaaaatatcctggtcaacttggggagaaatgacattatctctcttttctctcctgattgctgctgcagtgtatatcatggacactgtgggtaacatttgggtgtgctatgcatcctatgttgtcttcagaatcatctacatgttactcatcacgatagcaacttttcaaattgctgcaaacctcagcatggaacgctatgccctagtatttggtgtaaataccttcattgccctggcactgcagacgctgctcactctaattgtggtagatgccagtggccttggattagaaattaccactcagtttttgatctatgccagttattttgcactcatcgctgtggttttcctggccagtggtgcagtcagtgttatgaagaaatgtagaaagctggaagatccacaatcaagttctcaagtaaccacttcataatatactgctgaagggcttcttcttatagcaagaactctgcacagcaactgcctggatgtatttgattttttaaagcgtagacatatatttatgaatgtgcatttcttgacttcacagcagccacttggactaataccttgtgttccgggaataacatggatactattcagaggagccagaagtaaagtttatttcatgg

SEQ ID NO: 88045 - DNA, 430 bp, Homo sapiens
tgacagtccagagtggtgaacagccctaccagatggctgcacgatgccatgcttttgacaaacactggatagagtgtgctcattgactcgattatactcgggcatagattgagcgtactatacattatgaggatcatacaaagtgttcgctttggctcagaacgatgagacgtgcagctaccatccggaagctacgcaattgcttgatacaggagggtaagtactcccctacacctcaccacattggtactggggagcctcagccctgagcacagcaactgctgatgtgtgtaggctgattatactgttctctgttctccactggaaaggctggataccacggaccttcttgtcgaagagtgtgaaaataaccgattgctccgtcctgactccattgactcgaacgactctgatgatgtagatgacactg

SEQ ID NO: 88046 - DNA, 2061 bp, Homo sapiens
aacaaaacacaaaactcacattgatgggggtatgtcaaaggcgggaacaggagataacggaaagagttcccaatggtcaaagctgggataatttgagcaacaaaataaagtagtattaaattgtaacccaaagtataaaatattcatgtgtccacactgataaacataaatgatcgaactaataaagcgaaagggacaactgtccctcgcagaagaatttcaattaattatgtagaccactcccaagaaagtacactacaactccccattcctttagtgtgggctgtgcatagtgatttccttccaaagagcacagtatgaaatgggggaaaagagtaactttacaatggagaaacctgacaaacactccttcagccaggtgatcaggtcgtcaacatcaacatcaataacagtcataaccttttatttcatgtcataaaatggtgacacttacttgtgttaaaaaaatttaataacaatgtaatcattatatctctgcaatcagctgaagttctaagaaaaaatgacaatgttgaaagttgtatcatcattattataaactttcatgttcagtatatgtaaactccaaagccaatttcaaaagacatttttgtgaaataccattctttaaaaaaaaggatattatatataactgtatgaatgttaaatgttttacagtaccgatttgctacattttatgtatgctgtaaaacaaataccattttaaagtatattggaattcgtaactaaagtaataaataaatgcttgaaatatacccagtagaaacttatttttattatccaatccttttgataagaaatgcctctagtgttatgtacaaacttgatcttctttgaaatgtgttgtccactgcttttctgtttctgtcacagtagctataaacagctgtttaaggatatccttatctaaatttctgccaaggaggaccaatcgatttgttctctcagtgtcatccttccagctcactggagtctcctccagatcatagagctcatggacaccctggacaatcacttgttgtgatttgtctttgattgacaccaatcccttcagccttatgacctccatgcagtgattgtccttgtttctcacattcttttcccacagaagattctgaataaacatattaagatgttcttcctttgcatttcctggtacgtcaaatgtgattgtaacaatactctgatcaaggtgaggttgtgttcctggcacatgctgaagttttttctgcaaacttattccagagagactatcaaaggcatgaagatctaatacattagagagatcaactcttgatctttgtgtttctaagatttgtcctagtccatttatggatctaattgtcgttcttaatttctttacatcttcttctggaaccaagtctgttttattaatgagaatggcatctgccaaagcaacttgcctagtagcttcattgataaggccatcaggtttctcttctgctaaatgttttaatccatattttgaatccactatagttatgataccatcaaggtaaatatcactccctaattcagcatcaacccaaaacatagaagccactgcacctgggtctgccaatccagtggtctctaacagtatgtaatcaaatttccccttcttttgcatcaaattctcaatagctctaaggccattgtccttcactgaacagcagaggcaaccgtttctaagttccagccactcttcatagagctctccaccttggctgacagctaaggatttctccagcgcacttccttccccaaattcatttaaaatgaccgctactcttttactatgttgctctgtcaaaatatagttcagaagtgttgtcttcccagcacctaaatacccggtgataattgtgactgggatcttggcgccgaggccagacttttcctcctcctcgctttgcgtcgtctccatgggaaccaattcaggacaatcctcctccgcaggatcctcctcctcatccgcagatccaacagccggtaacattccggcctacagcacgtccctacctcagctgaaccgctggg

SEQ ID NO: 88047 - DNA, 422 bp, Homo sapiens; identical to SEQ ID NO: 67835

SEQ ID NO: 88048 - DNA, 1373 bp, Homo sapiens
aaaagcaagccaggaggtgcttgcggccgcttctagtagtttccaggcgctgccgggcggctggcactaagcggtcctgaggctgtggctacggctgctccggagctggtggcgccgcgataggagagccgatggccaagtggggtgagggagacccacgctggatcgtggaggagcgggcggacgccaccaacgtcaacaactggcactggacggagagagatgcttcaaattggtccacggataagctgaaaacactgttcttggcagtgcaggttcaaaatgaagaaggcaagtgtgaggtgacggaagtgagtaagcttgatggagaggcatccattaacaatcgcaaagggaaacttatcttcttttatgaatggagcgtcaaactaaactggacaggtacttctaagtcaggagtacagtacaaaggacatgtggagatccccaatttgtctgatgaaaacagcgtggatgaagtggagattagtgtgagccttgccaaagatgagcctgacacaaatctcgtggccttaatgaaggaagaaggggtgaaacttctaagagaagcaatgggaatttacatcagcaccctcaaaacagagttcacccagggcatgatcttacctacaatgaatggagagtcagtagacccagtggggcagccagcactgaaaactgaggagcgcaaggctaagcctgctccttcaaaaacccaggccagacctgttggagtcaaaatccccacttgtaagatcactcttaaggaaaccttcctgacgtcaccagaggagctctatagagtgtttaccacccaagagctggtgcaggcctttacccatgctcctgcaacattagaagcagacagaggtggaaagttccacatggtagatggcaacgtctctggggaatttactgatctggtccctgagaaacatattgtgatgaagtggaggtttaaatcttggccagagggacactttgccaccatcaccttgaccttcatcgacaagaacggagagactgagctgtgcatggaaggtcgaggcatccctgctcctgaggaagagcggacgcgacagggctggcagcggtactactttgagggcattaaacagacctttggctatggcgcacgcttattttagggccagcggcaggggactccagcctgctggacacttcagtccagctctctcctgactggggcttgcgactcacaggattgcatcgtcccagctgctaacttggggccggggcccctcccttccacatataccttgggtttgtgcatgttttctgctgggtgggttcagagggcaatttctcttttatgtgtacatatgctaaataaacataatttaaaaaaaaaa

SEQ ID NO: 88049 - DNA, 886 bp, Homo sapiens
gactctccagctggcagcatcagtgcccttctttgccatctccctgatatcctggtggctgccagaatccgcccggtggctgattattaagggcaaaccagaccaagcacttcaggagctcagaaaggtggccaggataaatggccacaaggaggccaagaacctgaccatagaggtgctgatgtccagcgtgaaggaggaggtggcctctgcaaaggagccgcggtcggtgctggacctgttctgcgtgcccgtgctccgctggaggagctgcgccatgctggtggtgaatttctctctattgatctcctactatgggctggtcttcgacctgcagagcctgggccgtgacatcttcctcctccaggccctcttcggggccgtggacttcctgggccgggccaccactgccctcttgctcagtttccttggccgccgcaccatccaggcgggttcccaggccatggccggcctcgccattctagccaacatgctggtgccgcaagatttgcagaccctgcgtgtggtctttgctgtgctgggaaagggatgttttgggataagcctaacctgcctcaccatctacaaggctgaactctttccaacgccagtgcggatgacagcagatggcattctgcatacagtgggccggctgggggctatgatgggtcccctgatcctgatgagccgccaagccctgcccctgctgcctcctctcctctatggcgttatctccattgcttccagcctggttgtgctgttcttcctcccggagacccagggacttccgctccctgacactatccaggacctggagagccagaaatcaacagcagcccagggcaaccggcaagaggccgtcactgtggaaagtacctcgctctag

SEQ ID NO: 88050 - DNA, 410 bp, Homo sapiens
  misc_feature (1)...(410): n = a,t,c or g
atcaaaaataattatttgcactagataaccatgaatnnnngcagcagaacagaaaaaatccttgcactaagaaaaccaaaactagaggggggaagctgggcatggatatacgtgagcgcggccatgattttataccagcttcaggctgatgcaatcatcgcttttggagaatcactacaaaaaaaacttctggacattgaaggaaaatatccaaatgttcgggggcgatatagtttcatacacgctctcgccaaacatatccgcggcctctagaagatatcattgaactgagagcccgtgcttatgctcttctatgagaggagatgaannggaggaatgnccccattttatagattagtttctttctaaattatgaccaaaaatattttgctatttctttctttgtatat

SEQ ID NO: 88051 - DNA, 339 bp, Homo sapiens
cccacgcgtccgcccacgcgtccggccagcaatccttctaccattacactctttctcccaatattatctgcattggccgaagccattcatgtgaaccctctttatattctgataccttctactctgtgtacttcatttgcattcctcctaccagtagcaaatccacccaatgctattgtcttttcatatggtcatctgaaagtcattgacatggttaaagctggacttggtgtcaacattgatggtgttgctgtggttatgcttggcatatgtacttggattgtacccatgtttgacctctacacttacccttcgtgggctcctgctatgagtaatgag

SEQ ID NO: 88052 - DNA, 1287 bp, Homo sapiens
ttttttttttttaacagttaagatttttgtttaaatttattttttgaactggtaataattttacatgtttcaaaattccaaaaatataaaatgataaagagtgaaaattattcctcatcactgtcctcccaattcttctggccaaccagtatgccacttttaccctttcagagattatgtgtgtacatataaacaaatgtttcttatttatttatttatttttgagatggagtttcgctcttgttgcccaagctgggagtgcaatgggcacaatattgggctcactggcaacctccacttcctgggttcaagcgattctcctgccttagcctacggagtagctgggattagaagtgtgcaccaccacacccagcttttgtatttttagtagagatggggtttcaccgtgttggtcaggctggtcttgaactccggacctcaggtgatccacccgcctcggcctcccaaagtgctgggattacaggcgtgagtcaccttgcctagcctgtttcttctttacataaatggaaacatactctacagtttgacaccttgcttttatctacttaactatcttagagctctttctcacattagtatagtttgaggatccctaattcaaaaatctgaaatctgaaacacttctggtcctgagcattttggataagggatactcaacctgtatataaagagtcttcatttttaaggctatgatctccattcccccataaatgtacttagccagttccccatggtggacatggagggttgtttccaaattctgacttttaaaatcaatagcataatgaaaaccatgtacaaacagtctgcacacatacaaatatatgtgtaggatttattcccagcaagtttgcttagacaaagggtttatgtatgtgtaatttagatagtggctgataaactgccctccacagaagttgtatcaattcacattcccactgtaaatgtataagaacccctccaatgccccctttgagaaaactcaaggctggtaaaatactgggtggagagcacattgttacaatcctcctgaaagttaatttaaagagctacatgaaattcatagaagaaaatcctcaaaatagagtaagcacatgttacaagacaactagaagggattccaaatttctaaacacaagataactatacacatatatattcctctgtgtgtatgtaaaatttagtgtacactatgtatgtgtagacacacgtgtatattttaagaaaaagctgcaaggaaaattagtaaaatcctattggtaagga

SEQ ID NO: 88053 - DNA, 442 bp, Homo sapiens
ttttttttttttgagacggagtttcgcttttgtcgcccaggctggagtgcaatggtgtgatcttggctcaccgcaacctctgcctcctgggttcaagtgattctcctgcctcagcctcccaagtagctgggattacaggcatgcaccaccaccatgccccagctaatttttgtatttttagtagagacagggtttcaccatgttggccaggctggtcttgaactcctgacctcatgatctgcccacctcgccctctcaaagtgctgagattaaaggcgtgagccaccggtgcccggcctctttttatttattcctaaaatattaccttgaggccaaattctgcgcttaaggagaatgtgcaccaagtgctggggtgggggctggttataaacgaggccacaaatcatgcttgttaataaattgtgtggttcaaatctgaaaa

SEQ ID NO: 88054 - DNA, 2581 bp, Homo sapiens
tgaactccccagcttgtacgagggcggcagtggtcagcgctatcgcaggcatcgctctggtgcagcaccagcagggcctcgctaacccagggctggtgggcttgtcgctgtcttatgccctgtccctgacgggcctgctctcgggcctggtgagcagcttcacacagacagaggccatgctggtgagcgtcgagcggctggaagagtacacctgtgacctgccccaggaaccccagggccagccactgcagctgggcaccggctggctgacccaggggggcgtggagttccaggacgtggtgttggcgtaccggccagggctgccgaatgccctggatggagtgaccttctgcgtgcagcctggagagaagttgggcatcgtgggccgcacaggctccggcaagtcttccctgttgttggtgctcttccggctgctagagcccagttcagggcgagtgctgctggacggcgtggacaccagccagctggagctggcccagctcagatcccagttggctatcatcccccaggagccctttttgttcagtgggactgttcgggaaaacctggacccccagggcctacataaggacagggccttgtggcaggccctgaagcagtgccacctgagtgaggtgattacatccatgggtggtctggatggtgagctgggtgaggggggccggagcttatctcttgggcagaggcagctgttgtgtttggccagggctctcctcacagatgccaagatcctgtgtatcgatgaggccacagcaagtgtggaccagaagacagaccagctgctccagcagaccatctgcaaacgctttgccaacaagacagtgctgaccattgcccataggctcaacacgatcctgaactcagaccgggtgctggtgctacaagcggggagagtggtagagctggactccccggccaccctgcgcaaccagccccactccctgttccagcagctgctgcagagcagccagcagggagtccctgcctcactcggaggtccctgagcccaatcccacaccctgcagagttctcccctctctctgatccaggccgggcctatacagaggtgctggctgcttgtttacattcttctctggggctctacctctccacacttccccagaagggaaaagggcaccctggattactctttggaaatcactccttggtgggcagcatcctgaggcttccccagaaccaggcctctgctctggccctcttgcatctggaacgccaggtgggtttttctggcataggagcccacttgcattttcatagttttatttgataaaattccatcttacattctgtgtattaaaaaaataatatttctggtgtgaggctgaggtctcctctgtgtgtgtacccaagctgaagggtggggagaacggaccactccagtctgaggggtggaagaggtgaggaagggggccagaaagcccccacctccatcacagtgctgtggtctttccaggctcagggggcaagtcacggggcagggggagccctgctggcagcatgctaacctgacactcctggtcctggcacgctggagcatagtgtggggcagggtagcaacagggtccaggggggcagacaccccggcgccaggccctcagggtcagcaacacagtagccagaaccagggcagcagtgagggccccaaacaccaccagggccaccaagctaggctcacctagcccagcctcttgcctccgcaccacctccttcactgagatccgcagcagaccagcccctgcgctgtggggggctggccccgtggcaggtaccactacagctgaggtgggccctagaggggtgtccactgtggttggggggtctgggacaggtaagacaagctcacaggtcttgccaccatagccactggggcagaggcagtcgaagtcgtggacacggtcccgacagcgggcccctctctggcatgggcggctggcacagtcatccaggttgatggtgcagaagcgtccagcaaagccctcaggacagaggcaggagaagcggtttatgccgtcaaggcaggtggcaccgttagcacaaggccgcatcagacagtcatccacatttacctcacagcgggcacccacaaaagcccaccaagcagcggcacgtgaagttgagagcaaagccctggtcgtcctggcactgcccgccattgcggcatggggagcctgcctgttcacagggtccagccttgcgctcgcagtcacgcccatggaagcctttgtcacagaacttgcctgcccagccactgtggcagatgcactgccatggctggtggcaggtaccgtgctggcagccaggcatcctcacacagcgctcacagtgcagcccctcccagcccgggtcacacctgcaggagccgtcaggtgcacagcagccgtgggccaggtcacagtgggagctgcagtcatcggctcggacaggctgaccgggagcccccagaatgcacaacaggcacacgagatgcaggcagcggcagccgctgggcatggtcagcgccggccccaggagggacggacggatggacggccggacgcgt

SEQ ID NO: 88055 - DNA, 563 bp, Homo sapiens
aattgaacgccatagatagccgtgcggaactgccgcgtcgacccacgcgtacgatcgaagagctaagtgccgccaacaacagcaacaacagcagaatggaggtcaaaacaaagtgagacctgccaaaaagaagacatctccagctcgggaagtgagttcagagagtggaacaagtggccaattcactcccccctctagcacctcagtcccgaccattgccagcagcagtgctcctgtgtctatctggagcccagcttccatctccccactgtcagatcccttgtccacctcctcttcctgcatgcagaggtcctatcccatgacctatactcaggcttcaggttatagtcaaggatatgctggctcaacttcctactttgggggcatggactgtggatcatatttgacccctatgcatcaccagcttcccggaccaggggccacactcagtcccatgggtaccaatgcagtcaccagccatctcaatcagtccccagcttctctttccacccagggatatggagcttcaaagctttggggttttaacttcaaccactgattgg

SEQ ID NO: 88056 - DNA, 1316 bp, Homo sapiens
ttttttttttttctttaaaagcaatttatttctgattacaaaatacaggtgaggagcatgggcgatgcctgtaaccccttggttgtgcatcttcccagtctatttctgcttctagaaataccctgtgtacaacagcaagctcatgctgtccccaagtgcttgcacattctaacagctgcagagtatatgaccaggtggaaagtccaacagatgccccactcacaagatagggccctccaatcagtcttctggctccctttcactcatagtaactggttgctcttcctattggtcatagataaatgacacctgcacaattctccgagtgctttcaagcaacttcgggaggcagtgactaagaccctttccttgctcccagcttcctatgtcccagggctgcctgtggcacctggactgctgctgcccctgggtcccgtacattccagggcaacaatggaggaagggcaggcaacgcatgaggaattaacagtctttattgggctcagaccaggagtccgtgggtcttgaggacctctgtgtatttgtcaattttcttctccacgttcttctcggcctgtttccgtagcctcatgagctgtttcttcttccggtagtggatcttggctttctctttcctcttctcctccagggtggctgtcactgcctggtacttccagccaacctcgtgagccaggcgccccagataggcaaactttcttgtaggcttcagacgcacgaccttgagggcagcaggaaccaccatccgctttttcttgtcgtagggcggtgggatgccgtcaaacaccttgagacggtccagagcggcctggcctcgcttggttttgtggggcagcatacctcgcacggtccgccagaagatgcggctgggggcccggaagtggtaggggcctcgggaagggttggtgttcatccgcttgcggaggaaagccaggtacttcaacttgtttctgtagaaattgccagaaatgttgatgccttcacagcgtacgaccaccaccttccggcccagcagtacctgtttagccacgatggccgccaggcggcccaggagatggcctcgaccatcaagcaccaggacctgcacctccgccatcttcggcagccgcttgggaaaggcttttcttctctgaaaagacccctcttgctggcagcttggctctcgacacttgctggtagtgacagtaatcatgtcagtggtccagtcagcagcctggccatgcagggagcacccagctggcaaggaactaagcgggggcctccagctgacaaccagtgagaggtctggacactcagtc

SEQ ID NO: 88057 - DNA, 119 bp, Homo sapiens
ggggttttttttttttttttttttttttttttttttttttttttttttttgttctaaaaaaaattaaacctttttattagtatatttattttatatataaaagaaatacaaaaaaaaaa

SEQ ID NO: 88058 - DNA, 1408 bp, Homo sapiens
gatagatgcaccatctatgaccatcattacgccagcttggcacgaggggggagaagccgggaggactgggtgcgcctgcagggatcggaagccggttggggtgtgagaggttttctcgctctagggagattcttcaagcaatcactatgtcaacagacacaggtgtttcccttccttcatatgaggaagatcagggatcaaaactcattcgaaaagctaaagaggcaccattcgtacccgttggaatagcgggttttgcagcaattgttgcatatggattatataaactgaagagcaggggaaatactaaaatgtccattcatctgatccacatgcgtgtggcagcccaaggctttgttgtaggagcaatgactgttggtatgggctattccatgtatcgggaattctgggcaaaacctaagccttagaagaagagatgctgtcttggtcttgttggaggagcttgctttagttagatgtcttattattaaagttacctattattgttggaaataaactaatttgtatgggtttagatggtaacatggcattttgaatattggcttcctttcttgcaggcttgatttgcttggtgaccgaattactagtgactagtttactaactaggtcattcaaggaagtcaagttaacttaaacatgtcacctaaatgcacttgatggtgttgaaatgtccaccttcttaaatttttaagatgaacttagttctaaagaagataacaggccaatcctgaaggtactccctgtttgctgcagaatgtcagatattttggatgttgcataagagtcctatttgccccagttaattcaacttttgtctgcctgttttgtggactggctggctctgttagaactctgtccaaaaagtgcatggaatataacttgtaaagcttcccacaattgacaatatatatgcatgtgtttaaaccaaatccagaaagcttaaacaatagagctgcataatagtatttattaaagaatcacaactgtaaacatgagaataacttaaggattctagtttagttttttgtaattgcaaattatatttttgctgctgatatattagaataatttttaaatgtcatcttgaaatagaaatatgtattttaagcactcacgcaaaggtaaatgaacacgttttaaatgtgtgtgttgctaattttttccataagaattgtaaacattgaactgaacaaattacctataatggatttggttaatgacttatgagcaagctggtttggccagacagtatacccaaacttttatataatatacagaaggctatcacacttgtgaaattctcttgtctaatctgaatttgcattccatggtgttaacatggtatatgtattgttattaaagtaagtgacccatgtcaaaaaaaaaa

SEQ ID NO: 88059 - DNA, 447 bp, Homo sapiens
  misc_feature (1)...(447): n = a,t,c or g
gganacggatggannaacannaganattgatacgcttgcggtaccggctggatatccttcgggtcgacccacgcgtccggtctcctcaacaccttgtagtacagtcagtctgctctgatatagatcctattctatctctgaagttcgtttctttctctttctctagggagattctgggggccgcttggcctgtgaatataatgacacatgggtccaggtagggattgtgagctggggcatcggctgtggtcgctgagggttgcctggagtttatacagaaattggggtctacagtaagtggctgattgcagtggtggatcaggctacctgtttgtatccagcagtgttcctcatcttagtcctgcatttggtgctgcccctgggcatcctggtggcccagtgatcaccccagcccactccccttttgtttctgagtctcatactagg

SEQ ID NO: 88060 - DNA, 424 bp, Homo sapiens
cggacgcgtgggtgcagatatggatctggagtggcgacatggaagtggggcaaggatgatcttgcaggatgaagacatcaccaccaagattgagaatgattggaagcgactgaacacactggcccactaccaggtgccagatggttccgtggtggcattagtgtccaagcaggtgacagcctataacgcagtgaacaactccaccgtctccaggacctcagcaagtaaatatgaaaacatgatccggtacacgggcagccccgacagcctccgctcacggacacctatgatcactcctgacctggagagtggagtcaagatgtggcacctagtgaagaaccacgagcacggagaccagaaggagggggaccgtgggagcaagatggtgtctgaaatctacctgacccgactcctggccactaag

SEQ ID NO: 88061 - DNA, 426 bp, Homo sapiens
  misc_feature (1)...(426): n = a,t,c or g
tacaagcctttttaggcatcgaaaaacgcactgtgagaaaccttatgaatgggataagtgtggaaaggccactggggagaaaccttattcctgtaattggtgtattaaaagtttcagttggagctcagaccttattaaacaccaaagagtccacactggtgaaaaaccttataaatgtgatgagtgtgggaaagccttcagtcagagctcagatcttattatacatcagagaatccatataggagaaaaaccctatcaatgccgtcattgtagtaaaagttttagccagcgctcagatctggttaaacatcagagaatccatactggagagaagccttatacttgtaaccagtgtaacaaacattttagtcagagttctgatgtgataaaacatcaaagaatccacactggggagaaaccatatan

SEQ ID NO: 88062 - DNA, 387 bp, Homo sapiens
  misc_feature (1)...(387): n = a,t,c or g
gctttcttcacagccccagaacctgggctttggcagaggtccggacactgtttgtcagcggcctccctgtggacattaaacccagagaactctacttgctcttccggccgttcaaggggtatgaagggtccctgatcaagctcactgcaagacagcctgttggttttgtgatctttgacagccgtgcaggagcagaagcggccaagaatgcgctgaacggtattcgctttgatcccgaaaatccacagactctgaggctagagtttgccaaagccaacaccaagatggccaagagcaagctaatggcaactccaaatcccagcaacgtgcaccccgccctaggagcacacttcatcgcacgggacccctatgacctgatggnggctg

SEQ ID NO: 88063 - DNA, 399 bp, Homo sapiens
aacaaacaaaaaaaaccgggggatgattatacacttatcatatctgggtacaccagctctaaccaggggggtgctacatacatatactgtacttgcttagatgcacatacatttataccgacacatgggaaccttgtgcaggcacgatcctttgggtggtatccaggtgcgggccctacacaattcgggacctacgctgtcgcctactatacaaaccattgggggcagaaattgcccaatggcgtggcccccgccccagttttgaagaaccagccaccccagattgctcccaagagggagcgtaagacgatccgaattcgagatccaaaccaaggaggaaaggatatcacagaggagatcatgtctggggcccgcactgcctccacacccacccctccc

SEQ ID NO: 88064 - DNA, 544 bp, Homo sapiens
  misc_feature (1)...(544): n = a,t,c or g
gcgtcactcatcacactcgaactttgcaatcatctctgctgctacacaaatttctgaaacttatatgacatcattggcaanacgcagaacaagattgaaccctattgataccctcggaaacgcgccggaatccgggtcgacccacgcgtcgcaatttctaaaacaacagcaacaatgacaaatatgttttctttttaacattacatggtgtcattcaatgtaattcattgaattaatttaattcatttaattgcaaagatttaattacaaagatgatgagagtgagtggctaagagaggagaaaataagctccattctctcttgagactttaataatccatttatttatttctcttctggaaggcaacttgtgatgatgtcttaggaaactagaggaaaaagagtagcaatgcagttaattcttcatctttttaatttatcatttataataataaagagcttgtttattgggaatatttttaaagtctacatgagaagcataaggccatggacaacatttcttattcaaatgttacaggtaatg

SEQ ID NO: 88065 - DNA, 584 bp, Homo sapiens
tttttttaggactgaggagtgggttttattgtccttcagagctctttatagctgtcccctctgtcatcactccctggatgtgtggggcatggttccttccctgggaaggctaagttcagttctgttttttattctatgagaacaagtcacagctgcagctgggccccatgctctgccccaagcccccaaccccgcggtgctccggcggcttcctgtccactctcggggcccttggggcctggcttgctccagggtcttgggctactggcagctcctctccttgggctcctggctgccaggcgttggtgccacttcttaaaggcccatcttcctgctgctgtaactgctgagccactcgcagtcgcaggatccgctgccaccacgtctgccaggcccatctcaggtgccactccctgagcagggtccgcaccagctgctctgccccttgggcatccacccagtgctgccatgccactgccaggcacctggcctgctgggaaccccgcagcccgtgaagcagtgcctcgaggcaccggcgctgcaggtacttcctccgtagcctccgtttatgggccttgctttgg

SEQ ID NO: 88066 - DNA, 648 bp, Homo sapiens
tctggttctaggtgcttcaggagctgtggcttaaggtgcagacatggccaagtccaagaaccacaccacacacaaccagtcccgaaaatggcacagaaatgtcatcaagaaacccctatcacaaagatacaaatctcttaagggggtggaccccaagttcctggggaacatgtgctttaccaagaagcacaagaagaagggcctaaagaagatgcaggccgacagtgccaaggccgtgagtacatgtgccaaggctatcgaggccctcgtaaagcccaaagaggttaagcccaagatcccaaagggtgtcagctgtgagctcaattgacttgcctacattgcctaccccaaattttggacgtgtgcttgtgcctgcattgccaaagggctcaggctgtgccagccaaaggccaaggcccaggaccaaaccaaggcccaggtccaaatcaaggcccaggctgcagctccagcttcagttccaactcaggctcccaaaggtgcccaggcccctacaaaggcttcagggtagagatctctgtctgccaatatgaggacagaaggactggggtgaccccctgggctgccgtctgcatggggctggtgtcctcctgtgctatttgtacaaataaacctgaggcaggattcgtt

SEQ ID NO: 88067 - DNA, 888 bp, Homo sapiens
gaaaggcgaggctctgcatctagatttacctcgttctcttttgtctccgcttttttttcacatttccttgcgaccctggcccttgagcgacaaaaaggggaagccaaggctggcccgaggaacggagagggcacatggcctagccacaagtggagcttctgctccgcccgaagggatgcgctggagcggcctcttccttctgccacggtctttctttgccaactagtaggtgagggccgaaaggccgcgggccgtggagctcgggccggggagactcttttctagcctcttgggtcccgctcctcccaattccctggagaggcgtcgagcttgctgggaagtgccctcgggtaaggggcgcggagcctcctgcggcgatcctctgtcttcgggtcgccttagcaggacgcggcaagcgggacactgacctggtcggagtcccgcgttctctcaccagctgctttgtccacgagttgctgctgggcgtcaggggtcccacggcccggagggatctagagcagggggggctcggggtcctttccataccctcggatcctctcccactctctccacgcctcgacccggagatgatttcaggctccagatctctttcataaatggaaagagtttttttggtttgttttgtcttaattatgtaggtgttgcacgcttggaagagaaaatttagaaaattaattggaaaaccataaagatagcctttctcgtgatagccacaaggcttgctccctcattctgctcatatgtcaccccctcaaggaggccttccccagctctgtaaacaacctgtgctcggcgttaacttttctccctaatgtttattactacctgacatatacgtgtttcctgcgtcgacggccgcgatagtag

SEQ ID NO: 88068 - DNA, 469 bp, Homo sapiens
  misc_feature (1)...(469): n = a,t,c or g
catcgtagtgcactagcgcagngncgnggaattcggccaccgttgagagaatactgtaggagcacgggttgactcctggggtcaggaacgcctttaccacatcccagtctcatgaagaactgcacaaatctgacatttgtaaacgttactgaagactttcacttccaaaagaaatccacatgcttaacaacagacaagcacatggggtaatgcaggggaacgaaaggcctcaataaatatggcgatttaatgagtgtccaaagcaatcacttcaaagtctgatttccctttttaatcagaaagggagttaattaaatgtgaagtctgaaaaaaggcaattctgcacccatatttgtgtctagtgactctcctcagaggagagcctgagggacctgagtgttccccacaccctttggctcttctataaaaagatgggagggatctaaaggcggtttgagtgtgggagtgg

SEQ ID NO: 88069 - DNA, 445 bp, Homo sapiens
  misc_feature (1)...(445): n = a,t,c or g
agaggaatttgactcctgtcgtccagacnggccgaannnggacgaggctgcgatcttgctacaggagatcggggtgctggaccagcggaagtaccttactaccctggtgcagcgcccggctcacatgtccaccgacccccggttggccaaggccattgtgttggctgccatcttacgttgcctgcacccactactggtggtcgatttatgcctcacccgggaccccttcagcagcagcctacagaaccgggcataggtggacaaggtcattcctgtctccttcctggagccgcccacccactgctgatctgagggggcgttgtctaacccctgcctgtgatccggctgccctcttctcccctaccaggtgaaagcactgttgagccatgacagcggcagtgaccaccttgcctttgtgctggctgtcgccgtctgagaggaggtg

SEQ ID NO: 88070 - DNA, 491 bp, Homo sapiens
  misc_feature (1)...(491): n = a,t,c or g
tgagcnttnggggggggngggattgagaccaaactgatagtccctnggaattcgcaaaggcaagctctgactctgaggttggaggcagaacagcagcggtgctgtgtcctgcaggaagagcgggatgcagctcgggctgggcaactgagtgagcatcgagagttggagactcttcgggctgccctagaagaagaacggcagacctgggcccagcaagagcaccagcttaaggaacactaccaggcgctgcaggaggagagccaggctcagttggaaagggagaaggagaagagccagagggaagcccaggccgcctgggagacccagcaccagttggcattggtgcagtctgaggtgcggcggctggaaggagagctggatacagctcggagagagagagatgccctgcagctggaaatgagcttggtgcaggcccggtatgaaagccagcggatccagctggagtcggagctggctgtgcagctggagcn

SEQ ID NO: 88071 - DNA, 485 bp, Homo sapiens
  misc_feature (1)...(485): n = a,t,c or g
tggtgggnnnnnaggggnactganaccctatccgctggagggcattcgtcagtgtcactgaagacagaagtgtaaagtgagctttttcttccagactccatgaatttgatgagcaggtggctgctgttcgggaaggaatggcccgcgttgtgcctgttcccctcctctctctgttcaccggctacgaactggagacgatggtatgccgacccccaggtggggctgccctgcagctgccttttgcctgctgacccacaaatcagtgacagcagttagagtcagaaccttgccctgtgtgttgactgaagggagtgcactctgagcgcgtccctccacccgcctgcaggaggctgtgtgtgggcccacccagagcccccagacctttccccaccccaaacaggccttggtgtagagagggagcgtgacggagtcttgcggaaatgccagggtgggaagcatcacgcggccctgacagacatcctccc

SEQ ID NO: 88072 - DNA, 697 bp, Homo sapiens
cagcgtggtggaattcggtcggcagcacagagctctggagatgaagaccctgttcctgggtgtcacgctcggcctggccgctgccctgtccttcaccctggaggaggaggatatcacagggacctggtacgtgaaggccatggtggtcgataaggactttccggaggacaggaggcccaggaaggtgtccccagtgaaggtgacagccctgggcggtgggaagttggaagccacgttcaccttcatgagggaggatcggtgcatccagaagaaaatcctgatgcggaagacggaggagcctggcaaatacagcgcctatgggggcaggaagctcatgtacctgcaggagctgcccaggagggaccactacatcttttactgcaaagaccagcaccatgggggcctgctccacatgggaaagcttgtgggtaggaattctgataccaaccgggaggccctggaagaatttaagaaattggtgcagcgcaagggactctcggaggaggacattttcacgcccctgcagacgggaagctgcgttcccgaacactaggcagcccccgggtctgcacctccagagcccaccctaccaccagacacagagcctggaccacctggacctaccctccagccatgacccttccctgctcccacccacctgactccaaataaagtccttctcccccaaaaaaaaaaa

SEQ ID NO: 88073 - DNA, 431 bp, Homo sapiens
  misc_feature (1)...(431): n = a,t,c or g
nattgangacctctagaccagcgnggnggaattcgttcgggttacactgctttacaccacgcagccttaaatggacataaggacatagttctcaaactacttcagtatgaggcatcaacaaatgtagcagacaacaaagggtattttcctattcacctggctgcctggaaaggagatgtggaaattgtgaagattcttattcatcatggaccatcacattccagggtcaatgaacagaacaatgaaaatgaaactgccctacactgtgcagctcaatatggacactcagaagtagttgctgttctcctagaagagctcactgacccgacaattagaaatagcaagctggaaacacctttggacttggcggcactctacggacggcttagagtggtaaaaatgatcatcagtgcacatcctaacttaatgag

SEQ ID NO: 88074 - DNA, 1699 bp, Homo sapiens; identical to SEQ ID NO: 60030

SEQ ID NO: 88075 - DNA, 445 bp, Homo sapiens
  misc_feature (1)...(445): n = a,t,c or g
gggagtaaggggggcngnnaactgatgcctgacgacnctctaacagcgtggtggaattcctactacgccgctcgaatctatacggctggctgaaatccggtgctcaagctctgatagcacttctatgaggcccgcatgtgatgatctcccatgctccgcgacttgcttgacactcaaacgtgcccctcgaactgacttttgatgatgaagcgaagaacatgcatgctatctcctgagttgacaccgatgtatactgcaccatcaatgcccaggagctgggcgcggcgctgaaggccacgggcaagaacctctcggaggcccagctaaggaaactcatctccgaggttgacagcgacggcgacggcgaaatcagcttccaggagttcctgacggcggcgaagaaggccagggccggcctggaggacctgcaggtcgccttccgcgc

SEQ ID NO: 88076 - DNA, 561 bp, Homo sapiens
ttttttttttttaagaaaattgaagattggggtggtggaggcagtagggagatgggattgggcacctcccccgtgctggggcctggatttttgtaaataaatttcccaagcgtttctttccacctggagggaaagggggggacgcccccagtgagattcaaatcacgcatctctactcctctgcgtgagtgcgtgtgtacatgtgcactccccaccctgctcccttcccagagggattgctgtgaaatttttttggtggcaaataaagataaatttcattctgttcaatattatgattttatttgacccttttattaacccctctcctcttaaaatcctccatgctcccatggcagcggcggaggaggaggaggcaggcaggcagagcccagcgggtgaggacaggcaggcagaggtgagataggccggtgctagccggcctggagctcctctccgctggcagggccaagagtatggccgtagtctcctcacattctcaagctgaggacattccatagctactctgaagctctcctttctcacgtgcagctcgagctgtgt

SEQ ID NO: 88077 - DNA, 1699 bp, Homo sapiens; identical to SEQ ID NO: 60496

SEQ ID NO: 88078 - DNA, 1547 bp, Homo sapiens
tcctctagagcggccgctgcagagtgaaggcgctgcagcgctggtcaccaaggggtgccagcgattggcagcccagggcgcacggcctgaggcccccaaacggaaatgggccgaggatggtggggatgccccttcacccagcaaacggccctgggccaggcaagagaaccaggaggcagagcgggagggtggcatgagctgcagctgcagcagtggcagtggtgaggccagtgctgggctgatggaggaggcgctgccctctgcgcccgagcgcctggccctggactatatcgtgccctgcatgcggtactacggcatctgcgtcaaggacagcttcctgggggcagcactgggcggtcgcgtgctggccgaggtggaggccctcaaacggggtgggcgcctgcgagacgggcagctagtgagccagagggcgatcccgccgcgcagcatccgtggggaccagattgcctgggtggaaggccatgaaccaggctgtcgaagcattggtgccctcatggcccatgtggacgccgtcatccgccactgcgcagggcggctgggcagctatgtcatcaacgggcgcaccaaggccatggtggcgtgttacccaggcaacgggctcgggtacgtaaggcacgttgacaatccccacggcgatgggcgctgcatcacctgtatctattacctgaatcagaactgggacgttaaggtgcatggcggcctgctgcagatcttccctgagggccggcccgtggtagccaacatcgagccactctttgaccggttgctcattttctggtctgaccggcggaacccccacgaggtgaagccagcctatgccaccaggtacgccatcactgtctggtattttgatgccaaggagcgggcagcagccaaagacaagtatcagctagcatcaggacagaaaggtgtccaagtacctgtatcacagccgcctacgcccacctagtggccagtcccagagccgcatggcagacagcttaaatgacttcaggagagccctgggcctgtgctggctgctccttccctgccaccgctgctgcttctgactttgcctctgtcctgcctggtgtggagggctctgtctgttgctgaggaccaaggaggagaagagacctttgctgccccatcatgggggctggggttgtcacctggacagggggcagccgtggaggccaccgttaccaactgaagctgggggcctgggtcctaccctgtctggtcatgaccccattaggtatggagagctgggaggaggcattgtcacttcccaccaggatgcaggacttggggttgaggtgagtcatggcctcttgctggcaatggggtgggaggagtacccccaagtcctctcactcctccagcctggaatgtgaagtgactccccaacccctttggccatggcaggcaccttttggactgggctgccactgcttgggcagagtaaaaggtgccaggaggagcatgggtgtggaagtcctgtcagccaagaaataaaagtttacctcagagctgcaaaaaaaaaa

SEQ ID NO: 88079 - DNA, 1849 bp, Homo sapiens; identical to SEQ ID NO: 59941

SEQ ID NO: 88080 - DNA, 485 bp, Homo sapiens
  misc_feature (1)...(485): n = a,t,c or g
gagacgccgatcgagaccctattcgagngccgggaanncggacaccaccctggagtggcctggggggcagggcaggctctgcagaggagagcactggtgcttccactggatgctggatgggagttagccaagattctctctgcccagatctcaaggtcttggcacatgcggactgggaggcccacatgcttctgtatcctgtgtgcagctgtctgtggggtggtatagagccaactggggtggggtggcacgggggtggggactcaccgaaactgacggcactccccagagaacatgtctctgtggccatccgtggatctgtgagtgcagacctagaagtcactgtgaattttgccaaggacgacatcccaggttataaagctgccactggattcaccatgattgcacctgttattgtcacaggttcagttggctgcactcagtgnngcaggcggagtcaccagggctgcctctgcttgccagga

SEQ ID NO: 88081 - DNA, 2318 bp, Homo sapiens
  misc_feature (1)...(2318): n = a,t,c or g
tgcacggaaccgccgcgacgatccacgcgtacgcctgctgcccttgccagcctgcgcccctacacagactatgtggttgtttcggaccagattctccaggagtccgaggacttctttacgctcatcgagtctcatgaggggaagcccttgaagctgatggtgtataactccaagtcagactcctgccgggaggtgactgtaactcccaacgcagcctggggtggagagggcagtctgggatgtggcattggctatgggtatctacaccggatcccaactcagccccccagctaccacaagaagccacctggcaccccaccaccttctgctctaccacttggtgccccaccacctgatgctctaccacctggacccacccccgaggactctccttccctggagacaggttccaggcagagtgactacatggaggccctgctgcaggcacctggctcctccatggaggatccccttcctgggcctgggagtcccagccacagtgctccagaccctgatggacttccccatttcatggagactcctcttcagcccccacctccagtgcagcgagttatggacccaggcttcctggacgtgtcgggaatttctctcttggacaacagcaatgccagtgtgtggcccagcctgccctcttccacagaactgaccaccacagctgtctcaacctcagggccagaggacatctgctccagcagcagttctcatgagcggggtggtgaggctacatggtctgggtcagagtttgaggtctccttcctggacagcccaggtgcccaagcccaggcggaccacctgcctcagctgactcttcctgacagtctcacctctgcagcctcaccagaagatgggctgtccgccgagctgcttgaagctcaggctgaggaggaaccagcaagcacagagggcctagatactgggacggaggctgaggggctggacagccaggcccagatctctaccacagaataacaccctgggctgtgacaaggcccatgatgacatttcatgaggcccagatgtgggcaggcagcccgggctgcactatgcggtcaggattccttgctgctttggtgggacatgaggcctcagtgggtggtgagagggggccatgggctttgtgggaggatatcttttggccgtgtaccctcaggtccagtgcttggtcctgctctggtcactggggcttcccaggaggcagcagggtctggtcataatccagtgtgaagatgaggtgaggaaggaaggggttgctgtccagtgttggcctggtcgctttgattcttcctgcacagctcagcccaccccatctgtactggaagggaccctggagccctgggaccaccccctttcaagtcccaaacactgagtcctctgtcatgtgtccttgtccctaggctacaatgctacacttggctcaggctgatcaccatgctagtcacaggagggagagagaggcagtgtacttgcccccatctcctggagggaggtgcgttggaaattctaggcccttcagcagagacccatttgtgcccagaccacaatatttcttcttcctcagggactacatgccacagacctgtatccccagtggcaactcctgttagctcccaaacttaaacagtgatctcttctaaatatacaaggcatctacccagccccaatagtgaataaaagtcacaaatttaagttcaacaccctaagcaatttctcaaagccagtctacctgactaggtctatccacggcacggttcccaaccccaagggggaattaggggattagattaagagtaggtaaagacccttttgttctttcctgttgtaggggaggaagctgttctccccaccccaggtgcctttggaggttaaggctaggttaggccctgcactccacctggggacggcccctcatcacctgaagtcctctgctgtgttgactggaccctcagttcccacactgctaattactatgaaagctgctctggcctcgtcttctagcttgtgcctagttgaaagtctcacctttacaggatcatttgtaatgctggtgtacatgcagggaactcacaagctgtgtcaggtatgcaggacaaggaatgtctgctctggggggcacaggccaactatatggagggagggtcccaaattagcaaacccttcatttaaagcaaacccttgtcaagcctaccagagcagctgatacgtgtgcataacagtgaggcattgtgtcctggaatcgtctgggagcccagtggtcaagtctgctgggaatgcaggaagtaggacagnacgccacagga

SEQ ID NO: 88082 - DNA, 1265 bp, Homo sapiens
ttttttttttttctttaaaagcaatttatttctgattacaaaatacaggtgaggagcatgggcgatgcctgtaaccccttggttgtgcatcttcccagtctatttctgcttctagaaataccctgtgtacaacagcaagctcatgctgtccccaagtgcttgcacattctaacagctgcagagtatatgaccaggtggaaagtccaacagatgccccactcacaagatagggccctccaatcagtcttctggctccctttcactcatagtaactggttgctcttcctattggtcatagataaatgacacctgcacaattctccgagtgctttcaagcaacttcgggaggcagtgactaagaccctttccttgctcccagcttcctatgtcccagggctgcctgtggcacctggactgctgctgcccctgggtcccgtacattccagggcaacaatggaggaagggcaggcaacgcatgaggaattaacagtctttattgggctcagaccaggagtccgtgggtcttgaggacctctgtgtatttgtcaattttcttctccacgttcttctcggcctgtttccgtagcctcatgagctgtttcttcttccggtagtggatcttggctttctctttcctcttctcctccagggtggctgtcactgcctggtacttccagccaacctcgtgagccaggcgccccagataggcaaactttcttgtaggcttcagacgcacgaccttgagggcagcaggaaccaccatccgctttttcttgtcgtagggcggtgggatgccgtcaaacaccttgagacggtccagagcggcctggcctcgcttggttttgtggggcagcatacctcgcacggtccgccagaagatgcggctgggggcccggaagtggtaggggcctcgggaagggttggtgttcatccgcttgcggaggaaagccaggtacttcaacttgtttctgtagaaattgccagaaatgttgatgccttcacagcgtacgaccaccaccttccggcccagcagtacctgtttagccacgatggccgccaggcggcccaggagatggcctcgaccatcaagcaccaggacctgcacctccgccatcttcggcagccgcttggaggagaccgtagctgaagctgattctgtacagcgggacagcgctttctgcccctgggggagcaacccctccctcgcccctgggtcctacggagcctgcactttcaagaggtacagcggcatcctgtgggggcct

SEQ ID NO: 88083 - DNA, 522 bp, Homo sapiens
ttttttttttttgaccacagaagtttttattgccctcctgctccgcaaagggaccttgcttctgctggtttagcacctcaagacgtctgtgatgttggtctcagacaccactttgccgtccactatcctgtgggagttggtcttttggatgctttacaggtatttgctgctgtccagaataccaccaagattgaagtcctccccatcttctagcaggcggcagtaggtggcaatctctgtgaaatgggacacagagatccaggagccccagaccccacgcctgcatagaagctcgccgcgctgctgacctgctgagcactttagctgggcgactggacagatcccagggacaggtagtagttgatggagaaggtgcggagcaagtggtgaagctcgctgtgcacggggaggaaagcgagaggacaggactcaggttttgccgaggtcctgaagataattattgaaatgcattaaaacggtatctcacttagatattattattgtttacattgttataagaaa

SEQ ID NO: 88084 - DNA, 420 bp, Homo sapiens
acagagtgaggggggacagaggtctgagagggaaatgtctctggagggggaaacacagagtgaagggggacagaggcctgagggggaaatgcctccggaggggggaacacagagtgaggggggacagacgcctgagggggaaatacctctggaggggggaacacagaatgaggggggatagcagtttgtggggggaacacacattgagagggaagcaggcttgtctgttcttccacagatgcaaacgtttctaactgtttcgtaggcgcacaggacaaggctgcagcctccccgtcctctggtgggaggatttcttgctgctttttcttcaggccagtggcctccctcacctcaggtggggggaactcctccttctcttccttcaggaacataggctcctcctcaggtggagggattgtg

SEQ ID NO: 88085 - DNA, 765 bp, Homo sapiens
  misc_feature (1)...(765): n = a,t,c or g
tgactggagagtaaaagtgaacccggactttgtcatcgccttgatattcaaaagtttcaacatggagcccagctatgacttcctacacatctatgaaggggaagattccaacagccccctcattgggagttaccagggctctcaggccccagaaagaatagagagtagcggaaacagcctgtttctggcatttcggagtgatgcctccgtgggcctttcagggttcgccattgaatttaaagagaaaccacgggaagcttgttttgacccaggaaatataatgaatgggacaagagttggaacagacttcaagcttggctccaccatcacctaccagtgtgactctggctataagattcttgacccctcatccatcacctgtgtgattggggctgatgggaaaccctcctgggaccaagtgctgccctcctgcaatgctccctgtggaggccagtacacgggatcagaaggggtagttttatcaccaaactacccccataattacacagctggtcaaatatgcctctattccatcacggtaccaaaggaattcgtggtctttggacagtttgcctatttccagacagccctgaatgatttggcagaattatttgatggaacccatgcacaggccagacttctcagctcactctcggggtctcactcaggggaaacattgcccttggctacgtcaaatcaaattctgctccgattcagtgcaaagagcggtgcnctctgcccgcggcttccacttcgtgtatcaag

SEQ ID NO: 88086 - DNA, 410 bp, Homo sapiens
tttcgtgaggggccggcccccaagggaggggagcgaagcggggggacttctaagaccacttctaggctggatggctggatccatgagaagatgctgatggcgcgggatggcacgcgggaggacaaccacaagctgcataagagatggctccggcaccaggcattcatggccgagctggctcaaaataaggagtggctggagaagatcgagcgggtgaggaagctgatggcccctctgcctgtgccaggtgcaggaggcctccagggagcccacgtctcacctgctgcacccgctgctgccatcctgctggtcttacacctctggactgactcaaatcagctccagatctgctcctagctatgtggctttgagtgattcatgtaacatctttgagcctcaatttgctcatc

SEQ ID NO: 88087 - DNA, 397 bp, Homo sapiens
tatgaatgtctgcaatgtatgaatgccttcagattgaagtcacacctcattcgtcatcagagaactcacacgggagagaaaccatatgagtgtaatgactgtgggaagtccttccagaagacaacactctctctacatcagagaatccatacaggtgagaaaccctacatttgtaaagaatgtgggaagtcctttcaccagaaggcaaatcttactgtacatcagagaactcatacaggggaaaagccctatatttgtaatgaatgtgggaaatccttctcccagaagacaacccttgctcttcatgagaaaactcataatgaggagaaaccctatatttgtagtgaatgtggaaagtccttccgccagaagacaacccttgtagcacatcagagaa

SEQ ID NO: 88088 - DNA, 477 bp, Homo sapiens
  misc_feature (1)...(477): n = a,t,c or g
atcgagatcgatgnccatcgcgcgggacttcgcagattggggatgatgagggcaacgtcctgcctcctggagaagaggggaatgttgccgtccgtatcagacccactcggcccttctgtttcttcaattgctatttggacaatcctgagaagacagctgcatcagaacaaggggacttttacatcacaggggaccgagctcgcatggacaaggatggctacttttggttcatgggaagaaacgacgatgtgatcaattcttcaagctaccggatcgggcctgttgaagtggaaagtgccctggcagagcatcctgctgtcctggagtcggctgtggacagcagcccagaccccatcaggggagaggtggtaaaggcatttatagtccttactccagcctactcctctcatgacccagaggcactaacgcgggaactccaggagcatgtgaaaagggtgactgctccatacaaatacg

SEQ ID NO: 88089 - DNA, 1444 bp, Homo sapiens; identical to SEQ ID NO: 59052

SEQ ID NO: 88090 - DNA, 409 bp, Homo sapiens
ctcttcgggctggcggccagcgcgcaccgggacctctgcgtcagcgtcatggtggccaagggctgtggccagagcctcaacttcgactgcagcttcatcgcggtgctgatgctcagacgctgcctcacctggctgcgggccacgtggctggctcaagtcctaccactggaccagaacatccagttccaccagcttatgggctacgtggtagtggggctgtccctcgtgcacactgtggctcacactgtgaactttgtactccaggctcaggcggaggccagccctttccagttctgggagctgctgctcaccacgaggcctggcattggctgggtacacggttcggcctccccgacaggagtcgctctgctgctgctgctcctcttcatgttcatctgctccagttcct

SEQ ID NO: 88091 - DNA, 390 bp, Homo sapiens
gagaatggtccatgtgtgcatagcaagaatgtgtattctgttgctgttggattgaatattctgtatatgtctgttaggtccatttggtgtaaagtataattcaagtctaatgtttcctaattgattttctgtctaggttatctgtccattgttgaaagaggggtaatgagatcccaaagaggagactttttcttttttctcttccccattttccttcctatcctcctaatttagttttatcagttctgtgagattcattttcaatgttgacattattatgactgcttaactacggtattattcacatctgagccatgtaggggtcaatgattttatttcctttcctagaaaactttggtttatctcattttgttatttcatcattctccc

SEQ ID NO: 88092 - DNA, 394 bp, Homo sapiens
cttcgggaatggtgatgctcttccttaactaacgcctcccggctctcggcagactcccgccggtcgtatacttaacaccgaacaccgtgccttgagttaagctgcagagatctgatgtacagatattggaagtggatgagaaaattgccaaacaatctgggactattagcaccatgctggaagagttgggaatggctgatgaatgagatgaggacccagttcctctaccagatgtgaatgcagcaatattaaaaaaggtcattcagtggtgcacccaccacaaggatgaccctgctccttctgaagatgaagagaacaaagaatagcgagcagatgatatgcctgtttgggaccaggaatttctgaaagttgaccaaggaacactttttgaact

SEQ ID NO: 88093 - DNA, 694 bp, Homo sapiens
tttgattgatgtattggtttattctttgatgcctttattgattcaacacatgcttattatatgcctgctgtgtgccgggccccggaccaggcgctggggacacagcagtgaaaatactaacattgtttctgccctcacggagctcacagtgtaacagggagacaaatagacctgtcagtagataacatgaaaataattggactatgtgctgcagacacaatatcccaggtctatgagaatgtcaatacagacttcacgtgggaaatggtgaggcaataaggatcgtttcccttgatgaaatggagcttgcagaagaaggcagggtcagttgtggggagctctggttggaggtggagggagtgcattccaagctggaggagctgtccagggttctggagacgaaacggagcccgctgggaactgtcctgagccccggtgctgaaacagatcgcggttctcttctcggacctcccgagaggcgctgtccggatatttggtgctcccaagcagtcagccctgctggtctttgctttccagaccgtcaaacttcgccgtctctgtccctttctgggaaaatgtccatgcgccaacctgcaaaccagcctcattcccggcatcccacgtccctcagaccacccctcctcccacgcagctgcgggcctccccctctgtgtgcctcacctgcttccagtct

SEQ ID NO: 88094 - DNA, 393 bp, Homo sapiens
ccctttgaccagagtttatggagaaccttttattagaccagaagttcaaaatgctactattgagtttatggctccttcagaatacatgatgtttttatacctatgccagagaacttattagtaaacttaaatgaaagtaaagaggtaaggcacattttcctacctgacatgtttaattgaaatattgaaggaatatgtttttgaaatgaactttaagtaaaattttgattatttctgtgacatttctaagatgtgtagcattttatatttgctcttataattagatgaacagctcttgagttcaaccttgagctgatcatttttaagtctaatgaagcaagttatttgtagtagggtagaaaataagcatattccataaaggaggaacacttg

SEQ ID NO: 88095 - DNA, 480 bp, Homo sapiens
  misc_feature (1)...(480): n = a,t,c or g
cgatggcccgcnccccgaaaaaggagtagagcagnaacgtcnngncannnannntgnaggangcggggcacgtattgtttttttataagggcgacaacaaaaaaatttaagattctttattctacctgaccctgcctggaggcaagatttagatttaagattgtgaggtttaancatctaaaaacctggncaccttcaccccaagcaaggatagcactaaagacagctttcagattgccaccctcatctgctccacaaagctcacccagaatgttgacctgttaggcttgttaaattggcgttccaactcccagaacattaaacacaacctaaagaagttaatggaagtggatggaggagagattgttaagtttttgcaagatacactagatgcactctttaacataatgatggaaatgtcagacagtgaaacctatgacttccttgtgtttgacgcactggtatttattatttcactgg

SEQ ID NO: 88096 - DNA, 430 bp, Homo sapiens
ctctgacttaattaaaattttccttttctttccttatcctcttgaactagagaaaataaaaatggaggactgtttttctgtttgcatgtactcttgacaagtttgctttgaaatgtttttagtaagaaggcttctcttatgtgaagaattggagcgttcctcttgtggcagcgtcctttttcatggttacttgcccccaccaggtattttcactttattaaatcttttaaaaaattccttgtatcattaagcaagtacaagcatatgaataggaaaaactgctccttgattattgagttttttgtctataaatctattagaaatggtaagaacttttgatttttatagaaattaagtcacattatatattggagcaggggtttggcaaactttttctgtaaagagccagatagattttgtgagccagagg

SEQ ID NO: 88097 - DNA, 402 bp, Homo sapiens
taagactggagtcaaacaggaatgcgatgcgtttcgtgtgtcctgtagacagactcaggctgcttacactggctgagtcagctggatcttcttgactatttgtatcagtatcagttgccgatgaagctgatttctcaggcacatttctcaggcaaagtgcgtatcttgatgtcatcttatgtgatatatccagcctgcaccacccactacgcctctatggcaatttccactggctttattggtagaagatcatgggctgttttccttctgaagaatttttttgatgatctacactgattcataagatcaatatactggtttcttcctatgccgagaagccttagacagtcagcagcagtaaaattgggcaatgagtcataacttttctcactgttcataata

SEQ ID NO: 88098 - DNA, 408 bp, Homo sapiens
tgaagatggtgaatatttcctgatgattagaggaaagcttctgaagatattctgtgcggggatgcactctgaccaccccaaagagtacgtgacactggtgcatggagactctgagaatttctccgaggtttatgggcacaggttacacaacccaacagaatgtccctataacgggagccggcgcgatgactgccaatgtcggaaggattacacggccgctgggttttccagttttcagaaaatcagaatagacctgaccagcatgcagataatcaccactgacttacagtttgcaaggacaagcgaaggacatcccgtcccttttgccacagccggggattgctacagcgctgccaagtgcccacaggtatgtccttggggccttcccccttgccagggattcacctc

SEQ ID NO: 88099 - DNA, 407 bp, Homo sapiens
tcttgaatgatatttgagtgtatctaatgccttatttataaaactatacactgttgttttctgcatttatgggcaaccttgcattgaaagaagtccatttacttttgaaaagatataatgaagactcatgaaaggtctcaaaatcagatttatttgaaagttatttcccttcttgattttgtgaaatcagaacagcaaagtgtccttcactgtgactctccttcttccagtcctgaatggggagcttacaggaggggccttccgaaatgggcgtcgagcatgcctgccagctccttgtcctgacaccagtaacattaacctgtggaatatcttgaggaacaacattggtaaagacctgtctaaagtctctatgcctgtggagctaaacgagccgctcaacaccctgg

SEQ ID NO: 88100 - DNA, 405 bp, Homo sapiens
  misc_feature (1)...(405): n = a,t,c or g
agcaaccaagttcctcccccagtttccagacagtttttagctacatgacctagcatttttcaattatatagaccaggcgatacactagaaggctgcccgtctatcattcctaggaatgccatgtcagattcctcttactgaaacatcattactgtccttgtctttggcagntaagtgctgccacttaacttctgctactctgggatctcactagctctaatgagatcagggaactcctctaaatagcagcatcccccacgatcatatctggcctacaaaggaaagcagccacagaactttttaaggatgcagctgctcctctcactaatgtattccttgatatcttagtgatggaagtgtcttctgggccttcttgtgaaacatangtaagagttagggatgcag

SEQ ID NO: 88101 - DNA, 388 bp, Homo sapiens
gaccaggcggccgtccgggccctttgtgagtctttgcttcacgttaaatttacatccttttagataccagttttgtttttgcaaatcagatgcgttgcactgtttattaaataggtcatcataaggaaattggcttggattaatcttatggagttcattcagattgcgtatcttgatgattccagcactagctgattgagcataaaaatctgctaaagcatttcactgatatttgggttcatttctacaagtatgagcttcagtcttaataacagcaatctgcatttgtaacaggatagcagaaaggagctcatctgtttggagtccatttttgatggggatcccactagaggggagaaaccttcgtagtttccatatcatgccaaaa

SEQ ID NO: 88102 - DNA, 858 bp, Homo sapiens
  misc_feature (1)...(858): n = a,t,c or g
tgtggaacatactacttagttaatgttgtctttctttggtaagtatctctgtttattacatttgctgagctatagctaatacatggaattctgcattttgcatcttgtttaaatattgcagtttgtactccataatatcctgcacttaaagagcatgattactgctaattatcatttagaaaattgtttttgcttgattaagatcttagctatgtgtactgaaatctagtgggtcttcattatgtgcagtattttctattctatacttgcttaaatattaatgtatggaaatttagcttcatctgtcctaccttttgatgtcagaagcataatcagcataattggcttagattgtttttttctcctgtttgcatttcatattacctaatgtcattagtgagttgactactgagtgggtaatctgcatttctgaactgcttcttgagcacattattaccattgattttgattattttaattcccattcaccccaggcagtccctcaagctgtgccatattattcaaataactgctttcttccattctgggagcaagactgtttctgaaaacccatcggcattcttataaatactgatgttttcacttgggctagggggcaacttgattttcataatatatgggtgaagatgggtaggtagctcaagacttgtgggcctttattcttaatgggaggtaacatgcaagcccctggggccatgaaggaacaacgcctgacctggctgctttaaaactgaccggataactggacagttcccaggagacttgccctggctcccatcataaaatccaggaacntgaatgcggacaaacacacgccctctcctctttgcaaagctc

SEQ ID NO: 88103 - DNA, 457 bp, Homo sapiens
gatagaggaaaaccagagagaaggtttaaatgggatttatctatcatcttttcctggcttcctccatatagaataaggatttatatgaggaaaccagagtaaatgggttcaatcctgattctgtggtagcatgcttggaagttaaaatatgcttggaagataaaatattgccttaaaaagcagaaaatttattaaatatcatcaccctcagggagtttgttgatgattgtctctccagacctgtctcactgttggcatggataactagattgatgaatgactaagagctgaaacacaagactgtgtatttctcatcaatgtgttttgttattgtgaaatatttaatattattaagagctggcagtgaccctgtgttggaggagggtagggtgtgtttgtgtaagagcagtgagaaagtaatggctaaaaaaagttgatgtcttctttaaaaaaaaaa

SEQ ID NO: 88104 - DNA, 458 bp, Homo sapiens
ccggaattcgggggtcgacgatttcgtctccaggcaaccgtggccgggtcctcgcggctggagaacccaaccgacagtgggcggcaggacgcaccgcggaccccggagagggcggacgagcagggcgccggcgccatggacctggtcatcacgcaggagctggcccgcgccgagagccagcaagatgctgcgtccttgaagaaggcctacgagttgatcaaatcggccaacctagggaaatcggagtttgacccctcagagagcttcagcccagacctgtttgttctgtgtgcagagcaggccctgaagatgaggcagccagaggtgagcgaggactgcatccaaatgtacttcaaggtgaaggcgcccatcacccagtttctgggccgagcgcacctgtgcagggcccagatgtgtgccccgaagtcggcagaaaacctggaggaatttgaaaattg

SEQ ID NO: 88105 - DNA, 664 bp, Homo sapiens
tttcgtgcgatccgtaggcagggcctgacgccgcagtcctccttggccggagcctcaacggatgggcggggagggggcggggccgggcaacccggaaggtccggcgtcccagccgcctacctcgctgggaccctggtcttgctgtcccccgctggcctcctgcccaagcgactgcggccaggatgggccggaaggtgaccgtggccacctgcgcactcaaccagtgggccctggacttcgagggcaatttgcaaagaattttaaagagtattgaaattgccaaaaacagaggagcaagatacaggcttggaccagagctggaaatatgcggctacggatgttgggatcattattacgagtcggacaccctcttgcactcgtttcaagtcctagcggcccttgtggagtctcccgtcactcaggacatcatctgcgacgtggggatgcctgtaatgcaccgaaacgtccgctacaactgcagagtgatattcctcaacaggaagatcctgctcatcagacccaagatggccttggccaatgaaggcaactaccgcgagctgcgctggttcaccccgtggtcgaggagtcggcacaccagaggagtactttctgcctcggatgatacccggacctgacgaagccggaaacccgaccccttcgagcg

SEQ ID NO: 88106 - DNA, 611 bp, Homo sapiens
tttcgtggcagacagacctccaggcccgctaggggattctcgccatggaggccgcccgggactatgcaggagccctcatcaggcgagtgccccgcgtccccctgattgccgtgcgcttccaatcgccttgcgttcggtggcctcatattcccctgtgcgcctctagtaccgtaccccgctcccttcagccccctgctccccgcattctcttgcgctccgcgaccccgcgcacacacccattcgcgcacacacccatccgccccactggtgcccaagccgtccagccgcgcccgcgggcagagcccaatcccgtcccgcgcctcctcaccctcttgcagctgggcacaggtaccaggtgtggctcttgcgaggtgcgcgggcgtctgcaaaccaggtgacagctggcgagtggctgcatgcatctctggccgctgctgcagtcgcgggcgcagaagagggtccggtcccaggaaccccgagcaaagcttccgcggtgcatggggaccgagcttctgggggtcctggaaatcacaacgggagctgagcgcgggaggggcccaggcttggcccctcctgggaagcgcgggctctggtctccgaggggaggcccc

SEQ ID NO: 88107 - DNA, 5063 bp, Homo sapiens
gcggcggtcgcagctcgggtccccctcgggcgcccccgccgccgtccgcgcgcggccatggagctggaggtaccggacgaggcggagagcgctgaggcgggggccgtgccctcggaggcggcgtgggcggcagagagcggggcggcggcaggtttggctcagaagaaggcggccccaacagaggttctgtccatgacggcacagccgggccctggccatgggaagaagttgggccatcgaggtgtggacgcatccggcgaaaccacctacaagaagaccacctcctccaccctgaagggtgccatccagctgggcatcggctacaccgtgggccacctgagctccaagcccgaacgcgacgtgctcatgcaggacttctacgtggtggagagcatcttcttccccagcgaaggcagcaacctcacccccgcccaccacttccaggacttccgcttcaagacctatgcacctgtcgccttccgctacttccgggagctctttgggatccggccagatgattacttgtactccctgtgcaatgagccgctgatcgagctgtccaacccgggcgccagtggctccctcttctacgtcaccagcgacgacgagttcatcatcaagaccgtcatgcacaaggaggccgagttcctgcagaagctgctccctggctactacatgaacctcaaccagaacccgcggacgctgctgcccaagttctatgggctgtactgcgtgcagtcggggggcaagaacatccgcgtcgtggtcatgaacaacatcctgccccgcgtggtcaagatgcacctcaagttcgacctcaagggctccacctacaagcggcgcgccagcaagaaggagaaggagaagagcttccccacctacaaggacctggacttcatgtaggacatgcccgaggggctcctgctggacgccgacaccttcagcgccctggtcaagacgctgcagcgggactgcctggtcctggaaagtttcaagatcatggactacagcctgctgctgggcgtgcacaacatcgaccagcacgagcgcgagcggcaggcgcagggcgcccagagcacctcagatgagaagcggcctgtgggccagaaggcgctctactccacggccatggagtccatccagggtggcgccgcgcgcggggaggccatcgaatcggatgacacgatgggcgggatccccgctgtgaacggccgcggggagcggctgctgctgcacattggcatcatcgacatcctgcagtcctacaggttcatcaagaaactggagcacacctggaaggccctcgtccacgatggggacacggtgtccgtccaccgccccagcttctatgccgagcgctttttcaagttcatgagcaacacggtctttcggaagaactcctccctgaagtcctcgccctccaagaaggggcgcggcggagccttgctagctgtgaaaccgctggggcccaccgctgccttctcggccagccagatccctagcgagcgggaggaggcccagtacgacctgcggggggcccgcagctaccccacgctggaggacgaaggccggcccgacctcctgccctgcacgccaccttctttcgaagaagccactacagcctccattgccacgactctgtcatccacatccctctccattcctgagcggtccccctcggagacgtcggagcagccgcggtacaggcggcgcacacagtcgtctggacaggatggcaggccgcaggaggagccacccgcggaagaggatctgcagcagattacagtgcaggtggagcctgcgtgcagcgtggagattgtggtccccaaagaggaggacgcaggggtggaggcttccccggccggtgcctctgctgctgttgaagtagaaactgccagccaggcctcagacgaggagggcgcacctgccagccaggcctcggacgaggaggacgcgcccgccaccgacatctactttcccaccgatgagaggagctgggtgtactccccgctccactatagcgcccaggcccccccggcctccgacggcgagagcgacacataatttctatgcagcccccgacccagagccgagctccacttctgctctggctgcccccgaaggcgctgcccaccccgctgaggcccagagctcgggagatgcccgcctcgccgccccaccggacctcgtcctccccctgcacggatgccgacggcccggccccttcccggacaagcttcccagggccccggcaacccccgtcggcagcctgcccctgtgagacccaccctcccgagcggccaatcgcatttgagtccttatttggcacagagacggaagcacgtgtgtgccgttttaggaaaagaacaaaaaagacacaaacaaaccaaccagagggagaagagcccctgcccactgcactctttggttctctgctgtgcctgcctgtgtcctgaggaagaagccaggctgttcgcggtggcctctggggacctgagccccgggggccccatcggcctgcagaggggacggctggggtcccgagcaactctgcctccatccacgtgggaagcggaccctcctgccctcagcttgggtttgggggcctcagtgcaggacatctggcctgaacatcgactgtggggacagccctcgccctgccaagcactgcggccactcagcagctatgttcccgccgcagtggggccctgacgcccacctcccaggtgcccctcgagcaaaaacctctggcgcctccaatccagacccaccacagctggagggccaggcctcctcttccccaggctgccacccacgctggcggagctcagggctggggacttgtccttctcttccaacgtaggccactcagcaactggcatggagggcccaggcaacggagacgttttctccatggcaggacagagcgggaggccgggccttgggccacaggagaccagctcagggcggaaggtcaggctccccgccccctccacgtggagacatggcctagggggccaggcccggctccacaggagtctccttcaggactggtgtggatgtccgccgcctctttcttgtttaagtgatgtgatgtctccgaggaggggagagaagactttgtttccgactcatcaccctccaagagggcagcgctcccagtggtgggactcagcccagactgccctggggcagcttcctgggcccgctgcgctcagagggtgctggttggaggccagagctcggcagagtcacccaccctgcccttccccaggacccctgagaggggcttattggtgatggctgtgggaatcccccacttccaagatgtgcccaggatgtgaggagctggagtggaagctgcacctttgggaagaattcctctccagacctggcagagcctggtgtggggtctgagacggccggagaacctcccaggcagggctctgtgttttgtctgttacaacctccgtatgacgccacgccacccgctgttcacgtcccgtcggcctcctgcacagcccacacgctgcgcctggaaggcccctgctgtggagaagccggacccatccccgaggtccccagcgaggacacacactccacgagagcagcccctccactctgcccaggagaggggccgaccctcctcgggaaccggccacccgcgtggcttcccagcatccatcaggacaagcccacgtggggtcctccctggcgtgcttcagagggtctgtccagccctggggaagcgaccttggcctcagttcacagcctggtgctcatctgctggcaccgggcatccacccatcagcccccgccctgtccctccgaaggacacccagcaggcaccccccggggaggcaggggcagaggtcagaaggggtgtctgggacctggatggccagcagggacaggggcattgtcatctcaaaggtccaacccccagaggccacaccagtcctcccagggagtcctcgagtcgccctgcccagagccctggcaccagagacgccaagagcctgtggggtgactcggagcagcaggtgtggccccgggcgggcggcaccgcgtccagggcagcctccctccgctgagtgacacgggacaccagtgcccggccgacgcgcctttgcaggagaaatgtgcaaacctctgtggataccatttcatttccattcttgtgttgtctccaaggcccctttggagatatacttggtgttggttgtgttttttggttccttttcagagaactgtaaaccgaggctgacgtgctccactgactgtgccgaggggcgggggcaggaggacggcaagacctatttataatatttagcgaactcggtctccctcagatcccccgcgagggaggctgctggacccaccccgctgtcccccatgatagaagtctgtaaataccttggtgaccaatgcccacttcccctcctgggtcacctctgatggctgctgtccactgagaacgtgggcagtgtccaaattcctgtactgtaaagactaaaaggcgtttgctctgagactgacaaggcggaaacttccatgtgtctcctgccaggctctgtccccctacgccatcccgacacgtccccgttcccccgaaacctggctcagtgcaatactcccattgccatggggtccttcaccatggtactgtctccacagccctcagtccccaccccaggagaggcgcctgccacctcctcctcatctccggtggttcaatcgctccgcctgtccccaacccagtcccatttttatggccaaactgattctgaaacaaaatgaaactgcaaacctcgtgtgtcttaactccccccagggatgccactccattcctccgccccgtggtctggtgcgtgacaatccaaagcgccgagacgagggtgctgtgtccctcaaacccagagtggtgggcgcctctgaaaccatacagccactcctggccccaaacactggtttgcatcccaggttcctcgcccacctacccccgccacaccccgtctttttagagatctctctaataaatcgggtaataagcaaaaaaaaaa

SEQ ID NO: 88108 - DNA, 436 bp, Homo sapiens
tttcgtgagcgtcagtggcaccctcagttcactccagctatgtaatcctcgtgacggctttgacatgtttgcccagacgagaggaaactccttggccgagcagcgcaagacggtaacctatgaggatcctcaggctgtcggaggacttgcttctgcactagacaatcgaaaacagagttcagaagggaagggtgatgatctggaggagggcgccacaagtgaacagtttggctaattccttgaagaaagagccaaagcttgtggaatgggtcccggacttccctccccccccataggaggtgctcgctcagccccaacaccttcttggccggaggaagcccccaccgggtggcctcctgcctttgttcttgcctggacttttcgtcagaacatgaatgtaacacatccgcccgcctcaccacaagccgtgggcccc

SEQ ID NO: 88109 - DNA, 385 bp, Homo sapiens
ttggacctctgacccttgggcagcacctcccgacagccggctcgggacccaactctgcgagccaggtgaaaatgagttcttcagtaagaagaaaaggcaagccaggctaaggaggtggaaaagggtcttctagaggaggaagaggaggcaggagtcacgccagtaaatctcatgggagtggtggcggtggcggtggtggtggtggtggaggtggcggcaacagaaaggcctccagtagaatatgggatgatggagatgacttttgtatcttcagagaatcaaggcgcccttccagacctagcaacagtaacataagcaaaggagagtcacgcccaaaatggaaacccaaagccaaagtaccccttcagactctacatatgacttg

SEQ ID NO: 88110 - DNA, 411 bp, Homo sapiens
cataaaaaatatataaaacataggagattgggaagacatagggaagtcccctgaaagaataattcaatactatgggccagctacctgggcacaagatgggtcacggggatactgcactcctatttacatgcttaaccacatcataaggttgcaggcagtacttgaaatcatcatgaatgaaagagcaaatgcattagatttactggcccagcaaaccacaaaaatgagaaatgctaactatcagaacagattagctttagattacctcctagcccacgaaggaggagtatgaggaaagttcagtctaactaattgttgcctggaaattgatgacaatggaaaagcaattatggaaataactgcaagaatgagaaaattagcccatattccagttcagacttgggaaagggg

SEQ ID NO: 88111 - DNA, 385 bp, Homo sapiens
gggtgtactgggtctgtcagacttacaggttttttttaatgcaccaagtaatggacgctttgcatagctatccgaagagcctgcatttgctttttaaagttaattcccctagttcctggagatcaacttttatttcgcttatgattgggggaggctgaccgaacaaaatttcacagggcaaatacccagtttgtttgctgggggtgcaactgactcagaggacgaccataggcaagacttgattccatcttagatgaatttcctgatattttttaagtagctgcttgagtgtcctgttcatacatttcactttttctaaacttcatggccgataggctgtgcggaacttccattttatttttaatagtcttggtaaaacttgcac

SEQ ID NO: 88112 - DNA, 1118 bp, Homo sapiens
gcgtgagccactgcgcccagctggcttaatgtttttaaaagtgttcctagagcttttagcttcaagggatttatttttatttgaattctgtgtctgtaatattgtgcagttagagttgatcagaaattgttgtctggagacctgttttttaaaagcttcattttagttttatgttttttttgtgtgtgttctgtaggtaggctgatatttgtttgtatgcctttcttagttttaattgggaaaagtaaattatatagtggtaaggtcctggattcatttttttttccccattgtaccagcagtctttggttattccacgtatggttgtggcatgtgtgttttagcgcatttcttatttcttttctcttagggcctcatgcatctgcaggggaagccagtttgttcttttgatccaaaagggttaattttcgctgcaggtgtcaactctgaaatgggcaagctttatgaccttcgttcttttgataagggaaatctttgaatctttgagatctttgcactgcgtctggctttgttatgacttcagaaccgacccttagtcttaattgcccagcacttctgccctcgtggtctctttgcccctcttcatcccttcccccccacgagagacctctgtatctcgctaccgccacttccacgctccgtaatctccccgctccttccttctgcatcccagacccgtcttcttttcctctctctcctgtcgcgacctctacctcccgctccttgtcctagcagctcggggtagtacgccccgtccactccggtcgttagcctcctcctccgctgactcgccgtcacattcctctgagtccgctatctatctagtctgacgctggcagtcgcgtctccctctaactgcctgcctcccatcccctaccctctccaccacacgggctctccccctgatgctccaccttcgtcgcttttccgtccgatgctgatctctcgttcatatcatcgtctgtagcacgcgatcacgctgcactcttcctccctctgtgctctcggcgagtgtacgccgtgtatctagtatcgtctccgatgctctagtcacgtccgcgcactgtcgaccaccgccgttatcatcgctcggctct

SEQ ID NO: 88113 - DNA, 776 bp, Homo sapiens
ataaaagagttggctctaatatacctgtatcaaaggcgttctattttctttgtcacagatatcaatctggcattttctgctaaccaggagaggcttgcactgttattctgctggaacatggcaccaatccaaaccttaaggatatctaccgcaacactgctctccattatgctgtgtatagtgagagcacctcactggcagaaaaactgcatttccatggtgcaaatattgaagcactggacaaggtatagatcaatcaactttctttccaaaatatttgttttaacattgacacaggtaagggtcaattttttatatttggaagctcaaccattccctgaatgcaaatgcaaattattttgaaataattgtctaagattttattttaaatattgatgcttttaaaggtgcattaaagggtacagttttataaaacgcactttggaaaatacttgtgaatttgttaaaggtaaaaccttttcaactttttttctacgcagggttgttctttcctttttttcccccctaattagtacaaaacaacacaggaaagaaaatatgccctggaaataggctttattttaaaactcaaacaaaactaaagcaacttacaataagtggacatgttgctgctgctgataattttctgaaaaactgatgtatcatctctcagtggcacaaggcttaagagggaaaaatgggaagggaaaaggagagcaatcagaaatatgcaggtcacttggaaattaggtaatgagggaaaatgctatgaagag

SEQ ID NO: 88114 - DNA, 10919 bp, Homo sapiens
gcacgagactgcgctcgcctccctcctcacgcgggcgggattttcttgccttgtgaaaaaccgtctcggcggctgcccccgcctcctctgctggcatgtgaaatggcggtcggcgagtggtttgcgtccgtgacatcatcatcatggcaacaagagctgcagcctgggaccgaggagcccgtgtgattcccggcggtggcgcagtggcggcagcaccagcaccgacgaaagcttcgagggcttctctccttgcggccccttgccgggtgctcctgaggaggcggcggcagcagcgcctacaccgccccgcccgccgttcctcgaggtgcctctgtgtgaggggagggggccgtgccgagaaggggagggggcgccgccgccgctgcggagggagccgccgccgctgctgctgccgctgccgggtcgccagtgaagggaggcagtggcggcggcggcgaacatgttttcagtaaggatagtgactgcagactaatacatggccagcccgctgcaggggctggatacctgccaatcccccctcacccaggcccctgtcaagaaggtgccggtggtgcgagtcttcggagcgaccccggcagaataaaacccaagacaagccacataaaagcaacctaaaaattaaactgtcatcatattatttgttttaaaactatggaataatatatctgaggaagatttctctcaaaattgtttttctcaatttcaagtcagaagacatgtcttcatctacatggcatctttccttacctctatgtgccatacgatggttatggacagcagccagaaagctatctttctcagatggcattcagtatcgacagagcacttaatgtggctttaggcaatccatcttccactgctcagcatgtgttcaaagtgtcattagtatcaggaatgcctttttatggttatcatgagaaggaaagacactttatgaagatctatctttacaatcctacaatggtgaaaaggatatgtgaacttttgcaaagcggagccataatgaataaattttaccagcctcatgaagcgcatattccctacctcctacagctcttcattgactacaatctttatggcatgaatttaataaatctggctgctgtcaagttccgaaaagcaagaaggaaaagtaatacattgcatgcaactggatcctgcaagaatcatttatcaggaaattctcttgctgatactttatttcggtgggaacaagatgaaataccaagctctttaatattggaaggtgttgaaccacacagtacatgtgaattacaagtggatgctgtagctgctgatatcttaaatcgtctggacattgaagctcaaattggtggaaaccctggtctacaggccatatgggaagatgaaaagcaacggcgaagaaacagaaatgaaacttctcaaatgagccaacctgagtcacaagatcacaggtttgtgccagcaacagaaagtgaaaaaaaatttcagaagagacttcaggaaattctcaaacagaatgatttctctgtaacattatcaggatctgtggactacagcgatggatcccaggagttctctgctgagttaacattgcactctgaggttctgtctcctgaaatgcttcagtgtacaccagccaatatggtagaagttcacaaagacaaagagtcaagcaaaggtcacactagacacaaagtggaagaagctcttattaatgaagaagcaattttgaaccttatggaaaatagtcagacttttcagcctttgacccaaagactgagtgagtcacctgttttcatggacagtagtcctgatgaggctctggtacatcttcttgctggtttggaaagtgatggatatcggggggaaagaaataggatgccatcaccatgtcgctcctttggaaataataaatatccacaaaatagtgatgatgaagaaaatgaaccacagattgaaaaagaggaaatggagcttagtttggtgatgtcccagagatgggacagcaatattgaagaacattgtgccaaaaagagatcactgtgcagaaatacccacagaagttcaactgaagatgatgactcatcttcaggagaagaaatggaatggagtgataacagtttgcttctagccagtctttctatacctcagttagatggaactgcagatgaaaatagtgacaatccattgaacaatgaaaattctagaacccactcttctgtaattgcaacaagcaagctttcagttaaaccctccatctttcacaaagatgctgctacattagaaccctcatcttctgctaagattacctttcagtgtaaacacacaagtgccctttcttcccatgttttgaacaaggaagatttaattgaagacctttcacagacaaacaaaaatacagaaaaaggtctagataactcagtcacttcttttacaaacgaaagcacttattctatgaaataccctggatctttaagcagtactgttcattcagaaaattctcataaagagaatagtaagaaagagatcctcccagtatcttcctgtgaaagtagtatttttgattatgaagaagatattccatctgttacaagacaagtaccaagtagaaaatatacaaacattagaaaaatcgaaaaggattccccttttatacatatgcaccgtcaccctaacgagaatacattgggcaaaaattctttcaacttttctgacttaaatcattcaaaaaataaagtatcctctgaaggaaatgaaaaaggaaacagcacagctctgagtagtttattcccttcatcatttactgaaaattgtgaattactgtcatgctcaggggagaatagaactatggtgcattctcttaatagcactgctgatgaaagtggactaaataaacttaaaattaggtatgaagaatttcaagaacataaaacagaaaagccaagcctcagccagcaagcagcacactatatgttttttcccagggttgttctttctaactgtcttactagaccacagaaactatctcctgtcacatataaattacaacctggcaataaaccatcccggttaaaattgaataaaaggaaacttgcaggtcatcaggagacttctaccaaaagtagtgagactggatccacaaaagataattttatacaaaataatccttgtaatagtaatcctgagaaggataatgcattggctagtgatttaactaaaaccactcgtggagcttttgaaaataaaacacccacagatggttttatagactgtcactttggagatggaacgttagaaactgagcagtcctttggactatatggaaataaatacacacttagagccaaacgcaaggtaaattatgagactgaagacagtgagtcaagttttgtaactcacaactcaaaaattagtctacctcatcccatggaaattggtgaaagtttagatggaactctcaaatcccgaaaacgaagaaaaatgtctaaaaagctgccccctgtcatcataaagtatattattattaatagatttagagggagaaaaaatatgcttgtgaagctaggaaaaatagactctaaagaaaaacaagtaatattaacagaagaaaaaatggaactatataaaaagcttgcacctttgaaggacttttggccaaaagttcccgactcccctgcaaccaaatatcccatttatccactaacaccaaagaaaagtcacagaagaaagtcaaaacataaatctgctaagaaaaaaactggtaaacaacaaaggacaaataatgaaaatattaaaagaactttgtctttcaggaaaaaacggtcacatgctattctttctcctccctcaccatcttacaatgctgaaaccgaagattgtgacttgaattatagtgatgttatgtctaaactaggttttctttctgagagaagcacaagtcccataaattcttctccacctcgctgctggtctcccacagatccaagagctgaagaaatcatggctgctgcagaaaaagaggcaatgctttttaagggtcctaatgtatgtaagaagactgttaattctcgtataggaaaaactagtcgcgcaagagcacagattaagaaatcaaaagcaaagcttgctaatccctctatagttactaagaaaaggaacaaacgaaatcagacaaataaactagtagatgatggaaaaaagaaaccaagagcaaaacaaaaaacaaatgagaaaggtacatcgagaaagcatataacacttaaggatgaaaaaataaaatctcagtctggtgctgaggttaagtttgtactgaaacaccagaatgtgtctgaatttgcaagtagttctggaggctctcaactactttttaaacagaaagatatgccactaatgggctctgctgtagatcatcccctttctgcttccctacccactggaattaatgcacaacagaagttatctggctgcttttcttctttcttagaaagcaagaagtctgtagatttgcagacattccccagttcacgagatgatttgcatccatcagttgtttgtaattctataggacctggagtctcaaaaattaatgttcaaaggcctcataatcaaagtgctatgtttactctaaaggaatcaacgttaattcaaaaaaatatatttgacctttccaatcatttatctcaggtagcacagaatacacagatatcttctggtatgtcctcaaagatagaagataatgcaaataatatacaaagaaactatttgtcatcaatcggaaagttaagtgaatatcgcaattccctagaatcaaagctggaccaagcatatacccctaattttttgcattgcaaagacagtcagcagcagattgtgtgcatagcggaacagtcaaagcacagtgaaacttgttctccgggaaatacagcttcagaggaaagccaaatgcctaataattgctttgtaacttccttgagaagtccaatcaaacaaatagcatgggagcaaaagcaaaggggctttattttagatatgtcaaattttaaacctgaaagagtaaaaccgaggtcattatcagaagcaatttcacaaaccaaagcactttctcagtgtaaaaatcgaaatgtgtcaacaccttcagcatttggtgaaggacagtctggactggcagttctaaaagaattgttacaaaaaagacagcagaaagcacaaaatgcaaatactacacaagacccattatccaataaacatcaaccaaataaaaatatttctggttcccttgagcataacaaagcaaataaacggacacgatcggtaacgtccccaagaaaacctcgaactcccagaagtacaaaacaaaaagaaaaaatccccaaacttctcaaagtagactctttaaatttacaaaactctagccagttggataactctgtatcagatgatagtcccatctttttttcagatccaggctttgaaagttgttactcacttgaagatagtttatctcctgaacataattataattttgatattaacacaataggtcagactggattttgtagcttttattctggaagtcagtttgtcccagctgatcagaatttgcctcagaagttcctaagtgatgctgttcaggatctttttccaggacaagctatagaaaaaaatgagtttttaagtcatgacaaccagaaatgtgatgaagacaagcatcataccacagactcagcctcatggattagatctggtactttaagtcctgaaatttttgagaagtcaaccatagatagcaatgagaatcgtcgccacaaccagtggaaaaatagctttcatcctctaacaactcggtctaactcaataatggattctttctgtgttcagcaggcagaagactgtctaagtgaaaaatctagattgaataggagttcagtaagcaaagaagtgtttcttagcctcccacagccaaacaattcagactggattcaaggtcacaccagaaaagaaatgggacagtctcttgactcagccaatacctcttttactgcaatactctcctcccctgatggtgaacttgtagacgtggcctgtgaagatttagaactgtatgtttcaagaaacaatgatatgttgacaccaactcctgatagttcaccaagatctactagctctccttcacaatctaaaaatggcagcttcacccctcgaactgctaacattctgaaaccacttatgtcccccccaagtagggaagaaattatggcaactttgttggatcatgacctgtctgagactatttaccaggaaccattttgcagtaatccttctgatgtaccagaaaagcccagggagattggtggacggctcctcatggtagaaactcgacttgcaaatgatctggctgagtttgagggagacttttccttggaaggacttcgtctttggaaaacagcattctcagcaatgactcagaatccaaggccagggtcaccccttcgcagtggccaaggagttgtcaataaagggtcaagtaatagccctaagatggttgaagataaaaaaattgtgattatgccttgcaaatgtgccccaagtcgacaactggttcaagtgtggcttcaagccaaagaagaatacgaacgttccaagaaactgcctaaaaccaagccaactggagttgtaaaatctgctgagaactttagctcttcagttaacccagatgacaaacctgtagtgcctccaaaaatggatgtaagtccatgtatactccccactacagcacataccaaggaggatgttgataattctcagattgctttacaagcaccaaccacgggatgtagtcaaactgcaagtgaaagtcagatgctgccaccagttgcctctgcaagtgatcccgaaaaagatgaagatgatgatgataactattacattagttatagctcccctgattctccagtaattcccccttggcaacaaccaatatccccagattccaaagcattaaatggagatgatagaccctcatcaccagtagaggagctgccttcattggcttttgagaacttcttaaagccaataaaagatggtatacaaaaaagcccctgcagtgagcctcaagagcctctagtgatatctccaattaatactagggcaagaactgggaaatgtgaatcactttgctttcatagtacaccaatcatacagagaaaacttctggaaaggcttcctgaagcacctggccttagcccattatcaacagaaccaaaaacacagaagttgagtaataagaaaggaagtaatactgacactcttagaagagtactgttaacacaagcaaagaatcaatttgcagcagtaaataccccacagaaagaaacttctcagattgatggaccatctttaaacaatacttacggtttcaaagtcagcatacaaaacttacaggaggcaaaagctttacatgagatacaaaatcttaccctaatcagtgtggagttgcatgctcgaactagacgagacttagaaccggatcctgaatttgacccaatctgtgctctgttctactgcatctcatctgacactccactgccagatacagaaaaaacagaactcacaggtgtaatagtgattgataaagacaagacagttttcagtcaagatatcagatatcagactccattacttattagatctggaattacaggactcgaagtcacctatgctgctgatgagaaggcactttttcatgaaattgcaaatataataaagaggtatgatcctgatattctgctaggatatgagattcagatgcattcctggggttacctcttacaaagggctgccgctttaagtattgacttatgtcggatgatctctcgggtgccagatgacaaaattgagaacagatttgcagctgaaagagatgagtatggatcatatacaatgagtgagataaatattgttggccgaattacactaaatctttggagaatcatgagaaatgaggtggctctaactaactacacctttgaaaatgtgagctttcatgttcttcatcagcgttttcccctctttacctttcgagtcttgtcagactggtttgataacaagacagatctatacagatggaaaatggttgatcattatgttagccgtgtccgtggaaatctccaaatgttagaacagctggacctgattgggaaaaccagtgagatggctagactttttggcattcagtttttacatgtactgacaaggggttcacagtaccgtgtggaatcaatgatgttgcgtattgctaaaccaatgaactatattcctgtgacacctagtgttcagcaaagatcccagatgagagccccacagtgtgttcctctaattatggagcctgaatcccgcttctatagcaactctgttctcgttttggatttccaatcactttatccttctattgtgattgcatataactactgcttttccacctgccttggccatgtggagaacttgggaaagtatgatgagttcaaatttggctgtacctctctgagagtacctccagatttactttaccaagttaggcatgatatcacagtgtcccccaatggagtagcttttgtcaagccttcagtaagaaaaggtgtactaccaagaatgcttgaagaaattttgaagactagatttatggtgaagcagtcaatgaaggcttacaagcaagacagagccctgtcacgaatgcttgatgcgcgtcagttgggacttaagctgatagcaaatgtcacatttggctatacatctgctaatttttctgggagaatgccatgcattgaggttggcgatagtattgttcacaaagccagagagaccttggaacgagctattaaactggtgaatgataccaagaaatggggggctagggttgtatatggcgatactgacagtatgtttgtgctactgaaaggagccactaaggagcagtcttttaagattggtcaggaaattgccgaagctgtaactgctaccaatcctaaaccagtgaaattgaagtttgaaaaggtatatttgccctgtgttttacaaacaaaaaagaggtatgtgggttacatgtatgaaacactggatcagaaggacccagtatttgatgcaaaaggaatagaaacagtcagaagagattcctgccctgctgtttctaagatacttgagcgttctctaaagctgctatttgaaacgagagatataagtctaattaaacagtatgttcagcgacaatgtatgaagcttctggaaggaaaggccagcatacaagactttatctttgccaaggaatacagaggaagtttttcttataaaccaggagcttgtgtgccagcccttgaacttacaaggaaaatgctgacttatgaccggcgctctgagcctcaggttggggagcgagtgccatacgtcatcatttatgggacccccggagtaccacttatccagcttgtaaggcgcccagtggaagtcctgcaggacccaactctgagactgaatgctacttactatattaccaagcaaatccttccacccttggcaagaatcttctcacttattggtattgatgtcttcagctggtatcatgaattaccaaggatccataaagctaccagctcctcgcgaagtgaacctgaagggcggaaaggcactatttcacaatattttactaccttacactgtcctgtgtgtgatgacctaactcagcatggcatctgtagtaaatgtcggagccaacctcagcatgttgcagtcatcctcaaccaagaaatccgggagttggaacgtcaacaggagcaacttgtaaagatatgcaagaactgtacaggttgctttgatcgacacatcccatgtgtttctctgaactgcccagtacttttcaaactctcccgagtaaatagagaattgtccaaggcaccatatctccggcagttattagaccagttttaaattgtcaatatcacagtattacaggtgctatttttttcagtgcttaccactaaactgttgtgcatggtgctttttaactttcatcgagtcaaggatgttcactgtctgttatctgaagactatgaagacttctatgctaaccgaattaaaatgtacttgttgatctctgaatagctcacttcttacaatgtacaaattcctcattctgtcaccttttaaacattgttttataatgcaggtgttggatttgctccagtatgtgtaccatcttgtaaattcatttgagtagatcatgtttacttcccagtggaaggagcactgaaaacctcttaaagaaaaagcatttgtgtgttttccttgaactgtctgtatcaagacgtgttacttcgagatatccattcactttataattttgactgcaaaatattttgtaaatacacttttttacttttcaaacgagtaaaataatgtgcaatgatttttatacaaatgattttcaagttgtttggtatatttcctctaggttttgcttgactcaaagtagatcgttattttgatcaaactgtgcaaacagtagtaccacgtgtagcattttgaaacattattttttaaaaaatgctgtcttgctttagctattaatggggcattgtgaggaactgtgcaaagacatttttgttacaaacctgtgggcctgttgcaatactttaaaaataaaaaattttattccatttgcttgttttgtatagacatttctattgcttctaaatatacttaaaatattttctttccttatgtactgtacagttaatcttatttgccatcatcttgaacacaaaatgtgtatttagaatatttgtataactgtgtaaaataaaaaaggaattatgtggtcagtgcattgttttttaaactggaaatcattttgttttaaaagttaa

SEQ ID NO: 88115 - DNA, 476 bp, Homo sapiens
  misc_feature (1)...(476): n = a,t,c or g
catcgaccccccatcgtagactctaggccagngcggcggaattctgtgggcccatgtgatgtggtgactagacccaccccctgacttctgagggttcattttgtcttttcatgttagggatcctcctgccagaaaccagtctgcatttctctctgggccccacgctggaatgaattcagatagcagtgaagggcacacgtgagaactgcgaatcacgggctttgcttcatgaaatgtgaaatccacattgtttccacaggcaccatcagtaatgtcgaacaaatggagaaagttgcaggtggggctaggaaagctgtattcctgtggattactctagctggtcatttgccccgattgtgaactgcttgaaagaaaaacgaaacttctaagatggttggcctttcatgtcctttctggtgggattttttatttggtgtgcgtgaatgaggagcttcgccctgcttgaatgggacccn

SEQ ID NO: 88116 - DNA, 673 bp, Homo sapiens
ggaattcggcacccccacgtggagtcctgcttcggtgacctgagcccttcctcccccacccctgtagtggctccgggtgctgccctgtaagcacgagtttcaccgagactgtgtggacccctggctgatgctccagcagacctgcccactgtgcaaattcaacgtcctgggtgagcaccaggggtggggtccctcggcctactctgcctgctcctcacctgatgcctctctccctgttcttcttcccctcccctgcagggaaccgctactccgatgattagctgcccagctggactctgcacatggggatggacccttcctgcctgcaccccggtcctcagcctgggctcccaggacaggacaggatgggacagcaggatagacaggacagcaagcccagtgggtgggaggaaggatgagggccccaccatgtccacactgggaaggagggccccacagcttcagactgaggatctagggctgggacctgtcagtcaaggaagagaggtcactttgggaccttctctgcaatcctgtgacgtgagtctgccctcttacaggcagctcccaggtcaataaggaaagagaatatggggccagtggtactgtcgcgagggttctgggagctccctgtggcctgtctgggaattcctgggggctgagactacagtgg

SEQ ID NO: 88117 - DNA, 427 bp, Homo sapiens
gcgcccacgcgtccggggacagttaacattattgaacactaatatatgccaagcactgttctacctcctataatcttagcaataaccctatgagctgggttttattattaccaccatttttcagatgagaaaattgaatttcagagtggctaagcaacttgtccaaaatataagtggtgaagctgtcaaacagtcactgaacctaagacacaattgtaacgtatgctattattttgcgtatctctaagaaacagaaacttagaatttttatgttatacttattgtaagatctcttttagtctgctttatgcaaagcttattatgttgttacatatcagtcttgtttatatataaaaaggaaactacaaagtaaatgaagctctttctaaaacattttacattcagaggatgactcattcaaatcttt

SEQ ID NO: 88118 - DNA, 388 bp, Homo sapiens
  misc_feature (1)...(388): n = a,t,c or g
gcatttcctcttggtgatcagcactgagcacagaggactcaccatggagttggggctgtgctgggttttccttgtagccatcttataaggtgtccagtgtgcggtgcagctggcggagtctgggggagccttggttcagcctggagggtccctgagactctcctgtgaagcctctggatttgacttcaataatcatgacatcatttgggtccgccaggctccaggggagcggctggagtgggtttcatacatcagtaccggtgggcgtaacacacaatatgctgagtctgtgaggggtcgcttcatcatctccagagacaacgccaagatgtcagtgtatctgcaaatgaccagcctgagagccgaggacacggccctttattattgn

SEQ ID NO: 88119 - DNA, 429 bp, Homo sapiens
actgcgcttgatacaatggtaatgaaaactgtatacaggtatttttggagcaaaaatgttttcgcaaagttataggcactccctttactccactgcactgtgcaataatcactgatcatgggaatagcgcatcattgttgcttggggccataaattccagtatcggcagttgtagagatgacaaaggcaggacaccccttcatgcggcagcatttgctgatcatgaggagcgcttgcagcttcttctgagacacagagctccagtgaacgcactagataattcagggaaaacagcactgatgatggctgctgagaataggcaggcaggcgctgaggatattttggtgaacacttcccaggctgaactgactagacaggacactgacttgaatacacccttacatttggcttgtagtaccggacaagaag

SEQ ID NO: 88120 - DNA, 847 bp, Homo sapiens
  misc_feature (1)...(847): n = a,t,c or g
accagatgacaccagcctgtatttcctaggtttctctagcgtttagagttgttgcataggaagcccttctgacctgaatttagaaatagggtagctgttggtttaattgtatcaggtagatcaagtatgcttgtctgccttgaagccaggttcctccttggcttggtgcacaaggtcactatggaaatggctcctgatgacctcctgtcactgcgcatgcctaggccatgtcccttgcaatcagttagagttatatcttaagttaaatagtaaataagttttggtaaatatgtgtcctggatttttatttttgtaacacatggtgagcacctaacagtgtttagcagctcttctcaaactttaatggaaatatcacctccggatgctattcagtaggtcaggggtagacgcttgaagttgcatttctaagaagctcccagattatgtggatgtggctgggtcaggaatcacaccaagtggcaagagtgtacagcacatgctttgtacttaataaatatctgttgaatgagtcctcttctgtcctaacccccaggaatttgaaacctcccgtgaagncacatccttcttctttgttcttctctgggtgagactgtccggaatttttactttcttgggaggttaaaaaccaatcttacaacaaccaccacaacacgccccaaaaaacccccaaaaactttctgggttttttgaaaacaaactctaaccagggaaatggttttgcataatttcccccctccccataatctaaccacttggaggccaacccccaggctgttttttcttgtcgaaaaccatcagggggggccccctggtctggttactcttt

SEQ ID NO: 88121 - DNA, 452 bp, Homo sapiens
ttccggaaggcagcagtgcatagcgggctggcctgtgcgtgggggacaagatcacggaggtgaatgggctgagcctggagagcaccaccatgggtagcgccgtaaaggtgctgaccagcagcagccgcctgcacatgatggttcggcgcatgggccgtgtgccgggcatcaagttctccaaggagaagaccacgtgggtggatgtggtgaatcggcgcctggtagtggagaagtgcggttcaacaccctccgacaccagctcagaagatggtgtccggcgcatcgtccacctatacacaacctccgacgacttctgcctgggcttcaacatccgtgggggcaaggagtttggcctgggcatctatgtgtccaaagtggaccatggtgggctggccgaggagaatggcatcaaggtgggggaccaggtcctggcagccaacggtgtcaggttt

SEQ ID NO: 88122 - DNA, 682 bp, Homo sapiens
cctaaaagtgtcaaaggcctcctgaggtaggaattgtgcattagggaaaggaactgctgtttttcaatataaaccttgtagaactaatacctttgtaactacatgtgttaataatttagcaaccaaaattgaattaaaagtagataaggatttgccctaggtattgcgtgggactccaacagatgtgacactaatgactcttctctcttcagattcccgatacattcttctgcctgtcgtgttacatcacctccacattcacttgcaagaacagaaggacctgatcatgtgtgcacgtatccttagcaacgtattttgtcttatcaagaaaaatagctcagaaaaatctgtgctggaggaaatagatgtgatagtggccagcttgctggatattctgctgaggaccatattggagatcaccagccgacctcagccatccagctcagcaatgcggttccagttccaggatgtcactagaacaggctttctgaatagggagtcttcacatggcagtactacattgagcaccttttcagtctgtgcagacacatatggaaaagtgcccatgacaagtagacacactggggagtttgttgcttgtctcctgtccctattacgacaaatgacagatagacattatcaacagcttcttgatagttttaatacaaaggaagaactaagg

SEQ ID NO: 88123 - DNA, 405 bp, Homo sapiens
cagaatcagactcggtctcaaaaaaaagaagaagggaggggagcatgttgaataggagagattggcagtgagaaacaatttgaagtttagggctgtggtgcagagaggggatgagttagggtttttgagctcaggaggcaataaggcttgcagagatgtttctctctttttccctctgaactgggttctgcactcctcagtgcagggctccaggctggatacttttgaggacactacttaagttcttttcttggactctgctgccatcctccataaccttcctaacctccataacttccctaacctccctaacctccctcacctccataacctccctaacctccataacttccctaacctccctaacctccctcacctccataacctccctaacctccataacct

SEQ ID NO: 88124 - DNA, 391 bp, Homo sapiens
aaggtctcattgtggggtttgagggccgtcatcaagcttctgaagcttgtgccgaatatcgggggtggattgggagatgaaccgaaggtttaagatagtggttccttctgggctagctgggtctaggttggtatattttttaatggcttcagttaaatgagagagaaaaagggctgggttttcattaggaccttgggtgatttctgaaagtttttcatagtttaccgctttatgggcaccctttttgagtcctgcaaggagacacacaattatgtggtttcaacggtggcatccagaggccctgtcttgataatcccagtgggggtcctggttggggactgcctccgcaccagtaggctgggcaggagcttggtgatgaatggtatcagca

SEQ ID NO: 88125 - DNA, 444 bp, Homo sapiens
agcggccgcggcggccacggacacggccgaggcggcgggcagctcgtcctccacgttgatgatctccacggtgcgcgtgggcccgtggtgcttgtggagctggtgctgcttgcgcagcttgtagaaggccacgagcatcaccgcggccatgaacgtgatggccacgaagcagccgatgatgattttggtggtcttcatgacgtcgtccaggtccttgagggcgttctccgtcacatccgtgatgggcaccgtgaacgccttctccgtgggccgcgaggagcgcggggcgggtgccgtggtagaagacgaggcaggggctgcagcgtccccaggccgcctctaccccagacaccgtctgtcgtgggccccgggggctccttctcagtacctcggggctgctgggcctcctcccccggctgtgtctccagcgtctccacagtcacc

SEQ ID NO: 88126 - DNA, 1221 bp, Homo sapiens
agtcaatgggcacaacatataagtagttacaatgaaatgagaagcaatatagcagtcaggctatatgcatgatttaacaacaaaattatcacttccttttaatttagaataagggacaatttaaaaagcatctcttggccctatcatttctgttccagtagttagtgttcatatgtgaatactaagtttgacattcctttctcccatagaaccattttggtgatttggatggtggccactacactgctttctgcaagaattcagtcacccaggcctgatatagctttgataacacacgagtcagtgagattccagatacttctgttcaaaatgctatggatctcctgttctatagctgccagcccttttccataccaatacaaaagcgttaaggagccaggaaaatggtgtttcctgaacactgcaaaacaagcagtcagcatctggtggtagagttttgcttggtcattaaactcttagaacttacttgcatcattaacatttttatgccttgtgggcatgttatacaacctttcatcttaagataaatctgtcgtccagaagatgggtcttggttcactaaaaaaggcagtgtgaatataatgcaatgctaatggatgcaggccttcaaaacactgcaattatatagtgagttcaggtttcaaaattcagtgtttatcagaaaatatctcataatcatatatattcaacaaattattttccaaagatactcatgaagctaaacaaaaataatttttgttcaaatggctcgatgagtttaagaatatgatttgaatatatttgatataataatttagccaagaagtggtctcttagactaattgtaaaacatgaaaagttgtcagcttcacaatttgaaccccatcctttcatcttctccctgagagcctgctaatggtggtctctttctgaagcacttttagaatcttatttttatatggagtgttttactgactatatatatagcaactgagtccctcggttaaataaattataagctcctttaaccctcttaatacatcactctgtaaagatgtagtttataatgcagttcactttgcaatcatgcctgactcccggcatttttactttaatatttagaatgaatattctcaatatgtgagaatactagtcttgaaagaatgactctgggtgttattatatagcacgtgtgtatataaaatctatggttttactgtc

SEQ ID NO: 88127 - DNA, 637 bp, Homo sapiens
  misc_feature (1)...(637): n = a,t,c or g
aagtgattgcctctgaaccaacaccagggaaggtatagggaatagcaggggagactgctgggcctccacataaattcttctctactgtttttcttaaccatatacatagtttactttagaaaatttaaataacgttcaagtgtgggcatcctgccttcatcctctccctcccccaaccctcacatgtacatggaagagatccaatataagtctctagtttttttgtttgcttgctttttacttgctgtaggcaagaggtttttttttgcctgtgaacatctaaaatttgggggttttttgtttgtttacttgttttaaagaagacagggtttatttttctctcaaggcttttgctctcaagttgttttggtttctttgtatgttcttttagacctctcacttgactatgcctctcagccagcaaatcttcagttccctcacataatgccccttgctgaagacatcaaaggttcttgcttccaaagtgggaataaacggaaccatgaaccttttattgctccacaaagatttcgaaaccaagaggggggctttggcagtaatttttatccccccccccccccaccagggaanntttttggcccccgccccaattttttcctcattccaaaaatacccc

SEQ ID NO: 88128 - DNA, 813 bp, Homo sapiens
  misc_feature (1)...(813): n = a,t,c or g
cctgcctcagcctccagcatgactgggattacaggtgtgagccactgtgcctggcctggtattgggtcattttagagaacagggcatagcaacagcaagccagggagctgatgaaagcagaatgatacttcggcatcaccccagtgtctttgctgctctcttcgtagacgtaccgtgagcccgtgtcagactaccaggtcctgcgggagaaggctgcatcccagaggcgcgatgtggagcgggcacttacccgtttcatggccaagacaggcgagactcagagtcttttcaaagatgacgtcagcacatttccatgtgagagttgccccactgtgtggaccctgtcttatttgaaacactcacattatcttttctttctctcagcatggtaggaagaaacaaataagcttttgtccttcccttgggtacagcttgcctctcagatttctggctcccttccccaggtcttaagagtctgtccttaactgacgactccaaaacagtaatggtctctgttgggactggctgcttgaggtccatagagttaccttgagggtagcctaggcctaggcattagagacacttgggggcagcccaggtagtagaagaacattggcatcaggggccagttgcccatcgtgatgttccctcgtaggtcccacctcatttaacttggcatctcagcactattttgccattggtgaccaagctactttatttccaacaaccccagtttttaccccccgattgaggaaggtttgtttgntggatttattttcgacaaggttttgggaaaacccattgtgccccgga

SEQ ID NO: 88129 - DNA, 611 bp, Homo sapiens
tttaacaccagactatcaccactttaattctcctccctggccctaactactgaattttttattaaagccataagctgcgatggaacctaacctctgtgccccttcaatgtggaacatgtggtcatcaaagaagatgtggggccggatcttcaccaagatgggacttttgggggctccagcaaggaaaagagcttcgtctatctctagaccccagcgtcgaagggtcttcagcacacgggcgcctgaactggctgcactcctagctgtaaccaggtaggtcctgataggacaaagtaaccgttcatttttggcatagaacttcttttgcagtctgcctaaatcttccagaaagccttttaggggaccctgtaaaaggaacatatatcacagctgtgatacagtgagccaaagaaagtgaatgctaaaaagcagagacctatatgatacgatacaatacaaaggatataatacagcatgacatgcagtgttatgaagctgatggcaaaatgctaaaacttgataggaatttatgtgaatatgttttctgatatagaaccatccttgcattcctggaatgtgccttaaatgaccatattatttaacatgtaaac

SEQ ID NO: 88130 - DNA, 635 bp, Homo sapiens
  misc_feature (1)...(635): n = a,t,c or g
attaaagaaatctcccaaggtgcacctttgtcaaatctgtacttgtagtatcctagaagcttaaaaaagacatatcataataacttgtaatgatgcctgacttaaccaactgtcccaagacagtcctatttgtaacaactctgttccaaagttatgacttatagccatagaaaataaaagggagagatgggacttagtgcagcatttcccaaagtatgttctcttctgctacacactcctagacaagaggatctcgtaagtttgaaaaactgtgctccaaatcctcctcttggagtttcacaatacttagaagcatagtaaaggctctatgaagtcttaaaattagaaaacctgtttaatccagtgtctgccaaatttatttggcaacaacatcattttgtaacttaaaaattgtataaattatggggaaatatatatataccataaagtatgccattttagccatttttaagtgtataagtcattggtgttacattcaccatgctgtttcaccagcagcaccatttccaaaggttttcataacataaacagaaactttgtacccattaaacaataagtcccccattctccctcctacccaccaatcccttaaaaaaaaannnnaaaaaaaaaaa

SEQ ID NO: 88131 - DNA, 397 bp, Homo sapiens
ctcagctgtaaaaaggatgtaacaatacttgtctcgtaggcatatttgaagattaaatgtgataataaaattaaaatgctaatatagtatctggtatattataagtactcaataaatgtcacgtttctcccagattcccctagacagaatgaacctctccttccagtacaatcccactgctcttagaataaattaaaattcttaaattctctgatagagtttaacatgtggtattttaattttttaatgcatttatctttttccttagctaagttttgggttttaccttattattcccaatgtttagcacagtgcgtgtcccccagttggatgaatgggtgaaagataagatgaatgggcaaaacttctcttatagcaagcagattcaaattgcatt

SEQ ID NO: 88132 - DNA, 1206 bp, Homo sapiens
tttttttgtgatataagtatgaatttattgacatgaacttcctttagctattactctaacacagggtatcaaagagctgaagataatgatactaaacccacaggatctgaagtttggagggctccctctccctcagagagaaagaagagagagagagagagagagagagagagagagagagagagaaatatgaacaaatcttttaaaaagaaacctggagaaacgccttcacctataataagaagtaatgacagtttgacaatttaagcatttttttccagaaacatatatctattccatagataccaaatcgattaccatataattgagtttgaaagtatacaaaatatttgttcttacatactgaaattaaaacctaattttaaaaagtgcacagtaaaaacagcataaggaaacctacaatatccatgacatacgtattgttttccatttactgccgacatcaacttctgtatttgcctcactggttacaaatatgttttaaatatttcaaggccgtttccaacactgactagtttactaggtccaacaatactttagcttcctgaaggcagccagcatggacgtggtctcagccctgcggctctgtgcagcaggagcaggtctggaaagaacagtcgccaaccagctatttcaaaactatcgactcttgttctttttagaattccccttactggacatctttagtgtgtcaatctcttctctctgtttagataatgtctcattcatgctgcacaggtggtcactcatcatacttaactgatcctcgtaactcctcttggtagttgtcagctcatcctgaagtctgctgatgttctgactggcaagtttcaattcttctgtcaatgcttccttagacttttcagccaaggccagtcttttagacagtgctcggcactgtaaaatcagaaaacattccattactagagggagcactttctaaaaccaaatttgcttcgggaaagtttgttaaaaacacttctcaaagccaaagctactcattcattccacaaataatctgttgaatacctataggcattgtgtcacacatcagagtacacctaagaaagaagtggcccccagctttgtcatttcagtaaggggaaaaaagtctaccaacttaagatcaatgtttttttcttcactctagcctgatgaccagtggttatatataatacataagaa

SEQ ID NO: 88133 - DNA, 402 bp, Homo sapiens
  misc_feature (1)...(402): n = a,t,c or g
cccacgcgtccggtctgaagagtatcccagtatgtacctgtggagcagcttctttatcccttcatctgtggataagcagtgcaggccaaggccccctgcccatggaggtgtgctgcagacagcagcagcagcagcagcagcagcagcagcagcagaggcctggcttcctgaggaattgctggccggtttgaggaaggaaggaagtcccacctaccatgatcaccctccagcctggaggaagctccatgccagcagcatggaccagcatgggagccagagccctgctaatgctgcagctcatcacccctgctcagcagcccagcagcccagcagccattgccacatcccatttccagggcctcctgcccccatgcccccacgtgcccatggaccgacacaccn

SEQ ID NO: 88134 - DNA, 388 bp, Homo sapiens
  misc_feature (1)...(388): n = a,t,c or g
gagggggatggtacacccatgacttaaaacgctgtgcgcatggaatctgtggaacgcatagtgggggccatcacgtcaaccgggcttgcaaccctgaatctcctgtaaagcttggcttatggcatctggctggcctatagcctaggccactttgacagggagatctgcccccagaggctctcctttgtactgcccccatcccagggcctggcatgggtgtcatctgagtactgaccctgatactgtgctcatgtgtgtgggtgttggcccctggggaacactgatcacccatctaacaccaagagctgggggcctgcccctccatcttcccaagccatgctgncttctgtcctgctgacactcatgatcccatttcttctctttcagg

SEQ ID NO: 88135 - DNA, 695 bp, Homo sapiens
gtaagtcaagccatcaggtccgatcactgagagcctccctctttcaccggggtttgggtctgggtctgagctgccgtcgctctacttggtgtccggaatctacgggggagtccgccgtgggccgcccgcccgtctcgaagcctagacctcggaggcttccaggcagtccgagcgtgtggactccgcggccctgagcgccctgtcgcttctctcccgcagcagcaaagtctctcgcgacaccctgtacgaggcggtgcgggaagtcctgcacgggaaccagcgcaagcgccgcaagttcctggagacggtggagttgcagatcagcttgaagaactatgatccccagaaggacaagcgcttctcgggcaccgtcaggttggcaccgttctgatcccacccagccctcagtgcccccgtgcttgcccctcccctgcaggctcccgctgagccggaggcgggcacgtcggtactgatgtgctagggtagttcagaccccctgctccgggcaggcgcggctggacggacccccaccctgggtcttaaaacatgaggggaggcgtgggtaggcctcggccgagcccgccggccagcctgagaagccaggctggctgctggtgaatgtgaacgctccgggtaaaggctccggtgggctgctgcggtcccagacccttcaccggcccttgggacccaggggt

SEQ ID NO: 88136 - DNA, 451 bp, Homo sapiens
  misc_feature (1)...(451): n = a,t,c or g
ccacccctgcacctgcaagggcggctgcttcaaggaacccacccccaagtgccgacgaaggaaggctgagctcagaacctggggctcgcagccaggtggggccgcggacatgagaccgttttcagaatgggggcaaaatctctgcattgcctgagacttaccctcatttgttacattagcattgggaaaataccccagcgggacaaggggctgactttcccccatccatctggaagtttccatctgtgctgccgacacagctggcatcctctgcccgcatcctctgcccttggaacccaacatttttcatatcaaaccctggcctcgcagtgcagcctgcggggcgtggtctttggcatccgactaccccgattccaattcgggccctcttgaccctcgtccaagcgggcgtccgatgttatcgggctattcagtnnnnnnccctggcact

SEQ ID NO: 88137 - DNA, 473 bp, Homo sapiens
  misc_feature (1)...(473): n = a,t,c or g
atcgagacccttggaagngcgctggaannncnnnccacgctttctgttgatcagattttgaagttgcgccttacatcaaggctgtaatatttgaaatgagtttgatgcctggaccttgtaactgttacagtgtgatttgaaaaccgttttttcccccagaaatggctagttattttagttcttacagggcagccttctttcccattttgaaagctctgaatcttagggtctcaattacagaggttcaatttggaataaacactaaacctggcttcctctctcaggtgcacggtctgaatctgcacagagcaagatgctgagtggagtcgggggctttgtgctgggcctgctcttccttgggacagggctgttcatctacttcaggaatcagaaaggtgaggagcttttgggagctgaatctccataggcttttctggaggaggaactatgactttgctagggttagttctcag

SEQ ID NO: 88138 - DNA, 733 bp, Homo sapiens
  misc_feature (1)...(733): n = a,t,c or g
gtttaggactggaagcatgcagccaactaagcatggctacttcagaataaaattaacactgagttacaaactgaagtggcaatgttgaaatccatggttctgtggttaggagaacaggtacaaagcttgcagttgcagcagcaattgcgtcatcattttaatcacattcatatttgcgtaactaacttagaatataaccaaagtgagtatccatgggaccttgtgaaagcccatttgcagggagctttcacatccaacatcacctttgatattggtgaattacaaaacaaaattattgatttaaataggcaaactcaagagtttcagccttctttagaagactagaccaaattccagcaaggcctggagagcctcaacccttggacctgtctaaagcaccacattaacatcttatatgtagtccttggaataatgttgttttgtctctgtcttctgttcatagtctgtaaaattggatggactgccaatcagaaaatgagagctgcccagcctggccttacattctttcaattaattcataaacagaaagggggaaatgtagagagctgaatgcccatnnnnnnnnnnnnnnnnnnnnnnnnnnnnnnnnnnnnnnnnnnnnnnnnnnnnnnnnnnnnnnnnnnnnnnnnnnnnnnnnnnnnnnnnnnnnnnnnnnnnnnnnnnnnnnnnnnnnnnnnnnnnnnctccctggcgccatgctctttgaggttat

SEQ ID NO: 88139 - DNA, 492 bp, Homo sapiens
atttgctgcttctgatctcctgggagctggccctggtagagccttgctcagtaggaccagatcctaaatgaaatggactgtgggaggttccctgtgggtgaggcgatgagacctttgcagtgctgagggtgacaggtcttggtggccctgcctggttcttgccattgctctgaggtgagatatctggacacgtaaggtgtcactgtgattgtgtgggtgtcggtggggcagggctagaaggcaagcctggtgaccaggagcacgggtgcccacctccttcctctgcagcccctcccttctcctcccctcacttttctccctcacctctcagctgacagcaagctgctgctggaaatgcccctccactgccccttccctgctgcatggactgtggcccgcgggactgccattggtgccctgatgtggggttacccatgtgtccgtctcctccacactgcattctcccacacggcgtgatcccatggctgggtc

SEQ ID NO: 88140 - DNA, 432 bp, Homo sapiens
atggacatactttgttccacgctcctgctactgactgacccgtcctgggtcttatcccaggtcaccttgaaggagtctggtcctgcgctggtgaaacccacacagaccctcacactgacgtgcaccttctctgggttctcactcagcactagtggaatgtgtgtgagctggatccgtcagcccccgaggagggccctggagcggcttgcacgcattgagtgggatggcgataaatactacaacacatctatgaagactaggctcaccatctccaaggacaccttctaaaaccaggtggtccttaccatgaccgatatggaccctgtggacacagccacatatttttgtgcacgggttgaagtgggcgaagccgcttttgatatctggggccaagggacaatggtcaccgtctcttcagggagtgcatccgcc

SEQ ID NO: 88141 - DNA, 507 bp, Homo sapiens
  misc_feature (1)...(507): n = a,t,c or g
gagccccccccacttgagactgaggacgtgcgnngaactccaggctaagagtgggagggctggctctgggtagggagaactggaaccacgtcgctgctggctcgctagcttaaatgcagcaaggacaaggcctgggagtgtgctcttggcttggcggccacagagacacagagagagagcatgctggacagcctggagctggagcccacctacaaccccttgcatgttcaaagccacctgtactcacacctgagcagcatctatgtcaagcctcaggggcggctccacccacactgggagagccgagctccgagaaagactgggcagttgcagaccaaccgagctcgagctactgtggcccccctgcctatgactcctgtcccaggcagagcctccaagatgccagcagccagcaaatcttgctgagatgccttcttcctgccttcagagagggagaaggatccctcaaggccctaagtcaccagcaccagagccctactgcccagg

SEQ ID NO: 88142 - DNA, 425 bp, Homo sapiens
cggacgcgtgggctaaggtcagttggaataattctttttattattttctgtgggttatgtcaccaacttgatacacaggttcatttgttttagtttattttcagcttttagtgattcctgtttttgtttctgcatgtaaaacatttgcatggtttcagattttaaactatgcagcttccacctctgtcccttcaacactttttattccctttacaatgggctagttcttccgctgcaaatacaaacatctacatgtgtatccattcatttagatgtgccacaatttgttgaaccattcagcagttgatgaacatctagattgtttccattttggggttattagaaatgaagctactataaacattggagtacaggtttttgtttgaacataagtttttgtttccctaggaaaaatgccgaagagg

SEQ ID NO: 88143 - DNA, 969 bp, Homo sapiens
ggaaattgtgtctctctgtgtcgctcagactagagggcagtattacctctactagtcagcctggttagcctttctgatgctgaattaagtcctgagacatgcatatctagtggtcctaaatattctagtccagaagaagaggaattttgttccttagctaagaatcatttcagggccaatgcaagtaaaaagtaatttagctctcccccccccccgccccgcccgagagagaaaaatataacacgtcacattcactaatatttaacattaagagcagggaacataaaactttattcactgcaagagctgcggtcctgagggaagaatcctctgaactgagtcagcactgagctgagcgatggagcctcagggatgaaagaataaagcagagagcctggcgtccaggcacagcgagacccaaggggccctcccagtgacaggaagaggtgagacagaggctgctgcttgctcagaggccccagagcagctccactgcgcacccaaggactcaccacctttaccactaacaagctctgccagtttaatgtacagttactctgtaccacgtcctgggctgggcactgcagttcctgggaaaatgacgcagtccaggccctttaggggaagcctgggaagagggaactcagggggattgggaggatggggtgggtgaggctcactccctgtcaagctgggcaaagcgccgtgtctgagaggcaggcagctaaccgcgagccggcggcgttccatttacaatctggtgagcctgtattggtataactcgtattgtgaggcttttgagatatcttgtgaccttgtgattttccccgtctttggtgcttttgccccctgtagtgacaagcagttaaaaaaacaaaaacagaaaacactcagaagggcagtgcttgctcagggatctgcagacagggcaaatgtcaagctctcacccagttctgctgtcgaatgggg

SEQ ID NO: 88144 - DNA, 1968 bp, Homo sapiens; identical to SEQ ID NO: 65013

SEQ ID NO: 88145 - DNA, 738 bp, Homo sapiens
tttcgagaaggggcgaggcccgtttgcaggggccgctcggcccggggaagcccgcgccccgctcagccttgcagccccgcgcccggagcatctccctggaggaacggagacaaaggaggattcatgtccaaagggctcccagagaccaggacggacgcagccatgtcagagctggtgcctgagcccaggcctaagccagcggtgcccatgaagcccatgagcatcaactccaacctgctgggctacatcggcatcgacaccatcatcgagcagatgcgcaagaagaccatgaagaccggtttcgacttcaacatcatggtcgttggccagagtggactgggcaaatcaacgctggtcaacacgctcttcaaatcccaagtgagccgcaaggcctccagctggaaccgggaggagaagatccccaagacagtggagatcaaagctatcgggcatgtgatagaggaaggcggtgtcaaaatgaagctgaccgtcatcgacaccccaggctttggagaccaaatcaacaatgaaaactgctgggagcccattgagaagtacatcaatgagcagtacgagaagttcctgaaggaggaggtcaacatcgccaggaagaaacgcatccctgacactcgtgtccactgctgcctttacttcatctctcccacaggacactccttgcgacctctggatcttgagttcatgaaacacctcagcaaggttgtgaacatcatccctgtg

SEQ ID NO: 88146 - DNA, 61 bp, Homo sapiens
ttttttttttttacaaccttaagtaatctcaataataaaattttctgatctgtattaaaaa

SEQ ID NO: 88147 - DNA, 1101 bp, Homo sapiens
accggcccggaatcccgggtcgacgatttcgtcgctcctggttctgccagctcccctgagagcctgaacccgggcttgagagcctcgccaccccgggtgacatccctgccgtgggcttgggggctctgggtgtgattccgccggtccgggtcccgcagcgaccacctacccagcgcagtcaggggcggggctgggacccagagcgggaccccggctgccgagtccaggtgtcccgcgggcctcgatttggggagcagaaaacgccaggtcttcaagggtgtctgccaccaccatgcctgacccatttggcagcagcctcgtgtgtggtggtctggtgtggacggtggaagcgtgattctgctgagtgtcagtgtgaccactcgtgctcagccgtatctcagcaggaggacaggtgccggagcagctcgtgcagctaagcagccaactgcagaaacgtcaggtgggtggtgcattcgcaggcatgctgaagaagcagttccaggcatgggccgccggcagagaggctggctgcagcaccccccaccaccatgcacatcgtgctttgcttcttcctagagttagcggctttggcaggccatgccttgtttgtgttcacagcctgcctgtcaggagcgaagacagaacgtctgacttttggatccgtaacaggggtgggggctccccagaagagaagaggctttgggtcctggccagtgtccactactcagtcaaacattcagaaacttacatgattcttcatcgtcccaagcaagtctgacttgggccctttattgaaactctgtttcctctcccgctgcctgtctgcctccctctcggagtgcacctactgagcaccagccctccattccctgccagccacacccagaaagcaatggggctttctgggaaggcagaaatattctgtgacctgggctattcagaggggtggcgtgagtcgtgtgtgcctagcaaacactcaggacatggccggtgagacagaagggctgagcttttgtcctagctaatatattaattaattcattcattatttattttgagacggagtctctctgtcgcccaggctttccggtttaggaatca

SEQ ID NO: 88148 - DNA, 393 bp, Homo sapiens
acgttctgtacaatttatcttccaagtcacctacttgcccatttgcccttgttccctcccttcccttccctctccaacttttttccagctccactccattgactccactccatccattccatccatccactctatccggtccattcactccactccatccactctatccattccattgactccactccatccattccatccactccactccatccattccacccactccactccatccattccacccactgcactccatccattccacccacttcactccatccattccacccacttcactccatccattccatccacttcactgcattcactccatccattccatccactccactccatccactccactctatttcacttcactgcatttgc

SEQ ID NO: 88149 - DNA, 399 bp, Homo sapiens
aaacccccccgatctcttcagcagatatgcaggcttctgtcaaaccccttccctgccagggcccagatacgtcaaagctgccctgtgttcttctaacacagcacacgcaaaggcactcacactctcacagcacataacagacgctcctcacactcacctctcataatagacatcatcacacacaggcacacactaacacaaccttataccccattatacacactcaaacacatacaagctgtcacactcactcacactgtcatacatgctcacacacactcacatgtacagacaatcgcaaatacctacaagcaggcccagccattcagaaccgcctgaactcccttcgtgacccctctccaccctccctccgcccctaggcattgggatcacctcctg

SEQ ID NO: 88150 - DNA, 423 bp, Homo sapiens
  misc_feature (1)...(423): n = a,t,c or g
agccccgccagctgacgcccttcgagaaactgacacaggacatgtcccaggatgagaaggtggtgagggagatcacgctggggaaacggataggcttctaccgaattcgaggggaaatcggaagtggaaacttctcccaagtgaagcttgggattcactccctaaccaaagaaaaggtggccattaagatcctggacaagaccaagttagaccagaaaacccagaggctactatcccgagaaatctccagcatggaaaagctgcaccatcccaacatcatccgcctttacgaagtggtggagaccctatccaagctgcacttggtgatggagtatgcacggggtggggagctcttcggaaaaattagcacgaatggcgaagcggccgctctctgnnnccnagcttcgtcgctgccaatgccat

SEQ ID NO: 88151 - DNA, 411 bp, Homo sapiens
ggtacttgatgtgtctaaatatgtaaatatcactataaaaacagaacctggaaagaatatttggagctgtatcctgattggcgaattcgaactgtttccagcatcccggggtatcgaagctgtctaagtaccaagacatcactgaaccttaagggcagctaaagcaaatggaaaaaagattaacccagaacagtagatctccaaattaattatctgtttataagcatgactaactgttgagtatctagagattgactggaggttgtctggttaacatatacagtaactaagtatattaaggcaagctcacctctcagctggtagcttcagaaaagttctgactgcccaaccctagggaaaagagagaaaccaagcttccaggcttctctggttgtgaagagagaggacctt

SEQ ID NO: 88152 - DNA, 536 bp, Homo sapiens
gtgcctcgtacaagcttggcacgaggctggatttttggcaggtatatcaatgatgttttataaaagcacaactatttttctgtatttagcggccaaattggtagagacaatgtatttcaaaggcattgaagcagggaaggttccctattttcctcatgcagatactatcatctattccatctctacagcaatttgcttccaggcagctgtcatggaagttcagactttgagaccatcttactggaagttccttttaagactcaccaagggcaaatttgctgtcatgaaccgaaaagtccttgatgtttttggtactggtgcatctaaacactttcaggatttcatccccaggttggatccaagatacacaactgtaacaccagagttgcccacagagttttcctgaagatgactgtaacttattaatgtgactaaatgtttcatcttgaagagttaattatgttgaacacaaaggagggggcccaagctcgaacttcagtgttatttcagttagagatactcttttcatttgtttt

SEQ ID NO: 88153 - DNA, 397 bp, Homo sapiens
gcaactacattcaaacctcatcgatagtggaatgatgtttaacctggagagagatctcttgttctctttcttgttctgatattctttgaaacctatagttgtgaacctctttattctagaagtgaattttaatgtaaagaattttgtccaaagtaatgttatactccagctcaggaatgtacatatacatacacacaggggacttcaaaaagtttgtagaaaaattgaaataaaagataaaaatacgaaataaaaatttctcaacataagctccatcaagttcaagacactcttgtgagcaatgatactagccatcatttagtccatccctaaagaactgagggacctgggaatttaacaatgtcagtgcaaccatttctttctttttctttctttt

SEQ ID NO: 88154 - DNA, 491 bp, Homo sapiens
attgatgtcttaggaccggccgataacacgttcgacccacgcgtgcggagcgtcagtttttcatctgtagagtgggtggggtggatgtttgtgtgctgcacgactgttgtgggggttggaggtggtgaacagaaggtccagcagtcacctgcacacagtaggcgctcatttcaatgacatcacccccatccctgacatcatcgtgctcaaggtctgggaaggcacctgggggttgtgatcggcatcttggtggccgtcgtcctactgctcctcctcctcctcctcctcttcctcatcctccgacatcgacgtcagggcaaacactggacatcgagtgagtagggaaggggaaaccctgtgggccgaccgagggtgggctcagggcacagccaaagagaatccaaaccactgggcaaatgcagctttgagaaactgttccagcatttctcaccaggtgaatggagaaagcacttaacgtcagtcccatctac

SEQ ID NO: 88155 - DNA, 409 bp, Homo sapiens
  misc_feature (1)...(409): n = a,t,c or g
ggaggcaggagggaggaggaggaggggtctttgtcggcgtcctcgtcctcatccgcgtcatcatcctcggggggctcaaccacctgagcctcgtgctcggcctccgacaaggaggaggaacaggagagcaccgannnnnnnnnnnnnnnnnnnnaggaggaggaggaagtacccccgagccacctcttctcctcctcaacctcctccacatcatataaggaggacgacgacgacgacagcgatgaccgccacgagtctgataacgacgacgacgacgccgccctctcatatgcgactgataaggacgacggggactcctatgaagaggagacaacgagcatcgttgcctcctaggccgaagccacctcgtccagtgagaggagcgactcttctgaggatgaggacaccc

SEQ ID NO: 88156 - DNA, 436 bp, Homo sapiens
tcgacgggaggcaggagggagatggagtgggaaggtgaactatcatttatattatcagtctactactccataacagaggtaaggaagaggatgcatggaatacaggacatcctttaaagcatctcttattattaccatgccctttgattaaggtcaaagggaaactacaatagcgcaatccaggcaggactacaaatgacccagacccttcaggaatgaaggtttgggtcactccaccagggaaaaaaccacagcctgctgaggtgcttgttgaaggcaaagggaatacagaatgagtagtagaagaaggtaatcatcaataccagctacgaccacgtgaccagctgcagaaaccaggactgtaattgtcatgagtatttactccttcttttgttaaaaacatgtttttgcatgtatacacttgtactaagaaaat

SEQ ID NO: 88157 - DNA, 409 bp, Homo sapiens
ggaggcaggaggtgctggggcagctaccagcccacgtggaggctgtcgaagaagctgctcgggagaggctggcggagcttgagggccgggagcaggtggccagggcggcagccgccttcgcccgccgggtactcagcctggggcgagaggccgagatcctctccctggaaggggcgatcgcacagcggctcaggcagctgcagggctgcccctgggcaccaggcccggccccctgtctgctcccacagctggagctccatcctgggctcctggacaagaactgccaccttcttcggctgtcctttgaggagcagcagccccagaaggatggtgggaaagacggagctgggacccagggaggtgaggagagccagagccggagggaggatgagccgaagactgagagaca

SEQ ID NO: 88158 - DNA, 402 bp, Homo sapiens
gagcagcactgccggcgggggcgggtgccagggacttggaggtggaggggacgcggcggtactctggcgtcttccgacttcgactccttaccttaaaagatgctggagtcatatgtaactccaattttaatgagctatgtgaatcgctacatcaagaacttaaagccgtcggatctacagctttcactatggggtggagacgtggtactcagcaagctcgagttaaagttggatgtgctggaacaggaactgaaattaccattcacttttttaagtggacatattcatgaattgaggattcatgtaccatggacaaaactgggttcagaaccagtggtaattaccatcaatactatggaatgcattttgaacttaaggatgggatacaggatgaccatgaaa

SEQ ID NO: 88159 - DNA, 412 bp, Homo sapiens
tttcgtagcgaggctggttaccagactggacccgctggtggccggccctcaccacacggagacctgaactcactgtggctctggtcccagacagctgtagggcttctccacacgctggcagagtggatggagctcatctttaaggcatcatagagaactcaacagggaacatccacaaaggacaagcccaaaaacaacaatagaacccccttacgactgaggtgccttccggaagaaactgctggatagttggaaacgggggctgtggagagcgggaaggacagggctgctacaccattgtgcttccttgtgaagtggatgcttacctgcgtgagcgaggagcatttttcttttgcaggaatgaaggacagccaacgaagtgtgttcctgccctgacacctgcattcactct

SEQ ID NO: 88160 - DNA, 473 bp, Homo sapiens
ttaccgggtcgacgatttcgtctgtggcgaacggaggcgagccggatgtggggttgttgtctgctctcaggccccgcctccccggggccggctcgggccacttcttgcgcgctgccagaaggagctattttgagcaggtctgtggcggaagtgggtgttcccgggtctctgctgcccagctgtgcccgctgccgtcttggggtcccggggtgcgcgggttgggctgggtgagctcagaggcaccttgtcggcagccgagcctgaagaggcgacctcgaaacgcctcgtgagacctttcgcgggcacacgcccttcgcgttcctccgcttcctcccacgtttcttcagcccctggcggggcgctggggtgcccggtagttaagggtggggtggcagcgagcgtttctgtgcacccgcagcgtgccacgcccgtgctaagcactttgcctatagagccagtggcttaattctgca

SEQ ID NO: 88161 - DNA, 383 bp, Homo sapiens
cataaataaagctttattggaacacagccatgtccatttcatttatatatcagctatggccgcttttgtgctatgacagcacaattgagtagttgcaacaaagactgtatgggccctaagcctaaaacatttactatctggcctgttaccaaaaagtttgctaaccctatgtctatattggttcacagagttgtaattgttcatttgcattatttcattgtggaatataccacaatttacatatccattctgtttatgggcatttgggaagttcccagtttggggccattataaatagtgctgctgtgaacattcttggacatctctttcggcaaacatatgcaaacatttctgttgagtatatacctaggagcggaattaat

SEQ ID NO: 88162 - DNA, 397 bp, Homo sapiens
tattggaagagtgaagagcagagaactttaagtttgaaatttggcatcactgccctgaacaatataaccttagttggcataaactactcatacagacaaaggcattatccatcacaataagtaactttttgtctttatttcaaccggacaatcgtgattagaaaagctcctgtgacaaaattcaagaaaacctgacataaatgaacaacaatacaacatgtattcaaccatctatgatctcttccatggctttaccaatcatttacatcctcctttgtattgttggtgtttttggaaacactctctctcaatggatatttttaacaaaaataggtaaaaaaacatcaacgcacatctacctgtcacaccttgtgactgcaaacttacttgtgtgcgc

SEQ ID NO: 88163 - DNA, 1373 bp, Homo sapiens
agcccaagatttctagggcattggcgcgctgctgggtgacttccgggctcaagttgcaagggggcgggccgggccggaggtggagtctcccgccaattgaagcctccgctataaattgaactccctgcactgctgaagcccagatgcctcgccaggccacgtcgcggttggtggtcggagagggcgaggggtcccagggggcttcgggcctgcagccaccatgctccactccctgctgcttcactccttgaggctctgcgcccagaccgcctcgtgcctcgtgctcttcccgcgcttcctcggcacggccttcatgctctggcttctcgatttcttgtgtatccgcaagcatttcctgggccgccgccgccggggcaagcccgagcccgaagtggagctcaacagtgaaggcgaggaggtgcctcccgatgacccgcccatctgcgtgtccgacgacaaccgcctgtgcaccctggcgtcgctcaaggcggtgtggcatggccagaagttggatttcttcaagcaggcgcacgagggcggtccggcgcccaactccgaggtggttctgcccgacggcttccagagccagcacatcctcgactacgcgcaagggaaccgcccgctggttctcaatttcggcagctgcacctgaccaccgttcatggcgcgcatgagcgccttccagcgcctggtcactaagtaccagcgcgacgtcgacttcctcatcatctacatcgaggaagcgcacccctccgacggctgggtcaccacggactctccctacatcatcccacagcaccggagcctggaggaccgggtcagcgcagcgagggtactgcagcaaggtgcacccggctgcgctctggtcctcgacaccatggccaactccagcagctcggcctatggcgcctacttcgagcgtctctatgtcatccagagtggcactattatgtaccagggcggccgtggccccgacggctaccaggtctctgagctgcgcacttggttggaacgctatgatgagcaactgcacggcgctcggccccggagggtgtaaacatccaacggacaattgactgaacttggtgggctgggccttcgagccttcgaagcccacgtgcaagcgcctcaaaccaagtcacgcttggcgaggccccagtgacactgatgtgctgagccaccatttcagactgagtctgcaccctcagccacatgaacaatctcccctacctccctgggactctgcttctgtaactgtctcattcacacctgcctggctcactggaaatcctcttttgagcgcgggatatggcttgcccttgtccgtgtgcccccaggactttgcctctacagcattttcttacaccccctcc

SEQ ID NO: 88164 - DNA, 624 bp, Homo sapiens
tatgaattattggtattcccaaggggaagaaagatttaaagtttagaaaacctagccaacaaagtaattgatgaaaactttccaagcctaccaggagatttagacgtccagatacagaaggcctagcagtcttcgggagaatacattgcagaaaggacttcatcgtgacatattataatcagactgtctaaagtcaaaatgaaagagagaattctaaaatcagcaagagaatagtgtctagtcatttataaagaaaatcccgtcagactaacagcagactttttagcagaaaccttacaggccaaaagagaatgggatggcataatcaaagtgctgaaaggaaaaaacaaaaaaaccctgaaagccaaaaagtactttattggctgaaagctgggattagagaggtggtaaaagatactcatacaaacaaaccacaagtgagcaggagtagctatacttttacaggtaaaacagacttcaaatcaaaaacaggtttaaaaaatacagagaaaatcattatgtaatgatgaacggatcaattcagcaagaggatataacaattctaaatatatatgcacccaacaccactaagtatatatgcacccaacaccagagcatccagat

SEQ ID NO: 88165 - DNA, 387 bp, Homo sapiens
caaagaataaaatacttatcaagttttgttaaatgacaacacagcataccacaacttatgagacacaacaaaagcagtgccaagggggaagtttctagctataaattcttacattaaaaaataagagtctggtctgaagaaagcaaaattaaaaattatttaaaaaataagaaaaatatcaaatcaccaaccggactttccaatttaaggaactgaaaaggaagagcaaactaaacccagagctagcagtagaaaggaagtagtaaagattacaatagatataaatgaaatagagactagaaaaataatatagaaaaatcaaaatgaaaccaaaagttggttattcaaaaatcaaaaaactttgcaaatctctagctagatctactt

SEQ ID NO: 88166 - DNA, 431 bp, Homo sapiens
acccacgcgtccgggcctacgggagccgcatcgcaggtatccgggtactggatggacctctcacagacagcatggaggcagtggcgttcaacaagcactatcagatcaatgacatctacagctgcaggtgaggcagagctgcagatgagagggcaagagcctggagcacctgggacaaatccgccaacaaaatcccaaccagtgggctgacttaggccggagcaggggtctcctcattgggttcagctaataagtccattgccttcatttctctagattcccagccactgggcactcaaccttaagcccccgtcacccccgtaatcagattgccacatgagaagccctggcctgtgcacatttatttgttttctaaactcctaaggcctctgcaagaaagcgggctttcttctccatccacaggccagctg

SEQ ID NO: 88167 - DNA, 633 bp, Homo sapiens
gtaggttagataatggaattgtgaaacctttgaggattggcatttagaatcacaatcggtagtgcccattttcctaaaaagtggtgtcagtttatactcttgccaatagaatatgagtctgtttatcatatattctcatcgatgttggatattctcagtctttaatgttgtttttgttcttttccaatcttatgggtaaaaaatgtcatctcattgttttaatgtgtacttccctgattactagtgaggtcaaacatcttgtcacatgtttattgctggcttgggcttcttcctcaaaaaattccctgtacatgtccttgtggacaagctatcggtaccacaagacttcaatacttagcacagcgcgataccacgatacccgcactcacacacacaccagtgaagcaaattacgacgtccagacacagttcccagtatataaaataatttgacacacaataagcgcgccaacttagctaagggatgatgcgtggagtgaagacatagtgctaggaacacttgccaattatttggtaggaaccctatagttatgccttcacacagaatacaatactttctagacgaagtaaagatctaaatgtaccctatgaaatatagaaaaaatatgtctat

SEQ ID NO: 88168 - DNA, 387 bp, Homo sapiens
gccttgtagagggaaggaatttgttgcatttgtggaactgatagttgctagatggcctgaatacagaggagagggtagtatgttcataggctaagccaaggagggccttgtaggctgtgttaaggcttttggcctttaagagcaataagaaagtaaaggattttaaactgaggagagagagcatgattagcacttaaaaaaaaaatttgagcatagtgaaaatggatctgaaggggatgtagtgtggatgtaggttaggaggctgttgcagtaccccaggccagagatgatggcttccagcagaatattgacagtgggaatggaaaagtagaaggattcaagagtttagaggtgaagctgacagaagttgctcgtggttggtgttgg

SEQ ID NO: 88169 - DNA, 744 bp, Homo sapiens
ttgctcatgtctcattggctaaaacggatcacgtggccaagctcagggtcagtgtgggaagagtctatacaagcgcttgggtactgaaaggcatgattcattgggggccattgttataatctaccacacattctagactttgctttgctttagatccgaattctagcaactcgatgtgataaccctgggcacatcatgttgctcgaacactgtaattggctattgatgtccctggaatgtctgagatgtatggggtggaccaaacactgcctctctctgggaaccccggactttgggttgagaatgcctagtgtttaggtggcattgactctaaaaccatgtggcattcagaattcagcactgggcaatggcgcatatgctgatttaattgtattagcctattagctggatagacacaacagtgatttatgggattttataacattatgttgaaccttcaataattggggttaaagtctggattgatgttgctacagaaacaggagtagaaaaataatcattagccagatggaagaaattattagttcacaaatgcagtgtgctcagtaataaaatctttcaaaatgtggatgacataggtgcaatagaatataaagaggccttcagtggaaagcttgggaagctctgcagagatgcagtggaccttgaaggttaagaatatggagtcagacaaaactaaattttaatctctattttgtgaccttgggcaagtaacttaacctc

SEQ ID NO: 88170 - DNA, 715 bp, Homo sapiens
aaaaagcttcattgctttctgctgactgtaaccccagacgagggttactactagggtggaaaatttcagctcgaaactggacttcctgatgcatacaatgtggtgccttccaaagtgaaatgcctgaccaggatctggtaccctaacatcagagataggggaaatatgtctaaagtttactgaggacattcgattgacagcactggctgggctcccacgagatcattaaaggatgttatttggagattaaattatttgtttactaatcttctgaattttgacgatccactgaatgttgaagctgcagaacatcatttgtaggacaaggaggacttcttgaataaagtcgatgactacatcaagtgttaatgccagatgataaaaggagaagattgcaggcccatggactgtgtgttacagtttgtctctaatgtgaaaaagcagcaagaggcattgccttctctcccctgtcccctgactctccctctcattcccctggattgtcccagtcctgtgaccatgttgtcctgacgaagaccatcttcatgactgcccgttgtagatggagaattcaacataaagacagcaagaaaaccgtatttaggtttctaaagagttatctgcttgtcttatgttttaggctgttcttgcattgctataaatgcccaagactgggtgatttataaagaaaagaggtttaattggcttatggttt

SEQ ID NO: 88171 - DNA, 1141 bp, Homo sapiens
gtccccacttgggtctccctgctccgcgtcttcatcaaggccctccccctgcacgtcttttggctcctcgccggccgccttggcggctgccgggtagcttttctcggactcaggtcagagatcctgagaagaggggagaagccctcatgcccaagtggtgggaaggggtggaggagaatggggaggaaatgggagtgaggccaccccaggagcccttagaagttgccagcccccaaaaccccaacagtaagagaccccagctaagcctcgtggctctccctggagaaggagatggaggacaacatctggacagtgaggaggaggaggcgcctcggcccacgccaaacatcccagaggacctggagagccgggaggccacgagcagctttatggacctcccgaaggagaaggcggacgggacggagcaggtggagagacgagagcttggattcgtccagccttctggagtgacagacggcatgagagagtccttcaccgtatatgaaagccagggggcagtgccaaacacgtggcaccaggagatggaggatgtcatcaggctggcccagaaggaggaggagatgaaggtgaatctgctggagctgcaagagctggtgttgccccttgtgggcaaccatgaggggcatggcaaattcctcaccgctgcccagaaccctgctgatgagcccactccagggcccccagccccccaggaactgggggctgccggtgagcaggatgatttttatgaagtgagcctggacaacaacgtggagcctgcaccaggagcggccagggagggttctccccatgacaaccccactgtacagcagatcgtgcagctgtctcctgtcatgcaggacacctaggagcacccaggcttgcccagcaaaccctgcgtgccattcttctaccaggcagccgagaacagggagataaacatcatcatcttctaagagctggtcaagaaatttaaaacaacaacaacaacaaaaagttacggggttcatctcctacacaattcatttactccatttgaatgctagagccactcacatttatttgtgtttctaatttaccgtttaaatttatttgtaaaaagttaagggagagttggtctttccctgatgttctttctggc

SEQ ID NO: 88172 - DNA, 1074 bp, Homo sapiens
gtgcggcggaattcgtggggggcgatggcgaagctccgggtggcttacgagtacacggaagccgaggacaagagcatccggctcggcttgtttctcatcatctccggcgtcgtgtcgctcttcatcttcggcttctgctggctgagtcccgcgctgcaggatctgcaagccacggaggccaattgcacggtgctgtcggtgcagcagatcggcgaggtgttcgagtgcaccttcacctgtggcgccgactgcaggggcacctcgcagtacccctgcgtccaggtctacgtgaacaactctgagtccaactctagggcgctgctgcacagcgacgagcaccagctcctgaccaaccccaagtgctcctatatccctccctgtaagagagaaaatcagaagaatttggaaagtgtcatgaattggcaacagtactggaaagatgagattggttcccagccatttacttgctattttaatcaacatcaaagaccagatgatgtgcttctgcatcgcactcatgatgagattgtcctcctgcattgcttcctctggcccctggtgacatttgtggtgggcgttctcattgtggtcctgaccatctgtgccaagagcttggcggtcaaggcggaagccatgaagaagcgcaagttctcttaaaggggaaggaggcttgtagaaagcaaagtacagaagctgtactcatcggcacgcgtccacctgcggaacctgtgtttcctggcgcaggagatggacagggccacgacagggctctgagaggctcatccctcagtggcaacagaaacaggcacaactggaagacttggaacctcaaagcttgtattccatctgctgtagcaatggctaaagggtcaagatcttagctgtatggagtaactatttcagaaaaccctataagaagttcattttctttcaaaagtaacagtatattatttgtacagtgtagtatacaaaccgattatgatttatgctacttaaaaatattaaaatagagtaagtctgtgttattttctatttccttttttatgcttagaacaccagggtttaaaaaaaaaa

SEQ ID NO: 88173 - DNA, 898 bp, Homo sapiens; identical to SEQ ID NO: 65151

SEQ ID NO: 88174 - DNA, 439 bp, Homo sapiens
  misc_feature (1)...(439): n = a,t,c or g
gatcggactgnacgnattggnnnggaanncccgggccgacccacgcgtncgngcagcgggattaggatnnnaaagtttgttatttaccctgaagagcctcatcatcggagagagtggggtgggcaagtccagcctgctcttgaggctcacagatgaaacctttgatccataacttgcagcaacaataggttcacctgcttccaggcgggcagggcgttgtattcatccctcgtcatgtctagcgcaaactggaaacattgggagaagcgccccgcggctcaatgaaaggagccgggcggtgggcgttgttttactcccatccccaccccaccggaagaaccgcttacctcgaagtcttcgtcggtgagatagatctcaagcttcagaggatcgaccccctctgggagtggtctggccaggaggtcagcccccgggtaat

SEQ ID NO: 88175 - DNA, 1077 bp, Homo sapiens
aatacactgctcactataattgtactgttcccagatccgccatccctctcaagcaactcatctatcaggtcctccagctcattctcaacctgcatctcttgtgaactgagcacctcaggctgcccagcaatcaccactgagtcggtttcagcctccccatccatgatatccccatctgccacctctgtctgagtgacatcatgatcctcctcctgcacttctgcttccccaggctcgcctgggtcctgctggttgctactggaatcttgagaggctccttgggcatcctgctcagacttgttcttgctagaagcactcttgctgccaaaaaggctactgggctggttcacaatccgggaaagtgtttccaaaggcttcagagcagcattgactgtgttggccatgttgggactggacaggtctaagctgtgaggtactctggccaggtcattaaccagtcccttcttcaggaaaagccgaatgatgttgttcatgccattgtgctgggtcttcgctgtggcactgctgtagaagctggaggtggaggggcaggactccatgatagtactgatgatacacatcactgcctgaagcctggcatgtttctctgtactctcagccatagccagtgcccgtccaagggctgcttttacttcattcactagggccacctgggcatctgtgccactccctgcagcagccaggcttgcgaggaacaggcgggccaaggcaggggtgtccttgtcttctgcattctgggtatgtgggagcaggtggtccagaacaaaagctagcacactgcagtcctctttgatcagttcagactggcccacagtgtagctgtagttggcaatcagggtagcaataccaacataggacctcaccaactctgccagaagacgaaggatagtggaggtaggcattaaaggtttgctgcccttgcctttctgtttgccttcctcagaggcccggtccccttctttatctttcttcccatctcgagactcctctggagttgaagcctctccttgggagatcccagatgcggaagtctcagtggaggcacccacgcgtccg

SEQ ID NO: 88176 - DNA, 410 bp, Homo sapiens
  misc_feature (1)...(410): n = a,t,c or g
gggtgttttctggtagttntaatataacatcaaatatgcatttcttaggatcacaaatgtgtgcaatattctgttctttcagcccctagaattcctcctgaaaagagaatttttacaaccacccatacaccaaattgtttgttccaggatgtggatgaaaggtacgtggtcttgacccaccccctttttcatgtttttgatataaaagctatttagccaaagccaagactgcatcttggttttataattacatgataatggacaaaaacatgtaattatatacaggcaatgaaataattatggaattacactgaaaacttcctaagatatgcacatggtgtaattgaggctttctggagagctgttgatctaattgagcctgtcttaattctcccatataaacccattcg

SEQ ID NO: 88177 - DNA, 532 bp, Homo sapiens
gagctcatcagttctgacacacttaagtagtaaattgttcctacagttccttgaagctcatcttctcacagagaaggactgtatttaacttcgaggcttatgaacatttaaattaccaaggctttcctccatcacagggaggaacaaccgtctctagtcttaatataaatatttttatgagaattccaaaagagaacaagtagatttatctgcattttttgtgtaatcaacaggacagttttggcatgtgactgacttacacttagaccctacttaccacatcacagatgaccacacaaaagtgtgtgcttcatctaaaggtgcaaatgcctccaaccctggcccttttggagatgttctgtgtgattctccatatcaacttattttgtcagcatttgattttattaaaaattctggacaagaagcatctttcatgatatggacaggggatagcccacctcatgttcctgtacctgaactctcaacagacactgttataaatgtgatcactaatatgacaaccaccatccag

SEQ ID NO: 88178 - DNA, 313 bp, Homo sapiens
ggtctccctggccccccctggtgcacctgtgagtatccaggacgtcttcatatgcctccttgggctttggtcttttggagggaagactgggatgagggcaggagagatgctcagagatctcttggtaagattggagaaggttgacagggacttgtcttctaacccatctttttccttcttctcaagggtccccaaggcttccaaggtccccctggtgagcctggcgagcctggagcttcagtaagcactctctatacagattcatactccttctacaaacacacagactctcctatagaagaactcccaggcc

SEQ ID NO: 88179 - DNA, 458 bp, Homo sapiens
  misc_feature (1)...(458): n = a,t,c or g
atcactgnnnnnnacatgattacgccaagcttgtcacgaggggtcttagttctagagggaggaatgctgccaccaggagactttacaatgccattaaactggaagttaagattgccacctggacactgtgggctcctcctacatttaagtcaacaagctaagaagggagttacagcattggctgtggtgattgacctggactgtgaagatgaaatcagtctactattccacaatggagggaaggaagagtatgtatggaatacaggagatccattacggtgtctcttagtattaccatgacctgtgattaaggctaatgggaaactacaacagcccaatctggtcaggactacaaatgacccaggcccttcaggaatgaaagtttagttcactccaccaggaaaaaagctatgacctgctgaggtgcttgctgacagcaaagggaatacagaatgagt

SEQ ID NO: 88180 - DNA, 522 bp, Homo sapiens; identical to SEQ ID NO: 88083

SEQ ID NO: 88181 - DNA, 8062 bp, Homo sapiens
attgtgatgtgagggtgtcaattttggatctttccttctctcttcctcggcgctgcctacggaggtggcagccatctccttctcggcatcatggccgccctcagaccccttgtgaagcccaagatcgtcaaaaagagaaccaagaagttcatccggcaccagtcagaccgatatgtcaaaattaagcgtaactggcggaaacccagaggcattgacaacagggttcgtagaagattcaagggccagatcttgatgcccaacattggttatggaagcaacaaaaaaacaaagcacatgctgcccagtggcttccggaagttcctggtccacaacgtcaaggagctggaagtgctgctgatgtgcaacaaatcttactgtgccgagatcgctcacaatgtttcctccaagaaccgcaaagccatcgtggaaagaggagcccagcgggccatcagtcaccaatcccaatgcgaggctgtacaacgcagaaatctctcgttccaccttacgagaaacacccacaggtgtggaggggcaacccaccccttcatctggtgcccaacgtggaggcttttctctagggtgaaggtacgctcgagcgtggtcattgaggacaagttgacgagagatcccgagtacatctacagtcagccttacggtaagcttgtgcgctcggaagaagctagggtgacaatggggcaaactaaaactaaaagtaaatatgcctcttatcttagcttcattaaaattcttttaaaaagagggggagttagagtatccaccaaaaatctaatcaagctatttcaaacaacagaacaattttgcccatggtttccagaacaaggaaatttagatctagaagattggaaaagaattggtaaggaactaaaacaagcaggtaggaagggtaatatcattccacttacagtatggaatgattggcccattattaaagcagctttagaaccatttcaaacagaagaagatagcgtttcagtttctgatgcccctggaagctgtttaatagattgtaatgaaaagacaaggaaaaaatcccagaaagaaacggaaagtttacattgcgaatatgtagcagagccggtaatggctcagtcaacgcaaaatgttgactataatcaattacaggaggtgatatatcctgaaacgttaaaattagaaggaaaaggtccagaattagtggggccatcagagtctaaaccacgagggacaagtcctcttccagcaggtcaggtgcccgtaacattacaacctcaaaagcaggttaaagaaaataagacccaaccgccagtagcctatcaatactggcctccggctgaacttcagtatcggccacccccagaaagtcagtatggatatccacgcccgcccccagcaccacagggcagggcgccataccctcagccgcccactaggagacttaatcctacggcaccacctagtagacagggtagtgaattacatgaaattattgataaatcaagaaaggaaggagatactgaggcatggcaattcccaataacgttagaaccgatgccacctggagaaggagcccaagagggagagcctcccacagttgaggccagatacaagtctttttcgataaaaatgctaaaagatatgaaagagggagtaaaacagtatggacccaactccccttatatgaggacattattagattccattgcttatggacatagactcattccttatgattgggagattctggcaaaatcgtctctctcaccctctcaatttttacaatttaagacttggtggattgatggggtacaagaacaggtccgaagaaatagggctgccaatcctccagttaacataggatgcagatcaactattaggaataggtcaaaattggagtactattagtcaacaagcattaatgcaaaatgaggccattgagcaagttagagctatctgccttagagcctgggaaaaaatccaagacccaggaagtacctgcccctcatttaatacagtaagacaaggttcaaaagagccctatcctgattttgtggcaaggctccaagatgttgctcaaaagtcaattgccgatgaaaaagcccgtaaggtcatagtggagttgatggcatatgaaaacaccaatcctgagtgtcaatcagccattaagccattaaaaggaaaggttcctgcaggatcagatgtaatctcagaatatgtaaaagcctgtgatggaatcggaggagctatgcataaagctatgcttatggctcaagcaataacaggagttgttttaggaggacaagttagaacatttggaggaaaatgttacaattgtggtcaaattggtcacttaaaaaagaattgcccagtcttaaacaaacagaatataactattcaagcaactacaacaggtagagagccacctgacttatgtccaagatgtaaaaaaggaaaacattgggctagtcaatgtcgttctaaatttgataaaaatgggcaaccattgtcgggaaatgagcaaaggggccagcctcaggccccacaacaaactggggcattcccagttcagccatttgttcctcagggttttcagggacaacaacccccactgtcccaagtgtttcagggaataagccagttaccacaatacaacaattgtccctcaccacaagcggcagtgcagcaggtagatttatgtactatacaagcagtctctctgcttccaggggagcccccacaaaaaatccccacaggggtatatggcccactgcctgaggggactgtaggactaatcttgggaagatcaagtctaaatctaaaaggagttcaaattcatattggtgtggttgattcagactataaaggcgaaattcaattggttattagctcttcaattccttggagtgccagtctaggagacaagattgctcaattattactcctgccatacattaagggtggaaatagtgaaataaaaagaataggagggcttggaagcactgatccaacaggaaaggctgcatattgggcaagtcaggtctcagagaacagacctgtgtgtaaggccattattcaaggaaaacagtttgaagggttggtagacactggagcagatgtctctatcattgctttaaatcagtggccaaaaaattggcctaaacaaaaggctgttacaggacttgtcggcataggcacagcctcagaagtgtatcaaagtactgagattttacattgtttagggccagataatcaagaaagtactgttcagctaatgattacttcaattcctcttaatctgtggggtcgagatttattacaacaatggggtgcggaaatcaccatgcccactccattatatagccccatgagtcaaaaaatcatgaccaagatgggatatataccaggaaagggactagggaaaaatgaagatggcattaaaattccagttgaggctaaaataaatcaagaaagagaaggaatagggtatcctttttaggggcggccactgtagagcctcctaaacccataccactaacttggaaaacagaaaaaccggtgtgggtaaatcagtggccgctaccaaaacaaaaactggaggctttacatttattagcaaatgaacagttagaaaagggtcacattgagccttcgttctcaccttggaattctcctgtgtttgtaattcagaagaaatcaggcaaatggcgtatgttaactgacttaagggctgtaaacgccgtaaacgccgtaattcaacccatggggcctctccaacccgggttgccctctccggccatgatcccaaaagattggcctttaattataattgatctaaaggattgcttttttaccatccctctggcagagcaggattgtgaaaaatttgcctttactataccagccataaataataaagaaccagccaccaggtttcagtggaaagtgttacctcagggaatgcttaatagtccaactatttgtcagacttttgtaggtcgagctcttcaaccagtgagagaaaagttttcagactgttatattattcattatattgatgatattttatgtgctgcagaaacgaaagataaattaattgactgttatacatttctgcaagcagaggttgccaatgctggactggcaatagcatctgataagatccaaacctctactccttttcattatttagggatgcagatagaaaatagaaaaattaagccacaaaaaatagaaataagaaaagacacattaaaaacactaaatgattttcaaaaattactaggagatattaattggattcggccaactctaggcattcctacttatgccatgtcaaatttgttctctatcttaagaggagactcagacttaaatagtcaaagaatattaaccccagaggcaacaaaagaaattaaattagtggaagaaaaaattcagtcagcgcaaataaatagaatagatcccttagccccactccaacttttgatttttgccactgcacattctccaacaggcatcattattcaaaatactgatcttgtggagtggtcattccttcctcacagtacagttaagacttttacattgtacttggatcaaatagctacattaatcggtcagacaagattacgaataacaaaattatgtggaaatgacccagacaaaatagttgtccctttaaccaaggaacaagttagacaagcctttatcaattctggtgcatggcagattggtcttgctgattttgtgggaattactgataatcattacccaaaaacaaaaatcctccagtttttaaaattgactacttggattttacctaaaattaccagtcacggacctttagaaaatgctctgacagtatatactgatggttccaacaatggaaaagcagcttacacagagccaaaagagcaagtaatcaaaactcaatatcaattggctcaaagagcagagttggttgcagtcattacagtgttacaagattttgatcaatctatcaatattgtatcagattctgcatatgtagtacaggctacaagggatgtaaagacagctctaattaaatatagcatggatgatcagttaaaccagctattcaatttattacaacaaactgtaagaaaaagaaatttcccattttatattactcatattcgagcacacactaatttaccagggcctttgactaaagcaaatgaacaagctgacttactggtatcatctgcattcataaaagcacaaaaatttcatgctttgactcatgtaaatgcagcaggattaaaaaacaaatttgatgtcacatggaaacaggcaaaagatattgtacaacattgcacccagtgtcaaatcttacacctgcccactcaagaggcaggagttaatcccagaggtctgtgtcctaatgcgttatggcaaatggatggcacgcatgttccttcatttggaagattatcatatgttcatgtaacagttgatacttattcacatttcatatgggcaacttgccaaacaggagaaagtacttcccatgttaaaaaacatttattatcttgttttgctgtaatgggagttccagaaaaaatcaaaactgacaatggaccaggatattgtagtaaagctttccaaaaattcttaagtcagtggaaaatttcacatacaacaggaattccttataattcccaaggacaggccatagttgaaagaactaatagaacactcaaaactcaattagttaaacaaaacgaagggggagacagtaaggagtgtaccactcctcagatgcaacttaatctagcactctatactttaaattttttaaacatttatagaaatcagactactacttctgcagaacaacatcttactggtaaaaagaacagcccacatgaaggaaaactaatttggtggaaagataataaaaataagacatgggaaatagggaaggtgataacgtgggggagaggttttgcttgtgtttcaccaggagaaaatcagcttcctgtttggttacccactagacatttgaagttctacaatgaacccatcggagatgcaaagaaaagggcctccacggagatggtaacaccagtcacatggatggataatcctatagaagtatatgttaatgatagtgtatgggtacctggccccatagatgatcgctgccctgccaaacctgaggaagaagggatgatgataaatatttccattgggtatcgttatcctcctatttgcctagggagagcaccaggatgtttaatgcctgcagtccaaaattggttggtagaagtacctactgtcagtcccatcagtagattcacttatcacatggtaagcgggatgtcactcaggccacgggtaaattatttacaagacttttcttatcaaagatcattaaaatttagacctaaagggaaaccttgccccaaggaaattcccaaagaatcaaaaaatacagaagttttagtttgggaagaatgtgtggccaatagtgcggtgatattacaaaacaatgaatttggaactattatagattgggcacctcgaggtcaattctaccacaattgctcaggacaaactcagtcgtgtccaagtgcacaagtgagtccagctgttgatagcgacttaacagaaagtttagacaaacataagcataaaaaattgcagtctttctacccttgggaatggggagaaaaaagaatctctaccccaagaccaaaaatagtaagtcctgtttctggtcctgaacatccagaattatggaggcttactgtggcctcacaccacattagaatttggtctggaaatcaaactttagaaacaagagattgtaagccattttatactatcgacctaaattccagtctaacagttcctttacaaagttgcgtaaagcccccttatatgctagttgtaggaaatatagttattaaaccagactcccagactataacctgtgaaaattgtagattgcttagttgcattgattcaacttttaattggcaacaccgtattctgctggtgagagcaagagagggcgtgtggatccctgtgtccatggaccgaccatgggaggcctcaccatccatccatattttgactgaagtattaaaaggcattttaaatagatccaaaagattcatttttaccttaattgcagtgattatgggattaattgcagtcacagctacggctgctgtggcaggagttgcattgcactcttctgttcagtcggtaaactttgttaatgattggcaaaagaattctacaagattgtggaattcacaatctagtattgatcaaaaattggcaaatcaaattaatgatcttagacaaactgtcatttggatgggagacagactcatgagcttagaacattgtttccagttacagtgtgactggaatacgtcagatttttgtattacaccccaaatttataatgagtctgagcatcactgggacatggttagacgccatctacagggaagagaagataatctcactttagacatttccaaattaaaataacaaattttcgaagcatcaaaagcccatttaaatttgatgccaggaactgaggcaattgcaggagttgctgatggcctcgcaaatcttaaccctgtcacttgggttaagaccattggaagtactatgattataaatctcatattaatccttgtgtgcctgttttgtctgttgttagtctgcaggtgtacccaacagctccgaagagacagcgaccatcgagaacgggccatgatgacgatggcggttttgtcgaaaagaaaagggggaaatgtggggaaaagcaagagagatcagattgttactgtgtctgtgtagaaagaagtagacatgggagactccattttgttatgtgttaagaaaaattcttctgccttgagattctgttaatctatgaccttacccccaaccccgtgctctctgaaacgtgtgctgtgtcaactcagggttgaatggattaagggcggtgcaggatgtgctttgttaaacagatgcttgaaggcagcatgctccttaagagtcatcaccactccctaat

SEQ ID NO: 88182 - DNA, 352 bp, Homo sapiens
taatggataaaagccctaatatatcaaaaagaaaggatagctcagttgaagactggacaaaggacatgaatttgtaattcacagacgtaccacaaataacttgtaaacctagggaaaaacaacttttttctactaatcagagaaatgcaacttaaaaattacataccacttctggcctatcaaattggaaaaaataaactaagagaatgcagaagactagattacttgcatacttttatttggaaaataagtttatgcatcctttttgaatagcagtttagtaatttaagtcaaaagccttaaaaatgtttatacttataccttttggcccagaaatttcatttctgtgagt

SEQ ID NO: 88183 - DNA, 445 bp, Homo sapiens
agtgcggtggaattcgcaaggcaggcaaggagcttgaagtcaagaagaaagggggcaagaaggagccggtggtggccgtggagccgcctctggccaaggagatgaaggagttctaccacatccagatccgagacctggaggaccggctagcccggtaccagcggaagtgggatgagctggctgtgcaggagaagatgttccgccaggagtttgagcagctggccaataacaagaaggagattgtggccttcctcaagcgcacgctcaaccagcaggtggatgagatcacagacctcaacgagcagctccagaacttgcagctagccaaagagatggagaaggatgccttcgaggcgcagctggcccaggtgcgccacgagttccaggagaccaaggaccagctcaccacggagaacatcatccttggtgaggaggggactggctg

SEQ ID NO: 88184 - DNA, 352 bp, Homo sapiens
atataataggggcttgggaaattttttatttctgaataaaaatataaatctttaaaagtgagaggattcttgctagagtggtagggaaaaactatgaagcagagagctaaaatgatattcttgcataagccacagaatgaggtgattcttgaaggaattagaattgtgtctgtaggaagttttctgttattttggtggttaaggggacagtcagcttcctgccttttagtgctgaaagtgtcttataattcagttggatttatagaatcttttctttatataacataccccttattgcttccctcagatttttctcctccttttctaaatcaagcttgaccaacctgcggcc

SEQ ID NO: 88185 - DNA, 413 bp, Homo sapiens
aggcgggcagccccgacaaaagcaaacatggcaagcagagggccgagtacatgcggatccaggcccagcagcaggtctaatgagcaggcgcggaggctgtgtggagagtggacatacctcacccgtgggtgtttactgcccttgtggcctggtcagaggctgcagggtggctcctggacccagatgttgtgagagacccttagtgcactcgtttgatttagttaatatttatgagcagctcctgtatgacaggcccattctgggtgtgagggtgggggctgtgatatgtccagatgctctcacttaaagaaggttctagactcagaggcaagacgttagagaaaggtttttactcttaaggcccagaggttagagagggggagcccttcttttttagatgaggggcagctcaa

SEQ ID NO: 88186 - DNA, 563 bp, Homo sapiens
ccctctttaatttcccttctccaagcccaagcttttgcaggtaactggagcgcttcctcatttgcataataggcagtttcaataactggggacttttcttcaagaccacacacacaggctctggattcagacccaagagaataaattctgaaatgatgtccagcaactgttgaagactggcacctcgccgtacactgagcaattcattaatatgggcattgctgaaacccatgtccaggagggaactcatgaccctctctagctccaaggacccttgtaccacaggagtcccctgcttctcaaggaggcactgaacaagattcctcctgcactctggttcctgcacatagttattggatctaacacaagataactcctcaatgacccctccattggaggctgtagtcagtttgcgcaacaaagaagctgtcgtccttctctgttctccaagatgaggagtctgcctagccatacaggcccaggtgagggggatcaggcggtgccaatcaaggacctgacggccgaacgcagccatagcgcggagaagatggcagcagacgaaa

SEQ ID NO: 88187 - DNA, 482 bp, Homo sapiens
  misc_feature (1)...(482): n = a,t,c or g
cacaagcaagggctgccctgaaggaagctccgagagaaaggagggcaggaagcccacggcccacaggggtgtagcccgagacccacctgcagcccccagcccttgccaggaaagcagcagccgcagccatggcggggatgaagacagcctccggggactacatcgactcgtcatgggagctgcgggtgtttgtgggagaggaggacccagaggccgagtcggtcaccctgcgggtcactggggagtcgcacatcggcggggtgctcctgaagattgtggagcagatcaatcgcaagcaggactggtcagaccatgctatttggtgggaacagaagaggcagtggctgctgcagacccactggacactggacaagtacgggatcctggccgacgcacgcctcttctttgggccccagcaccggcccgtcatccttcggttgcccaaccgccgcgcactgcgcctncgtgccagcttctcccag

SEQ ID NO: 88188 - DNA, 414 bp, Homo sapiens
tttcgtctcgattatataatagtaaattctgtgatgtaggtagacaggatgtctataggacctgatgtaacggtcagaaaaaagcacaaatacacttctcttcacattttgttcagccttttgggtgtagtcattgtttgctaaggatgtcgtttaattatctttatgcacccattatgctgcacttcagtttttaagaggtatttatgattctcagtattttaaagcttactttgaggcagtgtagtactaccagctaacacaagaggtcagcaaacaattagctattcaaacttggaaatgttaatatttaaaagatttaaaattgctaaagatgaaattaggaagtactgaacttaccgtcagtggacataacattttaaatgaaactgacacagtccctgagatggatag

SEQ ID NO: 88189 - DNA, 574 bp, Homo sapiens
gccaaccaattaatccaagcatggagtcgccatagttaacaaggccttttcccactggaacacctgcaccactgcctccaaaaaatgtaccagctaccccaccccgaacaggatcccccttaacaattggaccaggtgcatcatcccctgctcgaccagccactcctttggttccttgcagaagtaccactccacctccacctcctccccggcctccatcccggccaaagctacctccaggaaaacctggagttggagatgtgtccagaccttttagccctcccattcattcttccagccctcctccaatagcacccttagcgcgggctgaaagcacttcttcaatatcgtcaaccaattccttgagcgcagccaccactcccacagttgagaggatgggctgttcaacaccaaagggcctaatcataactgacttggaatgtcaacttaatgtagtcaaatggtgtgagggagttcttttagatcagcctgagatatggggttcaggccaaccaattaatccaagcatggagtcgccaaagttaacaaggccttttcccactggaacacctcc

SEQ ID NO: 88190 - DNA, 460 bp, Homo sapiens
aaaaacttcccacgtctttggagagatatgtacatccagctccatgaagcacaaaggatcccaaacagattcaacccaaagaggttctctccaaagcacattttaatcaaatcatcaaaagttaaagacagaattccaaaagcagtgagagaagagaatcaagttacatataagggaatccccactagactatcagcagatttctcaacaaaaactgcaggccaagaaagaaccagataataaatttgaagtgcttaaagaggtgaggtgggggtgcgggggaactgtctacctagaatactacacccagaaaatttatacttcagaaatgaaggagaaatagtgtttctaggcaagagaaagctgaggtaatccatcactgctagaccagccatataagaaatgctagagagaatgcttcaactggatgtattaggaaaataattactagtatgaaaaa

SEQ ID NO: 88191 - DNA, 660 bp, Homo sapiens
  misc_feature (1)...(660): n = a,t,c or g
cccacgcgtccgcccacgcgtccggaagtattgttaacaagcattgctgagcaaagaacacctgagtttaagccctggccctacttcttgctggctctgtagacttgagcaggttatttaataagctctctgaaattcagtttctcatctgtcaactggggtaagaactgctgatgtgcccacttcaaattgacagctataattcttaaatgagattatatttgtggagctgctttgtaatgctcagtgtatgtaggtatcactattttttccatttagctagaaatctagaggctttttcacttcatattttatgtaagctataaaaactatgattgattatttttattttactgatagggaatttacactgaaggagaacttaaggaacttgcaccagtttctgtatcaggttagatacaaaactgctacaggaacccttcgtttttaacacaccagcttttgcttggtaatgatgaattaaatacctcttctttaattcgcatggtcacaactaaactaagctaaggcacctctacanncattactttatttaacacggcaccaacaagaggttgtggtattttaggagactggtggttatgcccttttataagatgaaggagaaatggaaactccacagagggcccacggaatatt

SEQ ID NO: 88192 - DNA, 699 bp, Homo sapiens
actgtatcttgaatttgaatgctttaaggctagtgcataatctcttccgttaggtctaggccccatgttttcctattggtttaaagttgccccatttacacacttattttttatttatttattgattttgattactttggttcttgtagagaattgagtttgtattttttatactatattttctgctgtgagtggcttcctttttttccttcagtttctctctccttccgttctgtgtggaatctcttctgcttgtcactgctgttctgtttgcacaccaccacccttttccaagacccagtgtgtaccgactttctcctctgagcaagtgcatttcatttgtacctggagtacacattgtattttctcacagccaggcccttcttggatttcccttatctggagctgaggtttctctctcagggtttatgtctgcgagaaccgtttcacactgacagggtgttgttgccactgtgagatttcctttcacagaaactagaaggctaatttacctagcaagcgtgtctttaacatacaggtatttatttatctggctcaaacaattagaactagaatattggaaacaaggttgttcttaggaagattttactcaaagccaccagagcacacatgtgaagtgcttatcattgaacgtagttgttgctagctttttcattttaaaattggtttatctttgta

SEQ ID NO: 88193 - DNA, 728 bp, Homo sapiens
cggcacgagaactgggagagaccacatttggggtcataaaacaagaagcaacaaatatgaaaggaatgaaataatacagagtacgttctctgaccacagtggaattaaatgacaataacaataagataactaggaaaacaccaactatctggaaattaatgcatgtccaaataatcattgggtcaaagaagaagtcacaagaaaaactagataacattttgaactaaatgttaatgaaaatacaacatattaaaattttgtgagatgcaacttaagctgcactttgagaaaacgatataattttacaatcttagctcttacatgtagaaaccaaatgctttattcaaccaattttgaatgtgcacaaatatggggtatatttttcacgagcctttctgaataaactagaagacaagctccagccaaccaagagatggggaaatttttggtaaaaggaccagagataaacaattattaataacatacttaactggagatataagccagtaacaaagctgcggatatgagttgtaaagtgttatatgttctgacagtgtagaaacaatataaccaacaaaaactgggaaaggaatgaggaggaaaagggagaaaagtagaacaagcttgttgactgtctcagtagctggcagtcaaagataatacttacagctgacatatcaagtagtagatgtatattcaatagaacaaaggtaaacattaaaaaaagc

SEQ ID NO: 88194 - DNA, 1171 bp, Homo sapiens; identical to SEQ ID NO: 65017

SEQ ID NO: 88195 - DNA, 379 bp, Homo sapiens
cttattgggggaagactgttttaaagttcctaatggttatttttctaaaaatggttcatttaagatcttaattgggtacatgaaatggctttttctgtcattgatcctagtacgtgcacatgtgcaacatgtacaaaaagatccttttgttttagaccttacggaattttatgaggcatggaaatgaggagaagagagcctcattcttcagaatactatgtttgactagatagtaaagagggatctcaacagacctcaaacataatgtaagtgggagcacaggaatcaattagtatattagttttctggagctgccatagtaaaattccacaggctagatggcttaggggacagaaattaatttccttgtagtttcagg

SEQ ID NO: 88196 - DNA, 1363 bp, Homo sapiens
ttttttttttttaaagagacagagtctcactctgtcacccaggctggagtgcagtggcacgatcttggctcactgcaacctccgcctcctgggttcaagcgattctcctgcctcagcctcctgagtagctgggattacaggtgtgcgccgccacacccagctaattttgtatttttagtagagacggggtttcaccatgttgctcaggctggtctcaaactcctgaccttgtgatccgccaaccttggcctgtcgacctctttacccattccattgttcattcttctttcttgaaatcccaaaccttctattaacatttcttttcagttatacactgaactttactgtagcctttcttctagagtaacaaatgttctttgttttccttcctctaaagatgtctttatgtttccttcattcccaaagaatatttttgtggaatataagattcagagttggcagttgttttcttttagacttcagagatgtatctctctgttctgtacattattgtttaatataagaaacctactaccattcaaataatcattccctattttacaatgcatcagttctgtcaagcttcattcaaagtgtttttcattgtctctagtgttcagaagtttggctgtgatgtgcgtggcatggaagtttttgggtgtattctatttggcgctccctggtgcttgcccagctttttgatctgtaggattatgccttttgcaaaatttggggaactttcaactattatttcttcaaatattttttcaccccccagtcttgtcttttttagggacttcaataacatgagtggcagatcttgttttacactcccatgggtccttcaggctctcatcttttttctttttccagtctattttctgtcttgttaatattgattaatttttattgaccttccatggtcctcactgattgttttctttgtcatacctaatctggtgagtttgtgcagtgagttttcattttggttttgtattttccagttgtttaatttccattgggtgggttcttttgtacaccttctgtttctttgcttattttttaacgccaaagaaagactctcagagaatagacaactatattccaaagtcatggttctctggtggtttgtcttgacatttgaatagaaatgttaaactatctgggggaatagaaagcccacagtcttctgagttgtgctacaccaatatttctatgaacagatcttacaactgagagtgatctgcagatttttcagagtcatgttctccatggaatgtttgtaaaattccctagctctctgcactgagctgagatcgtgccactgcactccagcctgggcaacagagcgagactccatctc

SEQ ID NO: 88197 - DNA, 934 bp, Homo sapiens; identical to SEQ ID NO: 65186

SEQ ID NO: 88198 - DNA, 746 bp, Homo sapiens
attaatttagacttacaacaatcttgtaatatgttccgtattccccccattgaaagatctgactctgatctgatcgatagcattatggctttcttctattgctgcaaaataaatatcccacaatatgtggcaaggacagagggtaagaggctatctgacaagggagaaaggtaggcaggttaacacaataccagagaatacgtcacttggaaatccactccatactgtgtttgcagtgctgtgtcacttcttagctctattgaacctcagtttactctaaaaattaatgataacttataggatcaaataagagtaacatttataaacgcttctagaacagaacttttcacctattatgtcccccagagtttttattcatttattcattcactcacacactggtatttgcatggaagcttggtaggcagaagactggaagaatcaaaatgacatttatgtaaattagaattaatgtaaatttaatttttccaaagatttctgctctttttagtctcagagcaaagttatgcgagaagttgctgttatctctgttaatagacaaggtgactgaagcatatgatatgcgtgacttgcttgagaacagaaaggctgaacaagcagagcttgaaatcaaaaccccccccctatctttttggctttttggggggtttaccgggggaattcccaagattggtggcccttttaaagaacacaaaaactgggttttttaaaattggagggggttt

SEQ ID NO: 88199 - DNA, 408 bp, Homo sapiens
aatacatgcatgcattatattctcagtggataactttttaaagcatcctgcaaattcatgatatcattactgatgaaaggcagggagaaaaaaagttctctttctcaagaacgtaactatttgagaacctttaaaaattacattctgcatttttattcctgaaaagaaacaagaacattttgtctttgtttttcattattgtagatatttttaaaccaagacacacgtattgaaatattcaacgtgttgctttctaagctcaacactaataaataaccataaatgaatttcattaaaaggaaatgtcagactagggcccactttctcaatcccaatatagttcaaaattcaccaatttgggagtttgcttttgttgttttgtttccaatcttttgttgttttgtttcc

SEQ ID NO: 88200 - DNA, 423 bp, Homo sapiens
  misc_feature (1)...(423): n = a,t,c or g
aatacagttggtctgtatttttatagcaacactggacacattcttccttggatttgaactaccattttactttttttaaagtaaaaatagctatagcaatcaaggcactcaatacctaggaataattttaataagaagtatgtaaattctacataatgaaaactaaaattctactgatggggtaccaatgacttgaatgtataggaagataggaagattcttatcatacattctcctttagataatctaaaaatatgtgattccagccaaaataacagtaacagaatagaagagtaaattatggttcaatatagcctcacaatattataccacacagtagtcagaatgaagggactaaaactatacacaatatggctgaatctcacagaaataatttgaacaaaggaagccagacacaaaagn

SEQ ID NO: 88201 - DNA, 416 bp, Homo sapiens
aatacatctacctgctactttgggtcattttgttctttttcatacttcttttatgtgaaacattttatttttaaaattctttcttaatagaaacacttaacataacaattttgcctctgattacagggttgtttacatcttatcagttttgaaaggtagggttccttttgttgttttgtacataaacagaagctgccattttaatttcctccttcccccaaaataatttctataaatgatttttaaaagttctaaatattttgccctttttgttaacctggtgttatttatttatagtttgtttttaacagataatttgacttgtgcaatttctgcctttggaatttttttaagtttttatttggcctgatatattatcattttaaatatatgttctatgtatttttgaaaagcat

SEQ ID NO: 88202 - DNA, 368 bp, Homo sapiens
ctaaaatcttattttatatgctattatctattgccattaaaattgctggaacacttctactgtgggtgacaaatccaggaggcagaaaaatcagtgtatatatatagttgaaatgactgacaccatccatcaagtgaatctaatggacatttatagaatgttttatccaacaacaacttatacaaaatattcaccaagacgcaccatgttctaggcaatagaacatcctttaaagaggaattatactaacattcctctcagaccatgtgaaactaaaccagaaatgagtaacaaagatagaaaatgtcaaattatttggagattaaacaacatatttcaaaataaaacatggtcaaaaaaagtctcaa

SEQ ID NO: 88203 - DNA, 444 bp, Homo sapiens
  misc_feature (1)...(444): n = a,t,c or g
cgtgaccnnnccggacctgccgcggacgacccacgcgtacgcctgctgtaaacattttcatttgatgatcagttcactccatgaggaccacaatttgggaagctttctcatttcctttgaaatggctaaatagcgtcatgggtaattggaattatattaaattttattttccagaaaatgagtcttcatgtaggggcttggaaagtcactttttgctggtattggttttaggagtattgtgttagttaggttccctgggaagcagatgttgagacggaattaggaatgttagtgttttattggagggggaagggggctgcgcctgtgaaggataaaatgaggatgaagcaagactgggcagggagagcctcagaccaggtacagatttgatagttttgaccaacccaacggggaggtctggagcagagcttgcctttggagggg

SEQ ID NO: 88204 - DNA, 435 bp, Homo sapiens
ctctgtgactacaaacaagatcaggtgtgtactcatttaaaatgatacaaaagttttccctgtctttacacacaaatttttgtccatcaagaaagcaacatttaatctagagttcaataatcaccacagtcaatgtctttgatctatgaaatcagcagctatggaacaaaagcagcagctctgttctgaatcatatggtagttgtcaataacaaggacagtagttatttttagaacttttaaaaattcgcaaggcttaatacttttcttctagtatgtcaaagttgtctgtgatcactctcatctttaaatttctgataaaagaaatgagaaatgatgcttttatgttgcatataaagtgaatgtctctcactatgggtgacacagtgagaccaaataaataaataaaatgtagctcacttcatgtacaaaaaaa

SEQ ID NO: 88205 - DNA, 410 bp, Homo sapiens
  misc_feature (1)...(410): n = a,t,c or g
agttgatgaaatcaatcaggtatggngattgttcttttacttggatcttcttatatcctgtagcaggaataaatgtaatcattattgttgccattgtttagggaatggacccaatcaatgaacggagagtgtttgaaatggttgtaaatactgcctgtaaagaaaatacatctcaatactttttcataacaccaaaggtaggtaaaaagtaacctaaaagtggtcatatactcagaaatctcctgtggcataatcatacagtttttgtcccaacatgcacatattaacaggaacactcccaaaaaaggaatttaaaaggttaacagtaatatttacattattaaagggacaaattccagtgtcatgcttaatcaaaggaagaaaggtaggaggcgtattattatgttctt

SEQ ID NO: 88206 - DNA, 412 bp, Homo sapiens
  misc_feature (1)...(412): n = a,t,c or g
tttcgtcgcgtcgcccgcagacctgttggggcccatgatcgccctcagtcagctagcctgctcccctggaccgcgacggggcgtggcagggcggctcccgctgttgtttgagcccagtgagggaaggggaaaggcctttaagattttcggttttttggccgggcgcgcanctcaatagtgaactgacanagcctttcctttctcctccttcctgcttctgagaaccgagaggtcatctgtgatgtccctcgcaccttatgtctttttgttaccttcaacctgctcttcatgttcctgatattgatcatccaactgaatgtctgtcgtggcgatgctgggtcacctgccctgttgcacgccacccgtatctctacttgtccatcttcctaatggtatgacagcctctctcttt

SEQ ID NO: 88207 - DNA, 642 bp, Homo sapiens
  misc_feature (1)...(642): n = a,t,c or g
atcccgggtcgacgatttcgtgggcgagcggcgcggcggctgcgatgagtgcctctgcggccaccggggtcttcgtgctgtccctctcggccatcccggtcacctatgtcttcaaccacctggcggcccagcatgattcctggactattgtaggggttgctgccctcatcctgttcctggtagcactgctggctcgtgtcctcgtcaaaagaaaaccaccccgggacccactgttctatgtgtatgcagtttttggatttaccagcgtggtgaacctcatcataggactggagcaagatggaatcattgacgggttcatgacacactacttgagagagggtgaaccgtatctgaacaccgcatatgggcacatgatctgctactgggatggctctgctcattatctgatgtacctggtgatggtgggcagccatagcatgggaggaaactttattaggaaccattggcctatattgggttggatctattattatgagtgttgttgtttttgtgccaggaaacattgtagggnagtatgggacacgaatttgccctgcttttttcttaagcataccatatacttgtcttcctgtctgggctggtttcagaanctataatcagccatcagaaaattataattac

SEQ ID NO: 88208 - DNA, 402 bp, Homo sapiens
tttcgtcattctctgtagagatctctctttgcttgtttcaacaaagtccactcctcctgggtaaagtccacagccacatcctcaaaggtcactaagtgctaaaccattaaatacatgccagcttcagctaagtaccatctcctttgatgttctgagaaaaatgcatgaaggactaaggaagactagaagcctgcagtactcccaggcctcaggcctcttctcctctatatagatattgtcttgcaatggcatccaatcccatggacttatcagcatcactgaaacatgactaaactgatcttcctacagctttacaatgggctcttctggccttagtcctcctctatttataggtgcagtctgcactgaatatgttgcagcactatgtaaaatctaataaca

SEQ ID NO: 88209 - DNA, 1167 bp, Homo sapiens
  misc_feature (1)...(1167): n = a,t,c or g
tttcgtctagtttggaaaacacagtgcacttagcccgtgttttactggatattaggcaataaacaaatacgtctacttacaccaggcaaagtatgcatgatgacattgatgatgtacatttcgcaggtcaggaaactaaagctcaaagcaaaatttagtgaaagtatggagagttcccataaaaaaaacagggaaatatctgaacagcagcttcaccaaagaagatacacaaatgacaaaatgcacaacaccaagagtgacatctaatgtactttgggtaacaatgacgtgtcaatgttggcttatggattgcgacaaatgcaccactctggaagatgttttattgacatgccatgttgcccaggcagcctcgggatatttgaaggcaacctgggttggtcccagcctttccagcacctcctttctccagcttggactagaagctcttggcgtgtgtcagctgtttgtgacatgacatgggtttgagactccttctttcccagcgtgccccacaggggaagtctctagagccaggcccaccccgggacagcagagcagagccctccctctacttcaggacctaaatctgcagtagggccatctgccctgacacctntcaaaagggtcatggtagaagatatgaagcagaagtctgcgaggatttcatcttccaactttgaggaccaggtatctgcccacccactcccatttcgccttgtctttgggggaagctgggctgcatctggagcttggtgggtctgtggccgaaagatctgccttgtacaggagcaacagggctcccctcctcttctcttggttgcctggatggggtgcacttaacatgctttttaactttttggaaaatctacagtggaatctttaggacaaggcccttgagggnccccctgggaatttccgataatttaagcatctctccacgggggaatgtgccacctcttgtcttatatttaccgagagaggccccctcccggggcaagacatgtcggacccgaggaacacacttacgcggcgtttgtgtggttttgaagcaaacgaaggttccacctggtcgcaaagtcaatatgcgtgcccaaagaaagtatttatcggagggatatgcgccgaagcgcacggagatgaacatcgcaaaggggatcattcgtaccc

SEQ ID NO: 88210 - DNA, 68 bp, Homo sapiens
gtgagtcgagattgcaccattgcactccagactggacaacagtgcgagactctgtctcaaaaaaaaaa

SEQ ID NO: 88211 - DNA, 1660 bp, Homo sapiens
ggggcaccagctcaggactgcatctgcctgccatttcccttccactcctcctttctggagtctgacattagaaagccagcgagaaggaagattcaaacaaccaaccctgatttcctgcttctccttttcatgagtgttcctgtggtctctgcacctcctttctgtcccccggcagagggcagtagagatggccggcccaaggcctcggtggcgcgaccagctgctgttcatgagcatcatagtcctcgtgattgtggtcatctgcctgatgttatacgctcttctctgggaggctggcaacctcactgacctgcccaacctgagaatcggcttctataacttctgcctgtggaatgaggacaccagcaccctacagtgtcaccagttccctgagctggaagccctgggggtgcctcgggttggcctgggcctggccaggcttggcgtgtacgggtccctggtcctcaccctctttgccccccagcctctcctcctagcccagtgcaacagtgatgagagagcgtggcggctggcagtgggcttcctggctgtgtcctctgtgctgctggcaggcggcctgggcctcttcctctcctatgtgtggaagtgggtcaggctctccctcccggggcctgggtttctagctctgggcagcgcccaggccttactcatcctcttgcttatagccatggctgtgttccctctgagggctgagagggctgagagcaagcttgagagctgctaaaggcttacgtgattgcaagggttcagttccaaccatggtcagaggtggcacatctgctcagccatctcattttacagctaacgctgatctccagctccagcgatggaacccactacagaggaggtggggcccctgtgtcaaagaggccgaggggcagcaagggcagccagggcacctgtgacttcttagtacaagattgtctgtccttcaggacttccaaggctcccaaagactccctaaaccatgcagctcattgtcacaccaattcctgctttaattaatggatctgagcaaatcttcctctagcttcaggagggtggggagggagtgattgctgtcatggggccagacttccaggctgatttgccaaatgccaaaatgaaacctagcaaagaacttacggcaacaaacgaggacattaaaagagcgagcacctcagtgtctctggggacatggttaaggagcttccactcagcccaccatagtgagtgggccgccataagccatcactggaactccaaccccagaggtccaggagtgatctctgagtgactcaacaaagacaggacacatggggtacaaagacaaggcttgactgcttcaaagcttccctggacctgaagccagacagggcagaggcgtccgctgacaaatcactcccatgatgagaccctggaggactccaaatcctcgctgtgaacaggactggacggttgcgcacaaacaaacgctgccaccctccacttcccaacccagaacttggaaagacattagcacaacttacgcattggggaattgtgtgtattttctagcacttgtgtattggaaaacctgtatggcagtgatttattcatatattcctgtccaaagccacactgaaaacagaggcagagacatgtaaaaaaaaaaaaaagg

SEQ ID NO: 88212 - DNA, 389 bp, Homo sapiens
gctgatcagaactatcagaactacatcttaagggttccgcctggtggtgaagacagccctgaagctgctgctcgtctttgtagagtactcggagtccaacgcacctctcctaattcaggctgtcactgctgttgacacgaaaagaggggtcaaaccttggtcaaatatcatggaaatcctggaggaaaaagatggagttgatacggagctactggtttatgcaatgactttggtgaacaagacgttatcaggactaccagaccaagacaccttctacgacgtcgtggactgcctggaggagctgggcattgctgctgtgtcccagaggcacttgaacaagaaagggactgacctggacttagtggagcaactcaacatttatgaggtgc

SEQ ID NO: 88213 - DNA, 20869 bp, Homo sapiens
ccccaccttttgagcaagttcagcctggttaagtccaagctggtgataaaactacaaagcagaatacgaagaagacagaggcaaaggcttcttccctcagaccataactcaagaatatgggggtctcgcagtaatttatgctctttgcttttgtcttttcatagttttccttgtatagtttgtcacttagggcatctcctgctgccttcagctgcctaagctgtgggttctctgaagcaggaagcacattataatctgcttttcctttattcttttcatagtcttctttgtattttgctgctgaggaaatttatttggtagattgaaggtttgaacgagagctacagaaacgaaagaaaaagtctgtataagccaatggtgttcgggaagaaaataaccccattgccttgagtttgtaggtgccactactactctgaaaaatggcagatgacgaagactatgaggaggtggtggagtactacacagaagaagtggtttacgaagaggtgccgggagagacaataacaaaaatttatgagactacgacaacaaggacatctgactatgagcaatcagaaacttccaaaccagctctggcacagccagcactggcacagccagcatcagcaaagccggtggagaggaggaaggtcatccggaagaaagtggatccttcaaagttcatgaccccctacattgcacacagtcagaaaatgcaggatctttttagcccaaataaatacaaggagaagtttgagaaaacaaaaggacagccatacgccagcacaacagatactccagaacttcgcagaatcaaaaaagtacaagatcaactcagtgaggttaagtatcgaatggatggtgatgttgctaagactatatgtcacgtagatgaaaaagcaaaggatattgaacatgcaaagaaagtgtcgcagcaagtcagtaaggttttatacaagcagaactgggaagacaccaaggataagtacctgcttcctcctgatgcccctgaacttgtccaggccgttaagaacaccgccatgttcagcaagaaactgtacactgaagactgggaagcagacaaaagtttgttttacccctataatgatagcccggaactgaggagagttgcccaggcccagaaagctctcagtgatgttgcctacaaaaaaggtctcgctgaacagcaagctcaattcacgcctctggccgatcctccagatatagaatttgccaagaaagtaaccaatcaagtgagcaagcaaaaatacaaagaagactatgaaaataaaatcaaaggcaaatggagtgagacaccttgctttgaagttgcaaatgccagaatgaatgctgataacattagcacaaggaaataccaggaagattttgaaaacatgaaagaccagatctacttcatgcagaccgaaacaccagagtataaaatgaataaaaaagctggtgtggcagctagcaaggtaaaatacaaagaagactatgaaaagaataaaggaaaagcagattataatgtgcttcctgcttcagagaacccacagcttaggcagctgaaggcagcaggagatgccctaagtgacaaactatacaaggaaaactatgaaaagacaaaagcaaagagcataaattactgcgagacccccaaattcaagctcgatactgttctgcagaacttcagtagtgataaaaaatataaagattcctacttaaaagatattttgggacattatgtaggcagcttcgaggatccataccattcacactgcatgaaagtcacagctcaaaacagtgataaaaactacaaagcagaatacgaagaagacagaggcaaaggcttcttccctcagaccataactcaagaatatgaagcaattaagaaactagatcagtgtaaagaccacacctacaaagtccatccagataagacaaaattcacccaagttacagactctcctgttctgctacaagcccaagtcaattccaaacaactgagtgacttaaattacaaagcaaaacatgaaagtgaaaagttcaagtgccatatcccccctgatactcctgcttttatccagcacaaagtcaatgcctataacttgagtgataatctttataagcaagactgggagaagagcaaagccaaaaagtttgacattaaagtggatgccattcccctgctggcagccaaagccaacaccaagaacaccagcgatgtgatgtacaagaaagactatgaaaaaaacaaagggaaaatgattggagtcctcagcattaatgacgatcccaagatgctgcactccttgaaggtggccaaaaaccagagtgatagattatacaaggaaaactatgagaagacaaaggcaaagagtatgaattactgtgagaccccaaaatatcaacttgatactcagctgaagaacttcagtgaggctagatataaagacttatatgtaaaggatgttttgggacattatgtaggcagcatggaggacccatatcacacacactgcatgaaagttgcagctcaaaacagtgataaaagttacaaagcagaatatgaagaagataaaggaaaatgctatttccctcagacaataacacaagaatatgacgcaatcaagaagctggaccagtgtaaagatcatacctacaaagttcatccagataagaccaaattcacggcagtcactgattctcctgtactgttgcaagcccagctcaacacgaaacagcttagtgatctgaattacaaagcaaaacatgaaggtgagaggttcaagtgccatataccagcagatgctccacagtttatccaacacagagtcaatgcctataatctgagtgataatgtttataagcaagactgggagaagagcaaagccaagaagtttgacattaaagtggacgccattcccctgttggcagccaaagccaacaccaagaacaccagcgatgtgatgtacaagaaagactatgaaaagagcaaagggaaaatgattggagccctcagcattaatgacgatccaaagatgctgcactccttgaagacagccaaaaaccagagtgatcgcgaatatcgaaaagattatgaaaagtcaaaaactatctacacggcacctcttgatatgctccaagtcactcaagctaagaaatctcaggcaattgccagcgacgttgattataagcacatcttacacagttacagctacccccctgatagcatcaatgtggaccttgccaagaaggcatatgcgctgcagagcgatgttgaatacaaagctgactacaatagctggatgaaaggttgtggctgggtgccttttgggtccttagaaatggaaaaggcaaagcgagcttcagacatcctcaatgagaaaaaatatcgccaacatccagacaccctcaagtttacctcgattgaagatgctccaattacagtacagtctaaaattaaccaggcccagaggagtgatatcgcttacaaagccaaaggagaggaaattattcacaattacaacctgccaccagacctgccccagttcatccaggctaaagttaatgcctacaatatcagtgagaatatgtacaaagcagacttgaaagacttgagcaagaagggatatgacctgagaactgatgcgattcccatcagagctgccaaagctgccaggcaggcggcgagtgacgttcagtacaaaaaagactatgaaaaggctaaagggaaaatggttggcttccaaagtcttcaagatgaccctaaactggttcattatatgaacgtggccaagatacaatcagatcgggagtataaaaaagactatgagaagacaaagtccaaatacaacacgccccatgatatgttcaatgtcgtggcggctaagaaagcccaggatgtggtcagcaatgtcaactataagcattctctccatcattacacctacttgcctgacgccatggacctggagctgtctaagaacatgatgcagatacagagtgataacgtctacaaggaagactacaacaactggatgaaaggcattggctggattcctattggcagtctcgacgtcgaaaaagttaaaaaggccggtgatgctctgaatgaaaagaagtacaggcaacatccagacaccctcaaatttaccagcattgtggactccccagttatggtccaggcaaaacagaacacgaagcaagtcagtgatatcttatacaaggctaaaggagaagatgtgaaacataaatacaccatgagtcctgatcttcctcagtttctccaggccaagtgcaatgcttacagtataagtgacgtctgttataaacgggattggcatgacttaatacgcaagggcaacaatgtgctgggcgatgctattcccatcactgcagccaaggcatcgagaaacattgccagtgattataaatacaaggaagcttatgagaagtcaaagggaaagcatgtgggtttcagaagcctccaggatgatcccaagctggtccactatatgaatgtggcaaagctgcagtctgatcgtgaatacaagaagaactatgagaacaccaaaaccagctaccatacccctggggacatggttacgatcacagctgcaaagatggcccaggatgtcgctaccaatgtcaactacaaacagccattgcatcattacacatacctacctgacgccatgagtcttgagcatacgaggaatgtcaatcaaattcagagtgataatgtgtataaagacgagtataacagcttcttgaagggcatcggatggatccctattggttccctggaggtggagaaggtcaagaaagcaggcgatgcattaaatgagaggaagtatcgacagcacccagataccgtcaagttcacaagtgtgcctgattccatgggcatgatgttggctcagcataacacaaagcagctaagtgatttgaactacaaggtagagggagagaaactgaagcacaagtatactattgaccctgaattgcctcagtttattcaagccaaagtcaacgccctcaacatgagtgatgctcattataaagcagattggaagaaaaccattcgcaagggctatgatttgagaccagatgccatcccaattgttgctgcaaaaagttcaaggaatattgctagtgattgcaaatataaggaggcctacgagaaagccaaaggcaagcaagttggatttctcagtcttcaggatgatcctaaactggttcactacatgaatgtggccaaaatccagtctgatcgtgagtacaaaaagggctatgaagccagcaagaccaagtaccacacacctctggatatggtcagtgtgacagctgcaaagaaatctcaggaggttgccaccaacgccaactacagacagtcataccaccactacactctcctgcccgatgccttgaatgtggagcactccaggaatgccatgcagattcagagtgataatctgtacaaatctgacttcaccaattggatgaaagggatcggctgggtgcccatagagtccctggaggtggagaaggcaaagaaagcaggagagattcttagtgagaagaagtatcgccagcaccccgagaagctgaagttcacttacgccatggacacaatggaacaggcacttaacaagagtaacaaactgaacatggacaagaggctctacactgaaaaatggaacaaggacaagaccaccattcatgtcatgcctgacacaccggatattttactctccagagtaaaccaaatcaccatgagtgataaactgtacaaagctggctgggaagaggaaaagaagaaaggatatgacctgaggcctgatgccattgcaataaaggctgcaagagcctctagagacattgccagtgattacaaatacaagaaagcctatgaacaagccaaagggaaacacattggcttccggagcctggaagatgaccccaagctggtgcacttcatgcaagtggccaagatgcagtcagaccgggaatacaagaagggatatgagaaatccaagacctccttccacaccccggtggacatgctcagtgtggtggcagccaagaagtctcaggaagtggccaccaatgccaactacaggaacgtgatccatacctacaacatgcttcctgatgccatgagctttgaattggccaaaaatatgatgcagattcaaagtgataatcagtacaaggctgactatgctgacttcatgaagggcattggatggctccctctgggctccctggaagcagagaaaaacaagaaagccatggagattattagtgaaaagaagtaccgccagcacccagacactttgaagtattccacactcatggactcgatgaacatggttttggcccagaataatgcaaaaattatgaacgaacatctctacaaacaagcatgggaggctgacaaaaccaaagtccacatcatgcctgatatcccccagattattttggcaaaggcaaatgcaattaatataagtgataaactctacaaactttccttggaagagtctaaaaagaaaggctatgatctcagacctgatgcaattcctatcaaagctgccaaggcttccagagatattgcaagtgattataaatacaagtacaattatgaaaaagggaaggggaaaatggttggtttccgcagtctcgaggatgatcccaaattagtccattccatgcaagtggctaagatgcaatctgatcgggagtacaagaaaaactatgagaacacaaagaccagctaccacacccctgccgacatgctcagtgtcacggctgcaaaggatgcccaagccaacatcaccaacactaactacaagcacctgattcacaagtacatcctccttccagatgcaatgaacattgagctgaccaggaatatgaatcgcatacagagtgataatgaatataagcaagattacaatgaatggtacaaagggcttggctggagtccagcaggttctctggaagtggagaaggccaagaaagcaactgaatatgccagtgatcagaaataccgccagcacccgagcaacttccagtttaagaagctgactgattccatggacatggtgcttgccaagcagaatgcacataccatgaacaagcatttatacaccattgattggaataaagataagaccaagattcatgtgatgcctgatacaccagatattttacaagccaagcagaatcaaacactgtatagtcagaaactctataaacttggatgggaagaagctttgaagaaaggctatgatctcccagttgatgcaatttctgtacagctagctaaagcttcaagagacattgctagtgattataaatacaaacaaggctaccgaaagcaacttggccaccatgttggattccggagtctgcaagatgacccaaaacttgtgttgtccatgaatgtagccaaaatgcagagtgaaagagaatacaagaaggactttgagaagtggaaaactaagttctccagcccagtggacatgttgggagtggtactggccaagaagtgtcaggagttggttagtgacgtggactacaagaactacctgcatcagtggacatgtctgcctgatcagaacgatgttgtgcaagctaagaaagtttatgaactgcaaagtgagaatctatataaatctgaccttgagtggctgagaggcataggatggagtcccttgggttctttagaggcagaaaagaacaagcgggcttcggaaatcatcagtgagaagaaatatcgtcagcctccagacagaaacaagttcaccagcattcctgatgccatggatatagttctggcaaagacaaatgccaaaaataggagtgatagactttatagagaagcttgggacaaagacaagactcagatccacatcatgcctgatacacctgacattgttctggctaaagcaaacttaatcaacacaagtgataaactctaccgaatgggttatgaggagctgaagagaaaaggttacgatcttcctgttgatgccataccaatcaaagcagcaaaagcctcccgggaaattgccagtgaatacaagtacaaggaaggctttcgcaagcagctcggccaccacattggtgcccggaacattgaagatgaccccaagatgatgtggtccatgcatgtggccaagatccagagtgacagggagtacaagaaggactttgagaagtggaagaccaagttcagcagcccagtggacatgctgggggtggtgttggcctataagtgccagaccttagtcagcgacgtggactacaagaactacctgcaccagtggacatgcctgcccgaccagagcgatgtcatccatgctcggcaggcctatgacctccagagcgataatttgtacaagtcagaccttcagtggctaaaaggcattggctggatgactagtggttctctcgaggatgagaaaaataaacgagccacccagattttgagtgaccatgtttaccgtcagcacccagatcaatttaagttttccagccttatggattccataccaatggttttggcaaaaaacaatgctattaccatgaatcatcgcctctatacagaagcttgggataaagataaaaccactgtccacattatgccagatacccctgaagttttattagctaaacaaaacaaagtaaattacagtgagaaattgtataagcttggcctagaagaagccaagaggaaaggttatgacatgcgggtagatgccattcctatcaaggcagccaaggcctccagagatattgcaagtgaattcaagtacaaagaaggctatcgtaagcagctcggccaccacattggtgcccgagctatacgtgatgaccccaagatgatgtggtccatgcacgtggccaagatccagagtgacagggagtacaagaaggactttgagaagtggaagaccaagttcagcagcccagtggacatgctgggggtggtgctggccaagaagtgccagaccttagtcagcgatgtggactacaagaactacctgcaccagtggacatgcctgcccgaccagagcgacgtcatccatgctcggcaggcctatgacctccagagcgataatatgtacaagtctgatctccagtggatgagaggcattggctgggtgtccattggctctttggatgtggaaaaatgcaaaagggcaactgaaattttgagtgataaaatctatcgccagcctccagacagattcaaatttaccagtgtgactgactctctggaacaagtgctggccaagaacaatgctctcaacatgaataagcgtttatacacagaggcctgggacaaagacaagactcaaattcacataatgcctgatacaccagagattatgttggcaaggcagaacaaaatcaactacagtgagactctatacaaacttgccaatgaagaagcaaaaaagaaaggctacgacttgcgaagtgacgccatccccatcgtggctgccaaggcctccagggacgttatcagtgattacaaatacaaagatggttaccgcaagcagctcggccaccacattggagcccggaacattgaagatgaccccaagatgatgtggtccatgcatgtggccaagatccagagtgacagggagtataagaaggactttgagaagtggaagaccaagttcagcagcccagtggacatgctgggagtggtgttagccaagaagtgccagaccttagtcagcgatgtggactacaagaactacctgcacgagtggacgtgcctgcccgaccagaatgatgtcatccatgctcggcaggcctatgacctccagagcgataacatttacaaatctgatctccagtggctgagaggcattggctgggtccccattgggtctatggatgtggtcaagtgcaagagagctgctgaaatactgagtgataacatctaccgccagcctccggacaagctgaaatttaccagtgtgactgactctctagagcaggtgctggccaagaacaatgctctcaatatgaacaagcgcttatacacagaagcctgggacaaagacaagacccaagtccatattatgcctgatacacctgaaatcatgttggcaagacaaaataaaataaattatagtgagagcctctatcgtcaggccatggaagaagccaagaaagaaggctatgacttgagaagtgatgccattcccattgtggctgccaaggcctctcgggatattgccagtgattacaaatacaaagaagcatatcgtaagcagttgggtcaccacattggcgcccgagcagtacacgatgaccccaagataatgtggtccctccacattgccaaagtgcagagtgaccgtgagtacaagaaagattttgagaaatacaagacaaggtacagcagcccagtggacatgcttggtatcgttttggccaagaagtgtcagaccttggtcagcgatgtggactataaacatcctctgcatgaatgcatctgcctgcccgaccagaatgacatcattcatgcacggaaagcctatgacctccagagtgacaatttgtataagtcagaccttgaatggatgaaaggcattggctgggttccgattgattccttggaagttgttagggccaagagagctggagaattacttagtgatactatctaccgtcagcgtccagaaacgctgaaatttaccagtataacggacactccggagcaggtgctggcaaaaaacaatgctttaaacatgaataagcgcttatatactgaagcctgggacaatgacaagaaaactattcatgtcatgcctgatacaccagaaatcatgttagccaaactcaaccgaataaactacagtgataaactctataaacttgctttggaagagtccaagaaggaaggctatgacttgcgtctggatgccattccaatccaagcagccaaggcttcaagagatattgctagtgattacaagtacaaggaaggctaccgcaaacagcttggccaccatattggggcccggaacattaaggatgacccgaagatgatgtggtccatccatgtggccaagatccagagtgacagggagtacaagaaggagtttgagaagtggaagaccaagttcagcagcccagtggacatgctgggggtggtgctggccaagaagtgtcagatccttgtaagcgacatagactacaagcatcccctgcatgaatggacctgcctgcctgatcagaatgacgtcattcaggctcggaaggcctatgacctgcagagtgatgctatttacaaatctgatcttgagtggctgagaggcataggatgggttcccattggctctgtagaggtcgagaaagtgaagagagctggagaaatcctgagtgacaggaagtatcgccagcctgcagaccagctcaaattcacatgcattaccgacactccggaaattgtcctagcaaagaataatgccctgacaatgagcaagcatttatacacagaagcttgggatgctgacaaaacctccatccacgtgatgccagacaccccagatatcctgctggccaagagtaattctgccaatatcagccaaaaactttacaccaagggatgggatgaatcaaagatgaaggactatgatctgagagcagatgctatttccatcaaaagtgccaaggcctccagggacatcgccagtgactacaaatacaaggaagcctatgagaaacagaaaggccaccacattggagcccagagcattgaagatgatcccaagattatgtgtgccatacatgcagaaaaaattcaaagtgaaagggagtacaagaaggaattccaaaagtggaaaaccaagttctctagcccagtggacatgttaagcatcttgctggccaagaaatgtcagactttggtcactgacatttattatcgcaattacctgcatgaatggacatgcatgccggatcaaaacgacattatccaagcaaaaaaggcctatgacctgcagagtgatgccctctacaaggctgacttggagtggttgcgtggcattggctggatgccccaagggtctcctgaagtgttgagagtcaaaaacgcccagaatatcttttgtgacagtgtctatcggacgcctgtggtgaaccttaagtacacaagcattgttgacacacctgaagtggtccttgctaaatcaaatgctgaaaatattagtattccaaagtacagagaggtttgggacaaggataaaacttcaatacacataatgccagatactccagaaattaatctcgctagagcaaatgctcttaatgtgagcaataaactttaccgtgagggctgggatgaaatgaaggcgggctgtgatgtccggctggatgccatccccatccaggctgccaaggcctccagggagattgccagtgactataaatataagcttgaccatgagaagcagaagggacactacgtgggcaccctcacagccagggatgacaacaagatccgctgggccctcatagctgacaagctccagaatgaacgagagtaccggctggactgggccaaatggaaggccaagatccagagccctgtggacatgctttccatcctgcactctaaaaattcccaggctctggtcagtgacatggattaccgcaattacctgcaccagtggacctgcatgcccgaccagaacgatgtgattcaggccaagaaggcctacgaactgcagagcgataatgtttacaaggctgacttggaatggttgcgtggaattgggtggatgccaaatgactccgtgtccgtcaatcatgccaaacatgccgcggacatcttcagtgagaaaaaatatcgcacaaaaatagaaactctcaactttacgcctgtggatgacagagttgattatgtgacagcgaaacaaagtggcgagatcctcgatgatattaaataccggaaagactggaatgccaccaaatcaaagtacaccctcacagaaacccccctgctgcacactgcccaggaggctgctaggatactggaccagtatctctacaaggaaggctgggagagacaaaaagccacaggttacattttgcctccagatgctgtgccatttgttcatgcccatcactgcaatgacgttcagagtgagctgaaatacaaagctgaacatgtgaagcaaaaaggtcattatgttggtgtcccgacgatgagagatgatcctaagctggtttggtttgagcatgcaggccagattcagaatgagagactatacaaagaggactatcacaaaacaaaggccaaaatcaatatacctgctgatatggtgtcagtcttggccgccaagcaggggcagacccttgtcagtgatattgattatcgtaattacttgcaccaatggatgtgtcatcctgaccagaacgatgttattcaggcaagaaaggcctatgacctacagagtgataatgtctacagagctgacctggagtggctccgaggcattggctggatcccactggattctgtggaccatgtaagggttactaagaaccaggaaatgatgagtcagatcaaatataagaaaaatgcccttgaaaactatcctaactttacaagtgtggtggatcctccagagattgttttagccaagattaattctgtcaatcaaagtgatgtaaaatataaagaaacatttaataaagcaaagggcaaatatacgttttcaccagatacaccacatatctcccactccaaagacatgggaaaactctacagtactatactgtataaaggggcgtgggagggcaccaaggcctatggctacaccctggatgagcgctacattcccattgttggagccaagcatgctgatctggtgaacagtgagcttaaatacaaagagacatatgagaagcagaaaggtcactacctggctggaaaagtgatcggtgaattccctggtgtggttcactgtctggatttccaaaagatgaggagtgcgttgaactacagaaaacattatgaggataccaaagcaaatgttcatatccccaatgacatgatgaatcacgtgctggctaaaaggtgccagtacatcctcagtgacctggagtatcgacactatttccaccagtggacgtctcttctggaagaacccaatgttatacgcgtccgaaacgcccaggagatcttgagtgataatgtgtataaagatgacctgaattggttgaaaggcattggttgctacgtttgggatacaccccaaatcctccatgccaagaaatcatacgaccttcagagtcagctacaatatacagcagcaggtaaagaaaatctacaaaactataatctggtcacagacacgcccctctatgtgactgctgttcagagtggcattaatgccagtgaggtaaaatataaagaaaattatcatcagattaaggacaaatacacaacagttctagaaacagtggattatgacagaaccagaaacctgaagaatctttacagcagtaacctgtacaaggaggcctgggatagagtgaaagccaccagctacatcctgccttccagcaccttgtccctgacacacgccaagaaccagaagcatctggccagccatatcaaatatcgggaagaatatgaaaagttcaaagctctttatacgttaccaagaagtgttgacgatgatccgaacacagcacggtgcctccgagttggcaagcttaacatcgatcgcctgtacagatcagtttatgaaaagaacaagatgaaaatccacatcgtgcccgacatggtagagatggttactgccaaggattcccagaagaaagtcagtgagattgattaccgcctgcgcctccacgaatggatttgccaccccgacttgcaagtcaatgatcacgtcaggaaagtcacagatcagatcagcgatattgtatacaaggatgacctcaactggctgaaaggcattggttgctacgtctgggacactcctgaaatcctccatgccaagcatgcttatgatctacgtgatgatatcaagtataaagctcacatgttgaaaacaaggaatgactacaagcttgtcacagatacaccagtctacgtgcaggctgtcaaaagtgggaaacagctaagtgacgctgtctaccactatgactatgtgcacagtgtcagaggcaaagtggctccaactaccaaaaccgtggatctggaccgggcccttcatgcatacaagctccagagttcgaatctatacaaaaccagcctgcgcaccctgcccactggatatagacttccaggtgacactcctcacttcaaacacatcaaggacacccgttacatgagcagttatttcaagtacaaagaagcctatgaacacaccaaggcatatgggtatacacttggccccaaagatgttccatttgtccacgtccggagagtcaacaatgttaccagcgagagactgtatcgggaattgtaccacaaactgaaagacaagatccatacaactcccgatccccctgagatccgccaagtcaagaagacacaagaggctgtcagtgagttgatctacaaatcagacttcttcaagatgcagggccacatgatctctctgccatacacaccccaagtgatccattgccgctatgtgggagacatcaccagtgatattaaatacaaagaggacttgcaggtcctgaagggatttggctgcttcctgtatgacactcctgacatggtccgctcccggcacctgcggaagctctggtctaattacctatacactgataaggcaagggagatgcgagacaaatacaaagtggtgcttgacactccagaatacagaaaagtgcaagaactgaagacacatctgagtgagctggtctacagagctgcaggcaagaagcagaagtcaatctttacttcagttcctgatactcctgatcttttaagagccaagcgagggcagaagcttcagagtcagtatctgtatgttgaacttgccaccaaagagagaccccatcatcacgctggaaaccagaccacagccttgaagcatgctaaagacgtgaaggacatggtcagtgagaaaaagtacaagattcaatatgaaaagatgaaagacaagtacactccggttccagatacgccaatcctcatcagagccaagagggcttactggaatgccagtgatctacgctacaaagaaacatttcaaaagaccaaagggaaataccacacggtgaaagatgccctagacattgtctatcatcgcaaagtcacagatgacatcagtaaaataaaatacaaggagaactacatgagccagttgggtatctggaggtccattcctgatcgtccagagcatttccaccaccgagcagtcactgacacagtcagtgatgtaaaatataaagaagacttgacttggcttaaaggcattggttgctatgcctatgatacccctgatttcactctggctgaaaagaacaagactctctacagcaagtataagtataaagaagtatttgaaaggacaaagtcagatttcaagtatgttgccgactctccgatcaataggcatttcaagtatgcaactcaattgatgaatgagaaaaaatacagagctgattatgagcagcggaaagataaataccacctggtagtcgatgagcctagacatctgctggctaagacccgcagcgaccagatcagtcagatcaaatacaggaaaaactatgaaaaatcaaaggacaaatttacctcaattgtggatactccagaacacctgcgtactacaaaagtcaacaaacaaatcagcgatatcctttataaattggaatacaacaaggccaaacccagaggctacaccacaatccacgacacgcccatgttgctgcatgtccgcaaggttaaagatgaagtcagtgatctgaaatacaaagaagtataccaaagaaataaatccaactgcaccattgagccagatgctgttcatatcaaagcagccaaggacgcctacaaagtcaacaccaatctggactataagaaacagtacgaagccaacaaagcccactggaagtggactcctgaccgaccggacttcctccaggctgccaagtcatccctgcagcaaagcgattttgaatataagctggaccgggagttcctcaagggttgcaagctttctgtcactgatgacaaaaacacggtgctcgccctcaggaatactttaatagaaagtgatctgaaatacaaagagaaacatgtcaaggaaagaggaacctgccatgccgtacctgacacgcctcagatcctgctggcgaagactgtcagcaacctggtgtctgagaacaagtacaaggaccatgtcaagaagcacttggcacagggctcatacacaacactaccagagacccgggacactgttcacgtcaaggaagtgaccaagcatgtcagtgatacaaattacaaaaagaagtttgtcaaggagaaaggaaaatccaactactccatcatgctggagccaccagaggtgaaacatgctatggaagtggccaagaagcaaagtgatgtcgcttacagaaaagatgccaaagagaacctgcattacaccacagtggctgatcgaccagacatcaagaaggccacacaggcagccaaacaggccagtgaggtggagtacagagccaagcaccgcaaggaaggcagccatggcttaagcatgctcggtcgcccagacatagaaatggccaagaaggcagccaagctgagcagccaggttaaataccgagaaaatttcgataaagaaaagggcaagacaccaaaatacaatccaaaagacagccagctctacaaagtcatgaaagatgctaataatcttgcaagtgaggttaaatacaaggctgacctgaagaaacttcacaaacccgtgactgacatgaaggagtctctgatcatgaatcatgtcctgaatacaagccaacttgccagttcttaccagtacaagaagaagtatgagaagagtaaaggccactaccacaccatacccgataatctggagcagcttcacctaaaagaggccacagaattacagagtatagtgaaatacaaagaaaagtatgaaaaggaacgaggaaaacccatgctggactttgaaacaccaacgtacatcactgccaaagagtctcagcagatgcagagtgggaaagaatataggaaagattatgaagagtccattaaaggcagaaacctgactggcctggaggtcacgccagctttgttacatgtcaaatatgcaactaaaatagcaagcgagaaagagtacaggaaagatctagaggaaagcatccgtgggaagggcctcactgaaatggaagatacacctgacatgctaagagcaaagaatgccactcaaatcctcaatgagaaagaatataagcgagacctggaactggaagtcaaaggaagaggcctgaatgccatggccaatgaaactccggattttatgagggccaggaatgctactgatattgccagtcagattaagtataagcaatcagcagaaatggagaaagccaatttcacttctgtggttgatactccagagatcattcatgcccaacaagtcaagaatctttcaagccagaaaaagtacaaggaagatgctgagaagtccatgtcgtattatgagactgttttggacaccccagagatacagagagtccgggagaaccaaaagaacttcagccttctccaataccagtgtgaccttaaaaacagtaaaggaaaaattacagttgttcaagacacgccagaaatactgcgtgtaaaagaaaatcagaagaatttcagctcggttttatataaagaggatgtctcaccaggaacggctatcggaaagacacctgagatgatgagagtgaaacaaacacaggaccacattagctcggtgaagtataaggaagcaataggacaaggaactccaatccctgacctgcctgaagtgaaacgtgtgaaggagacgcagaagcacattagctcggttatgtacaaagaaaacttgggaacaggcattccaaccactgtgactccagagattgagagagtcaaacgcaatcaagagaactttagctcggttttgtacaaagaaaatttggggaaaggaatcccaacacctatcactccagagatggagagagtcaaacgcaatcaagagaactttagctcggtgttatacaaagaaaacatgggcaagggaactcctttacctgtcactcccgagatggagcgagtcaaacacaatcaagaaaatattagctcggttttgtacaaagaaaatgtggggaaagccaccgcaacccctgtcactcctgagatgcagagagtcaaacgcaatcaagaaaacattagctcggtgttatacaaagagaacctggggaaagcaacccccacaccctttactcctgagatggaaagagtgaaacgcaatcaagaaaactttagctcggtattgtacaaagagaacatgagaaaagcaactccgacacctgttactccagagatggagagagctaagcgcaaccaagaaaacattagctcggttctttattctgatagtttccggaaacaaatacaaggcaaagctgcctatgtattggatacccccgagatgagacgggtgagggagacccaacggcacatctcaacggtgaaatatcatgaagactttgagaaacacaagggttgcttcacaccagtggtgacagatcctatcactgaacgagtaaagaagaacatgcaggacttcagtgacattaactaccgaggtattcagaggaaagtggtagaaatggaacaaaaacggaatgaccaagatcaggagactattacaggtttacgtgtctggcgtactaatcctggttcggtttttgactatgatccagcagaagacaacatccagtcccgaagcttacacatgattaatgtccaagctcagcgccggagccgggagcagtcacgatctgccagtgcactaagcgtcagtgggggtgaggagaagtctgagcattcagaagcaccagaccaccacctttcgacttacagcgacgggggtgtctttgcagtctcaacagcttacaaacatgcaaaaaccacagagctcccacaacaacgatcatcttcagttgctacccaacagacaacggtatcttccatcccatctcatccatctactgctggaaaaatcttccgtgccatgtatgactatatggctgctgatgcagatgaggtgtccttcaaggatggagatgccatcataaatgttcaagcaattgatgaaggctggatgtatggcactgtgcagaggactggcaggaccggaatgctcccagccaactacgttgaagctatttaggcatttcaaagcatcacacttgtctgcaggacttacagatcctgcagtcaatgtttcggtttagactctccactgttacctaagttctcaagctgcctatggtttttctgtgtcaatgtgatttatggtagtaccatcctttctcctttgggttttaaaataagttgcagaacagacactttaaaagcttctgcaatattatttctgtgcctagagtctttctccattataaacatgttttaacattatttcttttctaaaacagggattttgaatatgccaaacacattaaaggaaaaatagcagagatgttcaccttttccttgctgattgctaatgcttattatttctaattcagttctgaagttataaacttataatcaatacaaaccagcaactaataaaacctctaattctgc

SEQ ID NO: 88214 - DNA, 747 bp, Homo sapiens
tccgacttcccgggtcacccacgcgtccgcccaaacttgctttcgctctcacctggtagtgaggttgtaggggaaggcctctgacatccctcaaagagccccagaattgccctttccagatgtcagactttggaacaggttttacctatgtgctgtgtgtgtgtgtgagttgagactcttctttttgtaaattatcagaacctaactcaaattggctggattcacaaaaggaaatgtgttgacttgagtttctgggaagtccaaggggtggtctcttctggcatgaatggacccagaggttcaaatgatgtcagctggacttcccccacctttcaactgtcttcattcttccaataggctttctccatggcagccccgggcctctgttatccggattgctccaaagctggaggaaatgatagtcttgccttgaagttccaccaaagtcccagggaagactctaactgggccagccctgaacccattatagtcaatcactctgattgttcttgtgtgctcccctgggacaacccgacctgaaacatattgattattgcagaatgggggaaagataatctccaaagaataagagcccaaaccgctgttttatcttaagccaagtcttcagctagaacttatcacacaaaagaagccaactaagaacaatccagtggtaaaaaaatatgtatatatatcacacagaatctctagagaacagagtcctgtccaggggtcctggaatcagaa

SEQ ID NO: 88215 - DNA, 427 bp, Homo sapiens
  misc_feature (1)...(427): n = a,t,c or g
gagcatggaatccgatttttcgaaactagtgctaaatccagtatgaatgtggatgaggtgagatccacacccccatccccgaccaagagaggaagtattagaaggtagattctcctccctccaaactgactctgttccccactttaggcttttagttccctggcccgggacatcttgctcaagtcaggaggccggagatcagcaagttggttttgctggactaggtacaactctggggtgtgtgtgcgtgtatgtatgagtgtgtgggggagcgtgcgcgtgcgccncctgctncttctcctctacctggagctcgccctggactatcataggggcgatgggttctctgccccaaaaaaccacctagtagccaccgctgtggagaaccaagaggctattttagcctgctcaaccccaaagaaaactg

SEQ ID NO: 88216 - DNA, 892 bp, Homo sapiens
tatttggtcatatcttccattctttcttacctaattcctctaatatctctctgtgagcctaaaccaataattatatattacattctattgtctttcttatataactgcagaaagataaatatcactttgtttgttcctgtaggttttctttagtgtaatccatagcagttattgcattggagcagcagtccctcactttgaaaccttcgcaatagcccgaggagctgcctttcatattttccagggtattgataagaaacccagtatagataacttttccacagctggatataaacctgaatccatagaaggaactgtggaatttaaaaatgtttctttcaattatccatcaagaccatctatcaagattctgaaaggtctgaatctcagaattaagtctggagagacagtcgccttggtcggtctcaatggcagtgggaagagtacggtagtccagcttctgcagaggttatatgatccggatgatggctttatcatggtggatgagaatgacatcagagctttaaatgtgcggcattatcgagaccatattggagtggttagtcaagagcctgttttgttcgggaccaccatcagtaacaatatcaagtatggacgagatgatgtgactgatgaagagatggagagagcagcaagggaagcaaatgcgtatgattttatcatggagtttcctaataaatttaatacattggtaggggaaaaaggagctcaaatgagtggagggcagaaacagaggatcgcaattgctcgtgccttagttcgaaaccccaagattctgattttagatgaggctacgtctgccctggattcagaaagcaagtcagctgttcaagctgcactggagaaggatacccccaggtattcattttga

SEQ ID NO: 88217 - DNA, 429 bp, Homo sapiens
cttatccccactttctggcctccccaccatgagccgccaattcacctacaagtcgggagctgctgccaaggggggcttcagcggctgctccgctgtgctctcagggggcagctcatcctcctaccgagcagggggcaaagggctcagtggaggcttcagcagtcggagcctttacagcctggggggtgcccggagcatctctttcaatgtggccagtggcagtgggtgggcaggaggctatggatttggccggggccgggccagtggctttgctggcagcatgtttggcagtgtggccttggggtccgtgtgtccgtcgttgtgcccgcccgggggtatccatcaggtcaccatcaacaagagcctcctggcacccctgaatgtggagctggaccctgaaatccagaaagtgcgtgcccaggagcggga

SEQ ID NO: 88218 - DNA, 458 bp, Homo sapiens
cccgggtcgacccacgcgtccgcaggggccaaagtctggatgctggggtctccaccccaagcctggtagtaaaagctggtgaagaataaggtcattccagaggctagcagtaacctggcccaaaggggctttctgcaagagggcacccctaacagggccagactgtgtaagaagtggtacttgttggccttgtcaaagagctccttcccagaggcatctgggaattgggtgtcatgtacccgataggaagccaagccaagggccccagctctggacgaggcacccacgccggtggaaagctgcccctggcccagccatggctgtggattgtcaggcgctggatgaacaaacatccttgacacccttttggaaactcattggccataaataagttttatttctgggctctgtactttattcagttggtctgtatgtctgtccttaggccagtaccaaat

SEQ ID NO: 88219 - DNA, 581 bp, Homo sapiens
  misc_feature (1)...(581): n = a,t,c or g
cggttggccaggcaccaagggctttccaggttccccaggtattctgggccgtcccagccccaattcccacccaaaggggtcaaggggggggactctgggctgagtctgccctccaaacttcagggaagggagggtctcaaaaagcagggggggcttcctgaagggctatgcaatcggccgtgaggggcgggtccgggccctgtggtcctgtacgctgctaagatgtgatccctaagaatcggtttctcaagccagttgctgggttgaatggactcatcaggcttttagacggagagagaaatagagtccttgctttttcagcagcaccgttgggagggtgggatgcacctgcgcccctcaggtgtctggagtattcactctgcccattgcctgtctgtgatctttcattttgttggcataaggaagccagcggtctccacctgcccctgggcagttctgatgctggagacagtgatagcgcttgggcacnnnnnnnnnnnnnnnnnnnnnnnnnnnnnnnnnnnnnnnnnnnnnnnnnnnnnnnnnngatcagcatgccagcgtggtcgggttctggnggg

SEQ ID NO: 88220 - DNA, 387 bp, Homo sapiens
ctgaaacgcttgataacacaaaggaagctctgccttctcccttcctggacggtgtccgcagggttgccactgtctgtctgcacattggctacccaactgacgcatcacaaccccattctatcatcaacggttacaaacgaaccctgtgcttgtctgaggagacggaatacaccttcccacttgcttaacaagacaagggcttcttggctgatacatctgcctttgcggctgctgaccctgtggctgctgccaccacaactgctcctgctgctggtgcagccccaactaaagttgaacccgcagaagagacggaggaggcccacgaagatatgggatatggattgtttgactaatcaccaataagcaaccgacgcaaccaggtgtaga

SEQ ID NO: 88221 - DNA, 470 bp, Homo sapiens
ctgtaccggacccacgcttacgtgcgcgcgcgtgccattgcctacctcttctataacgccatctaatatcatgtcactgctcgacgatgtaccactgctctactgggaggatcctgtatgaacgcaacttagacgccttgcaaacgattcctgcctttggaattttcagactgctgatcatcatcctgataattgtgttggacatgggatttgctctctatagaaggttccttgttcctgaagatgggtctccggtgtcttttgcagctcacattgcaggtggatttgctggaatgtccattggctacacggtgtttagctgctttgataaagcactgatgaaagatccaaggttttggatagcaattgctgcatatttagcttgtgtcttatttgctgtgtttttcaacattttcctatctccagcaaactgacctgcccctattgtaagtcaattaatataaagagcg

SEQ ID NO: 88222 - DNA, 417 bp, Homo sapiens
cccacgcgtccgctcagacctcagggagctctcacagagtctatgaaagttcataagaagtgtgtgagagctccctgaggtctgagtaaagactggagaagagaaggagtggaggtaaagagattaaccacacttcttatgaactttcatagactctgtgaccttgtttacacccctcttttaagaagaagggcctggtctgtctcttcctttcaccagcaaccagatgttgctggtctgtctctaaactctctgtattgcgttcttttaattcttggcccgggctgtcccttcttttcacctctgatgtcgctgattctgtctagttagcgggctacaacttgggagagagatcttgatattatatttttcattattctgaatctattaacatgcattacttttataattgaaaaa

SEQ ID NO: 88223 - DNA, 1214 bp, Homo sapiens
gctcgctgctcacaccccctcctgccagtgcagcgcgagtaagagcgcccaagggaccacagctggcatcccaggggttaatttcggagcagcccaggtggaggtcgagcccccaaccccgtcggcacctccaggcttccgaggccaccggaacggaggaggcttcggtggctctttgtctacctgctctgggtgttaaagagcccgctcgcagcctgcatcgccggggctcgggacagaagtcagcggcggggaaatggggctctgtcactttaagtacagctggagccctgggatgaaagcagctccatcagtagtggactcagcgatgcctcagacaatctcagttcagaagaattcaatgccagctcctcactcaactccctcccaagtactcccactgcttctcgcaggaactcaacaatagtgctacgcacagactcagagaagcgctcactggcagaaagtgggctgagctggtttagtgaatcagaggagaaagcccctaaaaaactggagtacgacagtggtagcctgaagatggaacctgggacttctaagtggcggagggagcggcctgagagctgtgatgattcatccaagggtggagaactgaaaaagcccatcagcctgggccaccctggttccctgaagaagggcaagaccccacctgtggctgtaacttcccccatcactcacacagcccagagtgccctcaaagtcgcaggcaaacctgagggcaaagctacagacaagggtaagcttgcagtgaagaatactgggctccaacgctcctcctctgatgctggtcgggaccgcctgagtgatgctaagaagcccccctcgggcattgctcgcccctccacttcgggatcctttggctacaagaagcctcctcctgccacaggcacagccactgtcatgcaaactggtggttcagccactctcagcaagatccagaagtcctcaggcatccctgtcaagccagtaaatgggcgcaagactagcttagatgtttccaacagtgcagagccaggattcctggctcctggagcccgttctaacatccagtaccgcagcctgccccggccagccaagtcaagttctatgagcgtgaccggcgggcggggtggacctcgccctgtgagcagcagcattgaccccagtctcctcagcaccaagcagggaggccttacgccttccagactgaagga

SEQ ID NO: 88224 - DNA, 391 bp, Homo sapiens
acggtggaattcgtctttaaatcattctataagcatgtaaactagaagttaccagagtctcttcctttagctgagaacctgtttgctcagctggctcaaaacattgctggcagcctaggcatttcttcatgttatgtttacagaggaactaacatgggagaccagtggccttgaaaagcaaaaacgttaatgccacaagataattttactttaactgacaattcccctgaaccaatgcctgtaagttcaagtctctggctctgaaaaacttctgtcattggaagatactgtgttgctcgctggggaaaggcttttacaaacccagtaagagaactaacctgcttagaacagcaatattataatgaaacactaagaaaaactttgtggcggg

SEQ ID NO: 88225 - DNA, 396 bp, Homo sapiens
atctaggtcatccatggcggttgactggagctccagtgggtcgatcacaatgttggctttggaagcaaggtcatctttgagggtcttccgcaggtgcgagaggaggccccccaggcgctgcaggtcaaagtagtccaccttgccattatagaagacctggggcgggatgtaggcctcctcactgaaggaagcatgaggattggaagccttgtattcatcccaatagtagcgcagggcagagatcagccggtgtaagaagcagaccatgtactcaggggggcagagcatgggcatgttcccccggccactggcgttctcctgcagaaacttgcgaaacttggtcaggaagatatacctagaagcttcacccccattgtcatctttattgtccagcag

SEQ ID NO: 88226 - DNA, 631 bp, Homo sapiens
gggaacttcgccacccttttccccttccctgaggccatcactatcaccatttccttgtgcgctcttccagaaatattttgggcatggacaggacactatgcatactgttctgtaccttgcttttctagttactatgtctcagagatccactgtgatttaatcagtgcccgattgaagaaaatgttctttgttttactgtgttgcaaatgggctgctaaagttatgggatgctggatcaaggagcagatcattttgagttttgatatcttcgtccgtagaaattgtgcttaactatactctcatagcaatgtatgagaatgcgttcccctacacattctgatcttgttaaaccagactgggactctggaccagaagggaaagaccatccctgtatagcaaatatctggatggggagaaagctgctgtcactcattgacttctttaggttaagtcttagtgatcaaaacatagtgaaagatatgaagcttactttggaaactcagaactatttccacagtttgggcaaaagctgtcatcagatccccatcacgttttggagagaatggaagcatgaccgcattcttggctttaaagagcttaaaatcaggccgggctccatggctcacgcctg

SEQ ID NO: 88227 - DNA, 405 bp, Homo sapiens
atagagaacactgacattaatgaagcctaccctgaaacataggggaatatcatgtggcggaagtgctgggaatatgatcatattgagtgcgtctgccccggaaagagggaagacgcgggttataccatcccttgctgcttgagagattagaaccttgaccattcaccactgacattggcaccaggttttatcaccaaccattattttagctaaaaagggttcaaaaaatcttgaacggattaaacctggctaagggaaaaaatggaccctcacagcaccggaaccttaattaatgcctaatggaataaattaaaagcctacccctgctgggcctgcccatattcggattttataaaaaaaaaaggtcgacctgcgcaacataaaaatgaacattacatgctaaag

SEQ ID NO: 88228 - DNA, 852 bp, Homo sapiens
cggacgcgtgggattttgcccaaataaattgggtaaatgctgctgaaaataggtgggaaagactttaccaagtagaatataggagggaagggcatttttaggcagaggaaacagcacatgcagaagcttgtagccatgaaatggcaaacttagtggggctagaggatgttatgcatggtgtgaccagagggatgggaggtaaacccagagccaaattgtcaaggactttacatactaagttaaatagatcatacattttcctttggctaggaagaggtctttaattggaggactcaacatcagaattccttttagaaaaataattcgtgtaagaattacagctaccttttgggaggctgtggaaataaaccagatgagaacttgaattcaaggctggatttacagattttttagtagtagtctcaataatttttcatgacttttcatgcttttattgggcaagagagagaaagtggaggaattatctagagtagtttcaaggttcataactgggagataagttggatactgatttttataaacctgaatatgagatacaagaatgtcaaacgggtttggagggaagacagaaaataaatactcttagacatgttgaatttgatatacttgaatcagccagatagttacccagtgggcaattgaatagtcagtgttgaagaccttgatttaataatcttcatccatgtggtatttgaaacaacaggagtaagattgtccagagaaaatactgtgagattatgaaagaactgaggttagacctgatcagcactgacatttttgtaacgatcagaggaggaggaagagccatgaagaaggattgagtaagaagag

SEQ ID NO: 88229 - DNA, 955 bp, Homo sapiens
gactatgtattatactgttttatccttcatgttacatgtaacagtatagcacagtggggtctcagtaatggttggcttgatatgctgatttgacctagataacaaaaagtttatatttttgaaatattaataacttgaacattaaaacccatccatttacagttaatttattttagagatatatttttctctaaatatccttctttagacaattataatagttcaagcttatgcatttggaattaggtagtcaatggctgaattttatagtagttggtaaatactataggacatacgggcttatttatataaatgttctaatacttatatttggtagccattattaaagtcttcgaatcatagttaagtctccatggtagcagtggtttcgtgattatgttttaatggatgcagtatacgataaagttaattcatagttaaagtttggtactgatttaaattaaatcatttgagaggccaggcacgatggctcacgcctgtaatcctagcactttgggaggcggaggtgggaggatggcttgagcccaggagttcgagactagcctgggcaaaatagggagaccctgtctctgcaaaagaaaagatagctagacgtggtggcacgtgcctgtggtcccggctatttgggaggctgagttgggaggactgcttgagccccggaggctgagactgcagtgggccataatgaaaccactgcactttagcctgggtggaagagcaagactgtcttcaaaaaagaaaaaaagggcgggccgctctaggggatccagttttcggtcccggggcggggagggaaacgtttttttttaggggacccaagatgagattggcggcggcgcgtttaaacagtcaagacgtggacgacaccacacacgactagtgaggagatgacgacgcggcagtgtcgacgagcggagatgcgccgacccccccc

SEQ ID NO: 88230 - DNA, 532 bp, Homo sapiens
ttttttttttttaccagaaaataaagccattttattatgatttttttctctgccatgtggctgggaatgggaggtgagtggatgggtgtgaatggctgaccctgctggaggccctgcggggctctacttggcctggactgtctcctccagcctgtccaagcgcttctggagctcctgcaccgtggcctggagcttccgcatctcctcctccagccgagacacggcatcctggggacccggtgctgcattaggcccagctcctccctggctccccttaccccagcctgtgctgagccccatccctagagccctggccttgggccctttagtcgctcagctggttgctgcctggagacctgcaggcctatcaatctgaaacctgtgttctgaggcctcaggattaccattcccggacccacaaagattcccaatgttgtgagtttgaggtgccccaaacaccagccccaccccaccctcccagttttattccctggcttcccagccctctcaccgagctgggagtgccactggc

SEQ ID NO: 88231 - DNA, 420 bp, Homo sapiens
tcatttcacaatatatatactaaatatgaatacattcacattaacgaagtctataataaattatagtctgtagtaaattactactgcttttcattttaaagtgtcagttaaagtttaagaaaatgtattgaaatgaaggtagagataaaattttgttttgtagatagttttgttgtcactttctgggcatcaaatgaccttttttgtttgggctgtctttatttcttctctatatgtctgcttttccttcttctcctttaaaccttaattttgaggcaagaatgctcttttaaatatctcaatttctcctccagcaggctgctgccatcaccagaagttagtgatagtgagtgagttgttattttaataactagacctttcagtacccctgtatgcccacttggaatacccgaggatagt

SEQ ID NO: 88232 - DNA, 401 bp, Homo sapiens
caaagaggccaacatagctagaattcttaaggtataaaacaacagaggaggaaactttacagagaatgttctggatctgcagggtgttcctcttgagtcttcagcagaaaactgatcagaggatacatgtgaggaaattagccaagactggaggaaggactgccaaaaaagagcaggcagaacagttccccaggatcacacaggctgggaatagttcatgttcccaagacctggaatggaaaaacctctgcaaacatactacaaatgttcgagaaagaaagaagaaagaaagcatgagcacattaaggagagacaaagaggacagaaaaagaacaacattgaacttctagaaatgaaaaatgtaatcaatatgtaagacgaaaaatataatcaatgtctga

SEQ ID NO: 88233 - DNA, 766 bp, Homo sapiens
atgagggcacggccttgtaaagaaacccaaagcagcacagcctctgagaactgaataatggccccttccagatgcctctttgcaatggtggaaatttggcagtaacaggttcctgggcagatcgatcaccactacatgaagcagcaagtcaaggtcgccttcttgctctgagaacattattatcacagggttataatgtaaatgcagtaaccttagaccatgtcaccccattgcacgaagcctgccttggagatcacgtggcatgtgccagaactctgctggaagcaggagctaatgtaaatgcaatcacgatagatggcgtgactccgttattcaacgcatgctcccaaggcagtccaagctgtgcagagctgcttctggagtatggcgcccaagcccagctggagtcatgtcttccatccccaacgcatgagggcgccagtaaaggtcaccatgaatgtcttgacatcctgatatcctggggcatagatgttgaccaagaaattcctcattcgggaactcctctctatgtagcttgcatggcacagcaattccattgcatttggaaccttatttatgctggggctggcgtacggaaaggcaaatattgggataccccattacccggtgctggccaccaatccacacaaaaactggaatagttaccggctcaattggagacgaatgcatggccacatccccggcttcggcgactatttatctagtgctgccaacgcacgggaacaacgatttctccctcgctccc

SEQ ID NO: 88234 - DNA, 428 bp, Homo sapiens
ggctcatatttttctaatcatagttacttgtttacatacgtctgccctgtgtagctgagaatttatcaggctgacaattgggtctgattcatatctaccatccactagtctttctcaggtgggaaatagtgggttgaattgaacctcctggtttgtgcccactgtctaatcggagctgttgctctgggaaaatgccaagagcctatctccaaaatgaatgcggacaaggagcagctctggaaggcagaataaaccataaatcgtgggtgggtgtcttttccattaaactggagcacagactgccagccatcctgagtttttgtctagttgggattgctgtcagctagaaagctgtaaatccttatctttggtaaagaaaacctgattccgagtgcctcggaatgataaatggataaagacatgggagg

SEQ ID NO: 88235 - DNA, 386 bp, Homo sapiens
atctgtgaacctctctaggtctcagtttcttaaatggggtaggaatccctggccatggagaggcctgtgtgctgggtgggcctcagccggggtttgctgggcagctccttgcaagcattgctccagagccagcctccccaccaggcaagaaggggtcatggggagggagggacaggtgatgggagtctaggccgagggattctgactaactctgacctggctctggtggcagcgggcccagcctcctggcctgctgggccgccatctgaaacgcattactgatgctttgtaaactccacatcatttggccacatgaaagcctgggacttaaaaatagctgctcccagaggacgccccgcattggtggggctcagctgacctctgca

SEQ ID NO: 88236 - DNA, 2325 bp, Homo sapiens
gggtcgacgattccgccccctttgggctttttttttggccatccgcaaaatgagtgattggatgagagggcctttgcactcccttgacactttatgtgattaattgcctctttctgaaccccagacctcaggtccccttcaccttgcccttaaaacaggaaggagtgggactggaggttgtggacggggagggaaaacctgagttggggttggggctccaggatcctctcccaggtcttttccctggctccataacattcggtcctctggccccctcaacgctctgtcccctgtttccctctgcccaggctctgggagccagatagagcactccctggtgttggtgctggcaacaccacctgctgcagctaccaggccttccttctcctgctccaggtggaatacctgctgaaaaaggtactcagcagcatgagcttggaggtgagcttgggtgagctggaggagcttctggcccaggaggcccaggtggcccagaccaccggggggctcagcgtctggcagttcctggagctcttcaattcgggccgctgcctgcggggcgtgggccgggacaccctcagcatggccatccacgaggtctaccaggagctcatccaagatgtcctgaagcaggtcaggcaagctgggaactaggggaagcacacaaggtgcagggcgaaggggggcctgggaagcctctgacgtaactccggctggcagggctacctgtggaagcgagggcacctgagaaggaactgggccgaacgctggttccagctgcagcccagctgcctctgctactttgggagggaagagtgcaaagagaaaaggggcattatcccgctggatgcacactgctgcgtggaggtgctgccataccgcgacggaaagcgctgcatgttctgtgtgaagacagccacccgcacgtatgagatgagcgcctcagacacgcgccagcgccaggagtggacagctgccatccagatggcgatccggctgcaggccgaggggaagacgtccctactcaaggacctgaagcagaaacggtgcgagcagcgggagcagcgggagcggcgccgggcggccaaggaagaggagctgctgcggctgcagcagctgcaggaggagaaggagcggaagctgcaggagctggagctgctgcaggaggcgcagcggcaggccgagcggctgctgcaggaggaggaggaacggcgccgcagccagcaccgcgagctgcagcaggcgctcgagggccaactgcgcgaggcggagcaggcccgggcctccatgcaggctgagatggagctgaaggaggaggaggctgcccggcagcggcagcgcatcaaggagctggaggagatgcagcagcggttgcaggaggccctgcaactagaggtgaaagctcggcgagatgaagaatctgtgcgaatcgctcagaccagactgctggaagaggaggaagagaagctgaagcagttgatgcagctgaaggaggagcaggagcgctacatcgaacgggcgcagcaggagaaggaagagctgcagcaggagatggcacagcagagccgctccctgcagcaggcccagcagcagctggaggaggtgcggcagaaccggcagagggctgacgaggatgtggaggctgcccagagaaaactgcgccaggccagcaccaacgtgaaacactggaatgtccagatgaaccggctgatgcatccaattgagcctggagataagcgtccggtcaccagcagctccttctcaggcttccagccccctctgcttgcccaccgtgactcctccctaaagcgcctgacccgctggggatcccagggcaacaggaccccctcgcccaacagcaatgagcagcagaagtccctcaatggtggggatgaggctcctgccccggcttccacccctcaggaagataaactggatccagcaccagaaaattagcctctcttagccccttgttcttcccaatgtcatatccaccaggacctggccacagctggcctgtgggtgatcccagctcttactaggagagggagctgaggtcctggtgccaggggcccaggccctccaaccataaacagtccaggatggaacctggttcacccttcataccagctccaagccccagaccatgggagctgtctgggatgttgatccttgagaacttggccctgtgctttagacccaaggacccgattcctgggctaggaaagagagaacaagcaagccggggctacctgcccccaggtggccaccaagttgtggaagcacatttctaaataaaaactgctcttagaatgaaaaaaaaaa

SEQ ID NO: 88237 - DNA, 768 bp, Homo sapiens
acaacttcccgtttttctgggtcgacccacgcgtccgcttaagtttacaagacatgactacatatttaaagacgtgttcagggaggttggccttttggaggtcatggtaaaccttttgcataaatatgctgccctgttgaaggatccaactcaggcactaaatgaacaaggggactcaagaaataatagttcagttgaagaccaaaaacacctggctttattggttatggagaccttgacagtgcttcttcaaggatcaaacacaaatgcaggaatttttcgagaatttggaggtgcaagatgtgcacataatatagtaaagtaccctcaatgccggcagcatgccttgatgactatccaacagctggtgctctccccaaatggggacgatgacatgggcactctcctggggctaatgcattcagccccaccgacggaattgcagttgaagactgatattttaagggccctcctgtcggtccttcgagaaagccatcgttcaagaacagtttttaggaaagttggaggatttgtgtacattacatccttgctcgttgctatggaaagatctttgagctgtccacccaagaatggctgggagaaagtgaaccagaatcaagtgtttgaacttcttcacactgtgttctgcacgttgactgcagcaatgcgctatgagccagccaactctcatttctttaaaacagagattcagtatgagaagttggcagatgctgttcgatttcttggctgcttctcagacctaggaaa

SEQ ID NO: 88238 - DNA, 1013 bp, Homo sapiens
atctggttgaactacttaagcttaatttgttaaactccggtaagtacctagcccacatgatttgactcagagattctcttttgtccacagacagtcatctcaggagcagaaagaaaagagctcccaaatgctatatctattcaggggctctcaagaacaatggaatatcatcctgatttagaaaatttggatgaagatggatatactcaattacacttcgactctcaaagcaataccaggatagctgttgtttcagagaaaggatcgtgtgctgcatctcctccttggcgcctcattgctgtaattttgggaatcctatgcttggtaatactggtgatagctgtggtcctgggtaccatgggggttctttccagcccttgtcctcctaattggattatatatgagaagagctgttatctattcagcatgtcactaaattcctgggatggaagtaaaagacaatgctggcaactgggctctaatctcctaaagatagacagctcaaatgaattgggatttatagaaaaacaagtgtcttcccaacctgataattcattttggataggcctttctcggccccagactgaggtaccatggctctgggaggatggatcaacattctcttctaacttatttcagatcagaaccacagctacccaagaaaacccatctccaaattgtgtatggattcacgtgtcagtcatttatgaccaactgtgtagtgtgccctcatatagtatttgtgagaagaagttttcaatgtaaggggaagggtggagaaggagagagaaatatgtgaggtagtaaggaggacagaaaacagaacagaaaagagtaacagctgaggtcaagataaatgcagaaaatgtttagagagcttggccaactgtaatcttaaccaagaaattgaagggagaggctgtgatttctgtatttgtcgacctacaggtaggctagtattatttttctagttagtagatccctagacatggaatcagggcagccaagcttga

SEQ ID NO: 88239 - DNA, 422 bp, Homo sapiens
ctttcatccctccattcttctaccctgactatagtataaatggcttttctgagtgtgtgttctacccttatagaaagttttattgagtacgaggtgcatagctcactttctgggattacttcatcagggggccttttttctgtgttatagtacaatttatatacatcagagctatctgttcctttataatttgaaagaatctattaaatccagaatgaatttaagatcgtcagaattggtaaacatatgggtaaattcaaaagacattttttcttattttttccttttaatacatgtaaccattcaaaacagaaatgtcagcattatcttgtgagttttataacatatgcagatttaacacatgtaactacagtacacagccctggaagagaatggacctagagatagcaaaattttctatt

SEQ ID NO: 88240 - DNA, 396 bp, Homo sapiens
  misc_feature (1)...(396): n = a,t,c or g
ggaggcaggaggagtagcagcatcggcagttgcagcagctgtggcaggaggagtagcagcatcggcagttgcagcagctgtggcaggaggagtagcagcatccgcagttgcagcagctgtggcaggagtagcagcatcggcagttgcagcagctgtggcaggaggagtagcagcagcagcagttgcagcagctgtggcaggaggagcagcagcagccgttgcagtagctgttgtaggaggagcagcggcaacagctgcagtagctgcagttgtagtagcagcatcagcagcagcagtagctgcagcagtaggagtagcagcatcagcaactgcagtagctgtagcaggaggagtagcagcagcagcagctgcagtagctgcagcaggaggagtagn

SEQ ID NO: 88241 - DNA, 14801 bp, Homo sapiens
cgcccgggcaggtggcggcagagctgaagtgagcggagccaccaggaggccatgtcgggtgaggacgctgaggtccgggcagtctctgaagatgtctccaatggaagcagtggctcgcccagccctggggacacactgccctggaaccttgggaaaacgcagcggagccggcgcagcgggggtggcgctgggagcaacgggagtgtcctggacccagctgagcgggcggtcattcgcatcgcagatgagcgggatcgtgtgcagaagaaaaccttcaccaagtgggtcaacaagcacctcatcaaggcccagaggcacatcagtgacctgtatgaagacctccgcgatggccacaacctcatctccctgctggaggtcctctcgggggacagcctgccccgggagaaggggaggatgcgtttccacaagctgcagaatgtccagattgccctggactacctccggcaccgccaggtgaagctggtgaacatcagggatgatgacatcgctgacggcaaccccaagctgacccttggcctcatctggacaatcattctgcacttccagatctcagatatccaggtgagtgggcagtcggaggacatgacggccaaggagaagctgctgctgtggtcgcagcgaatggtggaggggtaccagggcctgcgatgcgacaacttcacctccagctggagagacggccgcctcttcaatgccatcatccaccggcacaagcccctgctcatcgacatgaacaaggtgtaccggcagaccaacctggagaacctggaccaggccttctctgtggcggagcgggacctgggagtgacgcggctcctggaccctgaggacgtggatgtccctcagcccgacgagaagtccatcatcacctacgtctcgtcgctgtatgacgccatgccccgcgtgccggacgtgcaggatggggtgagggccaacgagctgcagctgcgctggcaggagtaccgggagctggtgctgctgctgcttcagtggatgcgacaccacacggccgcctttgaggaacgcaggttcccctccagcttcgaggagattgagatcctgtggtctcagttcctgaagtttaaggagatggagctaccagccaaggaggccgacaagaacaggtccaagggcatctaccaatccctggagggagcggtgcaagcaggccagctcaaggtgccccctggctaccacccgctggatgtggagaaggagtggggcaagctgcacgtggccatcctggagcgggagaagcagctccgcagcgagtttgagaggctggagtgtcttcagcgcatcgtgaccaagctgcagatggaggcggggctgtgtgaggagcagctgaaccaggccgacgccctgctgcagtcggatgtccggctgctggctgcaggcaaagtgccacagcgggcgggggaggtggaacgggacttggacaaggcggatagcatgatccggctgctcttcaacgacgtgcagaccctcaaggatggacggcacccgcagggcgagcagatgtaccgcagggtgtaccgtctgcacgagcgcctggtagccatccgcaccgagtacaacctacggctgaaggcaggcgtggcggcccctgcaacccaggtggcccaggtgactctgcagagtgtgcagaggcgccccgagctggaggactccactctgcgctacctgcaggacctgctggcctgggtggaggagaaccagcaccgtgtggatggcgctgagtggggtgtggacctgcccagcgtggaggcgcagctgggcagccaccgaggcctgcaccagtccatcgaagaattccgggccaagatcgagcgggcacggagtgacgagggccagctctcccccgccacccggggtgcctaccgtgactgcctgggtcggctggacctgcagtacgccaagctgctgaactcctccaaggcccgcctcaggtccctggagagcttgcacagctttgtggcagccgccactaaggagctaatgtggctgaatgagaaggaggaggaggaggtgggcttcgactggagcgaccgcaacaccaacatgaccgccaagaaggagagctactcggcgctgatgcgggagctggagctgaaggagaagaagatcaaggagctccaaaatgctggggaccggctgctgcgggaggaccacccggcccggcccacggtggagtccttccaggcggccctgcagacgcagtggagctggatgctacagctgtgctgctgtatcgaggcacacctgaaggagaacgctgcctactttcagttcttctcagatgtgcgggaggccgaggggcagttgcagaagctgcaggaggcactgcgtaggaaatacagttgtgatcgctccgccaccgtcacccggctggaggacctgctgcaggatgcccaggacgagaaggaacagctgaacgagtacaagggccacctctcaggcctggccaagcgggccaaggccgtcgtgcagctgaagccccgccacccagcccaccccatgcggggccgcctgcccctgctggccgtgtgcgactataagcaggtggaggtgactgtgcacaagggtgacgagtgccagctggtgggccctgcacagccgtcccactggaaggtgctcagcagctccggcagcgaggccgccgtgccctccgtgtgcttcctggtgcccccgcccaaccaggaggcccaggaggccgtcaccaggctggaggcccagcaccaggccctggtcacgctgtggcaccagttgcacgtggacatgaagagccttctggcctggcagagccttcgccgcgacgtgcagctcatccgctcgtggtccctggccacgttccgcaccctgaagccagaggagcagcgccaagccctgcacagcctggagctgcactaccaggccttcctgcgggacagccaggacgcgggcggcttcggacccgaggaccggctgatggctgagcgcgagtacggctcctgcagccaccactaccagcagctgctgcagagcctggaacagggtgcacaggaagagtctcgctgccagcgctgcatctccgagctcaaagacatccggctgcagctggaggcctgtgagacgcgcaccgtgcaccgcctgcggctgccgctggacaaagagccggcacgggagtgtgcccagcgcatcgccgagcagcagaaggcacaggcagaggtggaggggctgggcaagggggtcgcccggctctctgccgaggccgagaaggtcttggccctaccagagccatcgcctgcggcccccacgctgcgctcggagctggagctgacgctgggcaagctggagcaggtccgcagcctgtctgccatctacctggagaagctcaagaccatcagcctggtgatccgcggcacgcagggggccgaggaggtgctcagggcccacgaggagcagctcaaggaggcccaggccgtgccggccaccctcccggagctcgaggccaccaaggcctctctgaagaagctgcgggcccaggccgaggcacagcagcccacgttcgacgccctgcgggatgagctgcggggggcacaggaggtgggggagcgactgcagcagcggcacggggagcgggacttggaggtggagcgctggcgggagcgggtcgcccaggtgcttgagcgctggcaggctgtgctggcccagaccgacttgcggcagcgcgagctcgagcaactgggccgccagctgcgttactaccgcgagagtgcagaccccttgggcgcctggctgcaggacgccaggcggcggcaggagcagatccaggccatgccgctggccgacagccaggctgtgcgggagcagctgcggcaggagcaggccctgctggaggagatcgagcgccacggcgagaaggtcgaggagtgccagaggtttgcgaaacagtacatcaacgccatcaaggactatgaactccagctggtgacgtacaaggcgcagcttgagccggtggcctccccggccaagaagcccaaggtccagtcgggatcagagagtgtcatccaggagtacgtggacctgcgtacgcactacagcgagctgaccacactgacgagccagtacatcaagttcatcagcgagactctgcggcgcatggaggaggaggagaggctggctgagcagcagcgggcagaggagcgcgagcggctggccgaggtggaggccgcgctggagaagcagcggcagctggccgaggcgcacgcccaggcaaaggcacaggcggagcgggaggcgaaggagctgcagcagcgcatgcaggaggaggtggtgcggcgggaggaggcggcggtggacgcgcagcagcagaagcgcagcattcaggaggagctgcagcagctgcggcagagctcggaggcggagatccaggccaaggcccggcaggcagaggcggctgagcgcagccggctgcgcatcgaggaggagatccgcgtggtgcgcctgcagttggaggccaccgagcgccagcgtggcggggctgagggggagctgcaggcactgcgtgcacgggcggaggaggctgaggcacaaaagcgacaggcgcaggaggaggccgagcgcttgcggaggcaggtgcaggacgagagccagcgtaagcggcaggcggaggtggagctggcctcgcgcgtgaaggccgagaccgaggcggcgcgcgagaagcagcgggccctgcaggccctggaggagctgcggctgcaggcggaggaggcggagcggcgcctgcggcaggccgaggtggagcgagcgcggcaggtacaggtggccctggagacggcgcagcgcagtgcagaggcggagctgcagagcaaacgcgcctccttcgccgagaagacggcacagctggagcgctccctgcaggaggaacacgtggctgtggcacagctgcgggaggaggctgagcggcgggcacagcagcaggccgaggccgagcgggcgcgcgaggaggcagagcgggagctggagcgctggcagctcaaggccaacgaggcgctacggctgcggctgcaggcggaggaggtggcgcagcagaagagcctggcgcaggccgaggctgagaagcagaaggaggaggcggagcgcgaggcgcggcggcgcggcaaggcggaggagcaggccgtccggcagcgggagctggctgaacaagagctggagaagcagcggcagctggcggaaggcaccgcgcagcagcgcctggccgcggagcaggagttgatccggctgcgggccgagacggagcagggggagcagcagcggcagctgctggaggaggagctggcccggctgcagcgtgaggcggctgcagccacgcagaaacggcaggagctggaagccgagctggccaaggtgcgggccgagatggaggtgctgctggccagcaaggcgagggctgaggaggagtcgcgctccaccagcgagaagtccaagcagaggctggaggccgaggccggccggttccgcgagctggccgaggaggccgcccgcctgcgtgccctggcggaagaggccaagcggcagcggcagctggccgaggaagacgcggcgcggcagcgggccgaggcggagcgggtgcttgcggagaagctggccgccatcggcgaggccacgcggctcaagacggaggcggagatcgcgctcaaggagaaggaggcggagaacgagcgcctgcggcggctggcggaggacgaggccttccagcggcggcggctggaggagcaggccgcgcaacacaaggctgacatcgaggagcgcctggcccagctgcgcaaggcatcggacagcgagctggagcggcagaaggggctggtggaggacacgctgaggcagcggcggcaggtggaggaagagatcctggcgctgaaggcgagcttcgagaaggcggccgctggcaaggcggagctggagctggagctgggacgcatccgcagcaacgcggaggacacgctgcgcagcaaggagcaggccgagctggaggccgcgaggcagcggcagctggcggcggaggaggagcggcggcgccgtgaggctgaggagcgcgtgcagaagagcctggcggccgaggaggaggccgcacggcagcggaaggcggcgctggaggaagtcgagcggctgaaagccaacgtggaggaggcgcggcgcctgcgggagcgagcggagcaggagtcggcgcggcagctgcagctggcccaggaggccgcccagaagcggctgcaggcggaagagaaggcacacgccttcgcggtgcagcagaaggagcaggagctacagcagacgctgcagcaggagcagagcgtgctggaccagctgcgcggcgaggcggaggcggcccggcgggcggctgaggaggcggaggaggcccgggtgcaggcggagcgtgaggcggcgcaggcccggcggcaggtggaagaggccgagcggctgaagcagtcggcagaggagcaggcacaggcccgggctcaggcacaggcggctgcagagaagctgcgcaaggaggccgagcaagaggcggcgcggcgggcacaggcggagcaggcggccctgcggcagaagcaggcagctgacgcggagatggagaagcataagaaattcgccgagcagacgctgcggcagaaggcgcaggtggagcaggagctgacaacactgcggctgcagctggaggagaccgaccaccagaagaacctgctggacgaggagctgcagcggctgaaggcggaggccacggaggccgcacgccagcgcagccaggtggaggaggagctcttctcggtgcgcgtgcagatggaggagctgagcaagctcaaggcacgcatcgaggctgagaaccgcgcactcatcttgcgtgacaaggacaatacgcagcgcttcctgcaggaggaggctgagaagatgaagcaggtggcggaggaggccgcgcggctgagtgtggcggcccaagaggctgcgcgactgcggcagctggcagaggaggacctggcacagcagcgggccttggcagagaagatgctcaaggagaagatgcaggcggtgcaggaggccacgcgactcaaggctgaggcggaactgctgcagcagcagaaggagcttgcgcaggagcaggcgcggcggctgcaggaggacaaggagcagatggcgcagcagctggcggaggagacgcagggcttccagcggacgctggaggccgagcggcagcggcagctggagatgagcgctgaggctgagcgcctcaagctgcgtgtggccgagatgagccgagcccaggcccgcgctgaggaggacgcccagcgcttccggaagcaggcggaggagatcggtgagaagctgcaccgcacggagctcgccacccaggagaaggtgaccctggtgcagacactggagatccagcgacagcagagtgaccatgatgccgagcgcctgcgggaggccatcgctgagctggagcgtgagaaggagaagctccaacaggaggccaaactgctgcagctcaagtctgaggagatgcagacggtgcagcaggagcagctgctgcaggagacgcaggccctgcagcaaagcttcctctctgaaaaggacagcctgctacagcgggagcgcttcatcgagcaggagaaggccaagctggagcagctcttccaggacgaggtggccaaggcacagcagctgcgtgaggagcagcagcggcagcagcagcagatggagcaggaacggcagcggctggtggccagcatggaggaggcgcggcggcggcagcatgaggccgaggagggcgtgcggcgcaagcaggaggagctgcagcagctggagcagcagcggcggcagcaggaggagctgctggctgaggagaaccagaggctgcgtgagcagctgcagctcctggaggagcagcaccgggccgcgctggcgcactcagaggaggtcactgcctcgcaggtggctgccacaaagaccctgcccaatggccgggatgcacttgatggccccgcggcagaggcagagccggagcacagcttcgatggcctgcggcggaaggtgtcagctcagaggctgcaggaggccggcatcctgagtgcggaggagctgcagcggttggcgcagggccacaccacggtggacgagctcgcacggcgggaagacgtgcgccactacctgcagggccgcagcagtatcgcagggctgttgctgaaggccaccaatgagaagctgagtgtttacgccgccctgcagaggcagctgctgagtcccggcacggccctcatcctgctggaggcgcaggcggcctcaggcttcctgctggaccctgtgcggaaccggcggctgaccgtcaacgaggctgtgaaggagggtgtggtgggccccgagctgcaccacaagctgctgtcggcggagcgcgccgtcactggctacaaggacccctacactggccagcagatctctctcttccaagccatgcagaagggcctcatcgtccgggagcacggcatccgcctgctggaggcccagatcgccacgggcggcgttatcgaccccgtgcacagccaccgcgtgcccgtggacgtggcctaccggcgcggctacttcgacgaggagatgaaccgcgtcctggcggaccccagcgacgacaccaagggcttctttgaccccaacacgcacgagaacctcacgtacctgcagctactggagcgctgcgtggaggaccccgagacgggcctgtgccttctgccactcacggataaggctgccgagggcggggagctggtctacactgactccgaggcccgggacgtctttgagaaggccaccgtgtctgcgccgttcggcaagttccagggcaagacggtgaccatttgggagatcatcaactcggaatacttcacggcagagcagcggcgggacctgctgcggcagttccgcacgggccggatcacagtggagaagatcatcaagatcatcatcacggtggtggaggagcaggagcagaagggccggctttgctttgagggcctgcgcagcctggtgccagccgccgagctgctggagagcagggtcatcgaccgcgagctctaccagcagctgcagcgaggtgagcgctctgtgcgagacgtagccgaggtggacactgtgcggcgggctctccggggtgccaacgtcatcgcgggtgtatggctggaggaggcggggcagaagctgagtatctacaatgccctgaagaaagacctgctgccatccgacatggccgtggccctgttggaagcccaggccggcaccgggcacatcatcgaccccgccaccagcgcccggctgaccgtggacgaggcagtgcgtgctggcctggtgggccccgagtttcatgagaagctgctatcagccgagaaggctgtgacagggtacagggacccctacacagggcagagcgtctccctgttccaggccctgaagaagggcctcattccccgggagcagggcctgcgcctgttggacgcccagctgtccacgggcggcatcgtggaccccagcaagagccaccgcgtgcccctggatgtcgcctgcgcccgaggctgcctggatgaggagaccagcagggccctgtcggcaccaagggccgacgccaaggcctacagtgaccccagcacaggggagccggccacctacggcgagctccagcagcggtgccggcccgaccagctgaccgggctgagcctgctgccgctctcagaaaaggctgctcgggcccggcaggaggagctctactcagagctgcaggcccgtgagacctttgaaaagaccccggttgaggtccccgtgggtggcttcaagggcaggacggtgacggtgtgggagctcatcagctctgagtacttcactgcggagcagcggcaggagctgttgcgtcagttccgcacgggcaaggtcaccgtggagaaggtcatcaagattctcattaccatcgtggaggaggtggagaccctgcggcaggagaggctgtccttcagcggcctccgtgcccctgtgccagccagcgagctcctggcttccggggtcctcagcagagcccagtttgagcagctcaaggacggcaagacgacggtcaaggacctttcggagctgggctccgtgcggacgctgctgcagggcagtggctgcctcgccggcatctacctggaggacaccaaggagaaggtgtccatctacgaggccatgcgccggggcctgctgagagccacaacggctgcgctcctgctggaggcgcaggcggccactggcttcctggtggaccccgtgcggaaccagcgcctgtatgtccacgaggccgtgaaggcgggcgtggtgggccccgagcttcacgagaagctgctgtcggccgagcgcgccgtcaccggctacaccgacccctacaccgggcagcagatctccctcttccaggccatgcagaaggacctcatcgtccgggagcacggcatccgcctgctggaggcccagatcgccacgggcggcgtcatcgaccccgtgcacagccaccgcgtgcccgtggacgtggcctaccggcgcggctacttcgacgaggagatgaaccgcgtcctggccgaccccagcgacgacaccaagggcttcttcgaccccaacacgcacgagaacctcacgtacctgcagctgctggagcggtgcgtggaggaccccgagacgggcttgcgccttctgccactgaaaggggcggagaaggctgaggtggtggagaccacgcaggtgtacactgaggaggagacaagaagggcatttgaagagacacagatcgacattcccggcggcggcagccacggcggctccaccatgtccctgtgggaggtgatgcagtcggaccttgatccccgaggagcagcgggcccagcttatggctgacttccaggccggccgggtgaccaaggaacgcatgatcatcatcatcatcgagatcattgagaagacagagatcatccgccagcagggtctggcctcctatgactacgtgcgccgccgcctcacggctgaggacctgttcgaggctcggatcatctctctcgagacctacaacctgctccgggagggcaccaggagcctccgtgaggctctcgaggcggagtccgcctggtgctacctctatggcacgggctccgtggctggtgtctacctgcccggttccaggcagacactgagcatctaccaggctctcaagaaagggctgctgagtgccgaggtggcccgcctgctgctggaggcacaggcagccacaggcttcctgctggacccggtgaagggggagcggctgactgtggatgaggctgtgcggaagggcctcgtggggcccgagctgcacgaccgcctgctctcggctgagcgggcggtcaccggctaccgtgacccctacaccgagcagaccatctcgctcttccaggccatgaagaaggagctgatccctactgaggaggccctgcggctgctggatgcccagctggccaccggcggcatcgtggacccccgcctgggcttccaccttcccctggaggtggcttaccagcgtggctacctcaacaaggacacgcacgaccagctgtcagagcccagcgaggtgcgcagctacgtggacccgtccaccgacgagcgcctcagctacacgcagctgctcaggcggtgccgtcgtgacgacggcaccggccagctgctcctgccactgtcggacgcccgcaagctgaccttccgtggcctgcggaagcagatcaccatggaggagctggtgcgctcgcaggtcatggacgaggccacggcgctgcagctgcgggagggcctgacctccatcgaggaggtcaccaagaacttgcagaagttcctggaaggcaccagctgcatcgctggtgtcttcgtggacgccaccaaggaacggctctcggtgtaccaggccatgaagaaaggcatcatccgccccggcacagcctttgagctcctggaggcgcaggcggccaccggttacgtcatcgaccccatcaagggactgaagctgacggtggaggaggctgtgcgtatgggcattgtgggccccgagttcaaggacaagctgctgtcggccgagcgcgccgtcactgggtacaaggacccctactctgggaagctcatctccctcttccaggccatgaagaagggcctgatcctgaaggaccatggcatccgcctgctggaggcccagatcgccacgggcggcatcatcgaccctgaggagagccaccggctgcccgtggaggtggcctacaagcgcggcctcttcgatgaggagatgaacgagatcctgaccgacccctcggacgacaccaagggcttctttgaccctaacacggaggagaacctcacctacctgcagctgatggagcgttgtatcactgacccccagacgggcctgtgtctcttgccgctgaaggagaagaagcgggagcggaagacgtcctccaagtcctccgtgcgcaagcgccgagtggtcatcgtggaccccgagacgggcaaggagatgtcagtgtacgaggcctaccgcaagggcctgattgaccaccagacgtacctggagctgtccgagcaggagtgcgagtgggaggagatcaccatctcctcctcggacggcgtggtcaagtccatgatcatcgaccgccgctccgggcgccagtacgacatcgatgatgccatcgccaagaacctcatcgaccgctcggcactggaccagtaccgcgccggcacgctctccatcaccgagttcgccgacatgctctcgggcaacgccggtggtttccgctcccgttcctcctcggtgggatcctcctcctcctaccccatcagccccgccgtctccaggacccagctggcctcctggtcagaccccactgaggagacgggccccgtggctggcatcctggacacggagacgctggagaaggtgtccatcaccgaggccatgcaccggaacctggtggataacatcacggggcagcggctgctggaggcgcaggcctgcaccgggggcatcatcgaccccagcaccggtgagcgcttccctgtcaccgacgccgtcaacaagggcctggtggacaagatcatggtggaccgcatcaacctggcccagaaggccttttgcggcttcgaggacccacgcaccaagaccaagatgtcggccgcccaggccctgaagaagggctggctctactacgaggccggccagcgcttcctggaggtgcagtacctgaccggcggcttgatcgagcccgacacgccgggccgcgtgcccctggacgaggccctgcagcgcggcacggtggacgcccgcaccgcacagaagctgcgtgacgtgggcgcctactccaagtacctcacctgccctaagaccaagctcaagatctcctataaggacgcgctggaccgcagcatggtggaggagggcacggggctgcggctgctggaggctgccgcgcagtccaccaagggctactacagcccctacagcgtcagcggctccggctctaccgctggctcccgcaccggctcgcgcaccggctcccgggccggctcccgccgcggcagctttgacgccaccggctccggcttctccatgaccttctcttcatcctcctactcctcctcgggctacggccgccgctacgcctcggggtcctcggcctccctggggggccctgagtctgccgtggcctgaggctgcctgcgcccaccccgctctgcatgcggcccagcccggctcccaccgaggcgcgggggccgttttcaacgcttaaaggtgtcttcctcccaagtggtgcctaaagtttaaccaaaaagaccagactaatatattaatatatatctgctgtccagacagcctgtatcttgggggacagggctggcccagccctgctggccgcctcaccccctcgggtctcctcactcccttctacctgccactcacacagccaggtgccttggagggtcccaagctgggccccagcccaccctcctgtcttcccagggtagcccgcctgccagtcctagctgcacagggcagctgggcccaaccctgtctgtagagggccctggtgtttctagcactggcctgcacggtgggccttgctggggacggggggccccagtcagcctctctcccagtctacccagagaagccccttccccatgggaagacgaggccctcgggcccagcccccacagtgctgtctgatctgtgctttccagctcaccccccacactcactcctgagacccctggcctccggcgtcagcctccagcctctgttcccctagtaagtgccttccatgtcggcctctaaccccaggccccgaggacccagacccagtggggaggcggacgttccagccggcatggctgggaactgcagacctgtcctcctggtgggtccaggggcccctccagcttgtggagccccacactggggtgccgcctgcccgtctctctcccatggagccccagccccctttgggcccagggacaccagccaggctctgtgctgaccctcctgttgcgcccagccctggtctcagcagcgaccacccctgcctccaccctctgagctttgcatgttccactaaccccgggcgggtggcaggtggaggtgtcaggctgctggcgcctctgcaagggcagaacactaacctgaccgtgggcggggccttgcggtatccgcccccaataaaagcaattccaacctt

SEQ ID NO: 88242 - DNA, 395 bp, Homo sapiens
ggaggcaggagagtacaggacctgggaactgggggttggtgcatgtgtgcacgcacgtgtgtgtgggtgggcgtacgtgctgggtgggtagggaggaagctgtgaaaccacatcccctcctctctgctgctgtgttgctgtgtgtttcaacagcacgtgggtgtcaccacacttcctagcaggtgtcaacctccaagactgttctgggctcttctcccagttggctgagttggaggtgggagtcccaactgtcccctgtggcttccagagtgggaccttgctgtgggataggctggccaatggtgctccctcccctgtgacccttctgttgggtgggtcacgaggaaagactgtgggtgatgcccacagacaggtggacatgtggcaaggacacc

SEQ ID NO: 88243 - DNA, 11145 bp, Homo sapiens
cagcagtgattccagcagtagttcaagtgatgattctccagctcgatcagttcagtctgcagcagtccctgcacccacttcccagttgctttcatctctggaaaaagatgagccccgtaaaagttttggcatcaaggtccagaatcttccagtacgctctacagatacaagccttaaagatggccttttccatgaatttaagaaatttggaaaagtaacttcagtgcagatacatggaacttcagaagagaggtatggtctggtattctttcggcagcaagaggaccaagaaaaagccttgactgcatcaaaaggaaaacttttctttggcatgcagattgaagtaacagcatggataggtccagaaacagaaagtgaaaatgaatttcgccccttggatgaaaggatagatgaatttcaccccaaagcaacaagaactctctttattggcaaccttgaaaaaaccactacttaccatgaccttcgcaacatcttccagcgctttggagaaattgtggatattgacattaagaaagtaaatggagttcctcagtatgcgtttctgcaatactgtgatattgctagcgtttgtaaagctattaagaagatggatggggaatatcttggaaataatcgcctcaagctgggttttggaaagagcatgcctacaaactgcgtgtggctagatgggctttcttcgaatgtgtcagatcagtatttaacacgacatttctgccgatatgggcctgtggtaaaggtggtgtttgaccgcttaaaaggcatggccctggttctctacaatgaaattgaatatgcacaagcagctgtaaaagagaccaaagggaggaaaatcggtgggaataaaattaaggtggattttgcaaatcgggaaagtcagctggctttttatcactgcatggagaaatctggtcaagacatcagagacttttatgaaatgttagccgaaagaagagaggaacgaagggcatcctacgactataaccaagatcgtacatattatgagagtgttcgaactccaggcacttatcctgaggattccaggcgggactatccagctcgagggagagagttttattcagaatgggaaacttaccaaggagactactatgaatcacgatactacgatgatcctcgggaatacagggattacaggaatgatccttatgaacaagatattagggaatatagttacaggcaaagggaacgagaaagagaacgtgaaagatttgagtctgaccgggacagagaccatgagaggaggccgattgaacgaagtcaaagtcctgttcacttgcgacgtccacagagtcctggagcgtctccctctcaggcagagaggttgccgagtgattctgagaggaggctttacagccgatcctcagaccggagtggaagctgtagctcactctcccctccaagatatgagaaactggacaagtctcgtttggagcgctatacaaaaaatgaaaagacagataaagaacgaacttttgatccggagagagtggagagagagagacgcttaatacggaaggaaaaagtggaaaaggacaaaactgacaagcagaaacgcaaaggaaaggttcactcccctagttctcagtcttcagaaacggaccaagaaaatgagcgagagcaaagccctgaaaagcccaggagttgtaataaactgagcagagagaaagctgacaaagagggaatagcgaaaaaccgcctggaactcatgccttgcgtggttttgactcgagtgaaagagaaagagggaaaggtcattgaccacactcctgtggaaaagttgaaagccaagcttgataatgacactgtcaaatcttctgccctggaccagaaacttcaggtctctcagacggagcctgcaaaatctgacttgtctaaactggaatcagttagaatgaaagtaccaaaggaaaaggggctttcaagccatgttgaagtggtggagaaggaaggcaggcttaaagccaggaagcacctcaagcctgagcagcctgcagatggggtaagtgctgtggatctggagaagctggaagccaggaaaaggcgctttgcagattccaatttaaaagcagaaaagcaaaaaccagaggtcaagaaaagcagtccagagatggaggatgctcgcgtgctttcaaaaaagcagcctgacgtgtcctctagagaggtcattctgctgagggaaggagaggctgaaagaaagcctgtgaggaaagaaattcttaaaagagaatctaaaaaaatcaaactggacagacttaatactgttgccagccccaaagactgtcaggagcttgccagtatttctgttgggtctggctcaaggcccagctcagacctacaagcaagactgggagaactagcaggtgaatctgtggaaaatcaagaagtccaatcaaaaaagcccattccctcaaaaccacagctcaaacagctgcaggtattagatgatcaaggaccagagagagaagacgttaggaaaaactattgcagtcttcgtgatgaaacacctgaacgtaaatcaggccaagagaaatcacattcagtaaatactgaagaaaaaattggcattgacatcgatcacacgcagagttaccgaaaacaaatggaacagagtcgtaggaaacagcagatggaaatggaaatagccaagtctgagaagtttggcagtcctaaaaaagatgtagatgaatatgaaagacgtagcctcgttcacgaggtaggcaaaccccctcaagatgtcactgatgactctcctcctagcaaaaagaaaaggatggatcatgtcgattttgatatctgcaccaagcgagaacggaattacagaagttcacgccaaatcagcgaagattctgaaaggactggtggttctcccagtgtccgacatggttccttccatgaagatgaggatcccataggctcccctaggctactgtcagtaaaagggtctcctaaagtagatgaaaaagtcctcccctattctaacataacagtcagggaagagtctttaaaatttaatccttatgattctagcaggagagaacagatggcagatatggccaaaataaaactatctgtcttgaattctgaagatgaactaaatcgttgggactctcagatgaaacaggatgctggcagatttgatgtgagtttcccaaacagcataattaagagagatagccttcgaaaaaggtctgtacgagatctggaacctggtgaggtgccttctgattctgacgaagatggtgaacacaaatcccactcacccagagcctctgcattatatgaaagttctcgattgtcttttttattgagggacagagaagacaagctacgtgagcgagatgaaagactctctagttctttagaaaggaacaaattttactcttttgcattggataagacaatcacaccagacactaaagctttgcttgaaagagctaaatccctctcttcatctcgtgaagaaaattggtcttttcttgattgggactcccgatttgcaaattttcgaaacaacaaagataaagaaaaggttgactctgctccaagacctattccatcctggtacatgaaaaagaagaaaattaggactgattcagaagggaaaatggatgataagaaagaggaccataaagaagaagagcaagagaggcaggaattgtttgcttctcgttttttacacagctcaatctttgaacaagattccaagcgattgcagcatctagagagaaaagaggaagattctgacttcatttctggtaggatctatgggaagcagacatctgagggagcaaacagcacaactgattccattcaagaaccagtagttctgttccatagcagatttatggagctcacacggatgcaacagaaagaaaaagaaaaagaccagaaacccaaagaggttgagaaacaggaagatacagagaatcatcccaagaccccagaatctgctcctgagaataaagattcagaactgaaaactccaccttccgttgggcctccaagtgtcacagtcgtaactctagaatcagccccatcagcactagagaagaccactggtgacaaaacggtagaggcgcctttggtaacagaagagaagactgtggagccagctaccgtctcagaagaagcaaagcctgcatctgaacctgctcctgcccctgtggaacagctggaacaagtagacctgcccccaggagcagaccccgataaagaagctgccatgatgcctgcgggtgttgaggaaggttcatcaggtgaccagccgccttatctggatgccaagcctccaactcccggggcctcgttttcccaggcagagagcaacgtagatccagagcctgacagtacccagccactttcaaaaccagctcagaagtctgaggaagccaatgagccaaaggccgaaaagccagacgccactgcagatgctgagcctgatgcaaaccagaaagccgaagctgctcctgagtctcagcccccagcttctgaagatttagaggttgatcctccagttgctgcaaaggataaaaagccaaacaaaagcaagcgttcaaagacccctgttcaggcagctgcagtgagtatcgtggagaagcccgtcacaaggaagagtgagaggatagaccgggaaaaactcaagcggtccaattctcctcggggagaagcacagaagcttttggaattgaagatggaggcagagaagattacaaggactgcttctaaaaactctgctgcagaccttgaacatcccgaaccaagtttgcctctcagccgaacaaggcgccggaatgtaaggagcgtctatgcaaccatgggtgaccatgaaaaccgctctcctgtcaaagagcccgttgagcaaccaagagtgaccagaaagagattggagcgagagcttcaggaggctgcagcggttcccaccacccctcggaggggaaggcctccaaagacacgccggcgagccgatgaagaggaggagaacgaggccaaggaacctgcagaaacactcaagccacctgagggatggcggtcgccaaggtcccagaaaactgcagctggtggtggaccccaagggaaaaagggaaaaaatgaaccgaaggtggatgctacacgtcctgaggccaccactgaggtgggcccccaaataggcgtgaaagagagctccatggaacccaaggctgctgaggaggaggcagggagtgaacagaaacgtgacagaaaagatgctggcacagacaaaaacccccctgaaaccgcccctgttgaagttgtagagaaaaaaccggcccctgaaaaaaactccaaatcaaagagaggaagatctcgaaactccaggttagcagtggacaaatctgcaagtctgaaaaatgtggatgctgctgtcagtcccaggggggctgcagcacaggcaggggagagggaatctggggtggtggcagtctcccctgagaaaagtgagagtccccaaaaggaggatggtttatcatcccagttgaaaagtgatccagttgatccagacaaggaaccagagaaagaagacgtgtctgcctctgggccgtccccagaagccacccagttagccaagcagatggagctggagcaggccgtggaacacatcgcaaagctcgctgaggcctctgcctctgctgcctataaggcagatgcaccagagggccttgccccagaggacagggacaagcctgcacaccaagcaagtgaaacagagctggctgcggccatcggctccatcatcaatgacatttctggggagccagaaaacttcccagcacctccaccttatcctggagaatcccagacagatctgcaaccccccgcaggtgcacaggcgctgcagccttctgaggaaggaatggagacagatgaggctgtatctggcatcctggaaactgaggctgctacagaatcttctaggcctccagtcaatgctcctgacccctcagccggcccaacagataccaaggaagccagaggaaatagcagtgaaacctcacactcagtgccagaagccaaagggtctaaagaagtggaagtcactcttgttcggaaagacaaagggcgccagaaaacaacccgatcacgccgcaagcgaaacacaaacaagaaagtggtggctcctgtagagagccatgtccctgaatccaaccaagctcaaggtgagagtcctgctgcaaatgaggggacaacagtacagcaccccgaagccccacaggaagaaaagcagagtgagaaaccccattccactcctcctcagtcatgtacttctgacctaagcaagattccctccacagagaattcgtcccaagaaatcagtgttgaggaaaggactccaaccaaagcatctgtgcccccagaccttcccccacctccccagccagcaccggtggatgaggagcctcaagccaggttcagggtgcattccatcattgaaagtgacccggtgaccccacccagcgatccaagcatccccatacccacactgccttctgtaactgcagcaaagctctcacctcctgtcgcctctggggggatcccacaccagagcccccctactaaggtgacagagtggatcacaaggcaggaggagccacgggctcagtctactccatctccagctcttcccccagacacaaaggcctctgatgttgacaccagctccagcaccctgaggaagattctcatggaccccaagtatgtgtctgccacaagtgtcacttccacaagtgtcaccacagccattgcagagcctgtcagtgctgccccttgcctacatgaggccccgcccccgccagttgactctaaaaagcctttagaagaaaaaacagcacctccagtgacaaacaactctgagatacaagcctcggaggtgctggtagctgctgacaaggaaaaggtggctccagtcattgctcccaaaattacctctgttattagccggatgcctgtcagcattgacctggaaaattcacagaagataaccttggcaaaaccagctcctcaaaccctcactggtctggtgagcgcactcactggcctggtgaacgtctccctggtcccggtgaatgccctgaaaggccccgtgaagggctcagtgaccacactgaaaagtttggtgagcacccctgctgggcccgtgaacgtcctgaaagggcctgtgaatgttcttacggggccagtgaatgttctcaccactccagtgaacgccacggtgggcacagtgaatgccgccccaggcacagtcaatgccgctgcgagtgcagtgaatgccacagcaagtgcagtgaccgtcacagcgggtgcggttactgctgcatctggtggtgtaacggccacaacaggcacggtgacaatggcaggggcagtgattgcgccgtcaacaaagtgcaaacagagagcgagtgctaatgaaaacagtcggttccacccagggtccatgcctgtgatcgacgatcgtccggcagacgcgggctcaggggcggggctgcgtgtgaacacttctgaaggggttgtgctcctgagttactcagggcagaagaccgaaggcccacagcggatcagcgccaagatcagccagatccccccggccagtgcaatggacattgaatttcagcagtcagtgtccaagtcccaggtcaaacctgattctgtcacagcatcgcagcctccatccaaaggccctcaagctcctgcaggctatgcgaacgtggccacccattccacgttggtactgaccgcccagacatataatgcctctcctgtgatttcgtctgtgaaggccgataggccatccttggagaagcccgagcccattcacctctcggtgtccacgcctgtcacccagggaggcacagtgaaggttctcacccaggggatcaacacaccccctgtgctggttcacaaccagctggtcctcaccccaagcattgtcaccacaaacaagaagcttgctgaccccgtcacccttaaaatcgagaccaaggtccttcagccggccaacctggggtccacgctcacgccccaccgccctcctgctctgcccagcaaactgcctacagaagtcaaccatgtcccctcggggcccagcatcccagcagatcgaactgtctcccatttggcagctgcaaagctagatgctcattctcctcgaccaagtggacccgggccatcctcattcccaagggcaagccaccccagcagtactgcatctacggcgctctccaccaacgccacagtcatgctggctgcaggcatcccagtgccccagttcatctccagcatccacccagagcagtctgtcatcatgccaccccacagcatcacccagactgtgtccctgagccacctctcccagggcgaggtgagaatgaacactcccacgctgcccagtatcacctacagcatccggccagaagcgcttcactctcctcgggctccgctgcagccccagcaaatagaggtcagggccccacagcgtgccagcaccccgcagccagccccagctggtgtgcctgcactggcctcccagcaccctcccgaggaggaagtgcattatcaccttcctgtcgctcgagccacagcccctgtgcagtcagaggtactagtcatgcagtctgagtaccgactgcacccctatactgtgccacgggatgtgaggatcatggtgcatccacatgtgacggcagtcagcgagcagcccagggccgcggatggggtggtgaaggtgccaccagccagcaaggcccctcagcagccagggaaggaagctgccaagacaccagatgccaaagctgcccccacccccacccctgcccccgtccctgtccctgtcccccttcctgcccctgctcctgcccctcatggtgaggcccgtatcctcacagttacccccagtaaccaactccaggggctgcctctgacccctcctgtggtggtgacccatggggtgcagattgtgcactccagcggggagctgtttcaagagtaccggtacggcgacatccgcacctaccaccccccggcccagctcacacacactcagtttcccgccgcttcctctgttggcctgccttcccggaccaagacagctgctcagggccctcctcctgaaggtgagcccctgcagcctcctcagcctgtgcagtccacacagcctgcccagcctgcaccaccctgcccgccctcccagctcggtcagcccggccagccaccaagcagcaagatgcctcaagtgtcccaggaggcaaaggggacccagacgggagtagagcagcctcgcctcccagctggacctgcaaacaggccacctgagcctcacacccaggttcagagggcacaagcagaaacaggcccgacttccttcccctcccctgtgtctgtctccatgaagcctgaccttccagtctctcttcccactcagactgccccaaaacagccgttgtttgtcccaacaacctctggccccagcaccccaccaggactggttctgccacacactgaattccagccagcccccaaacaagattcctctccacacctgacttcccagagacccgtggatatggttcaacttctgaagaagtaccccatcgtgtggcagggcctgctggccctcaagaatgacacagctgctgtgcagctccacttcgtctctggcaacaacgtcctggcccatcggtccctgcccctttctgaaggagggcccccactaaggatcgcccagaggatgcggctggaggcaacgcagctggaaggggttgcccgaaggatgacggtggagacagattactgtctgctgctggctctgccctgtggccgtgaccaagaggatgttgtgagccagaccgagtccctcaaggctgccttcatcacttacctgcaggccaagcaggcggcagggatcatcaacgttcccaaccctggctccaatcagcctgcctacgtgctgcagatcttcccgccctgtgagttctctgagagtcacctgtcccgcctggcccctgacctccttgccagcatctccaacatctctccccacctcatgattgtcattgcctccgtgtgagccactgagtggttatcacctcagtgaatcttcccagggctctgcagtaaaaacaaaggacaacccagccaagcagaggaagaagctgccgaaggggacagactccactgccagacggccagccgtttgctgtcctgccgcccggctcagtcggccagacttcctctaggagtggtgctgctaccttgtatgtttacataatgctttagcccaaggacacatcaccaacccatggactcgcagacaccggggctgggtttctctttcctctttttggagaaaaggaacagggcagtggaatgaaaattttttgtttgtttgtttttaagaaacaagaaaacagaactgcctttgcactaaattagtgacttggacttttgcccagtgaagacaggctgtgacactctggatgtcttggtgtgtgtagacacacattgcagactcttaacgcaggaaggacttcaaacttctgctgagaccttggggtcaaggaacatttcattggttttttttgtccacccccatctcccttgctcatttggatgcgtcaccttaattctcctgctgccaccgtctttgattcaccgggatgtacagtttacagttgaagagcaaacagaaaggttttctcttggtgggatatgcagaacttgggatgtgtgtatatataaatatataatatatataaatatatataatactgacttaaaaaatcaaatcccccgacatacgttttttttaatctgtgccaaaaatgtgttttcagaggaaatcttattttcatattcagactttgtattgcccactcatttgtataagtgcgcttcggtacagcacgggtcctgctcccgcgatgtggaagtgtcacacggcacctgtacaaaaagactggctaacccctcttcctattaccttgatctcttcccccaacttcctaacacttattaatttatgaaactgtttttctcagcgcagttttgttttgtgtgtccattggattacaaactttattaaaaaatataaaacac

SEQ ID NO: 88244 - DNA, 431 bp, Homo sapiens
ggaggcaggagaaggatggagaagctagggcatagagaaggggggctggagcatgtcaagctttctgggaggggttaactgagaagtccatgggaacgtgagaggagaatcaggaagtgggtgtctaagagcaaggaggctctgagacaaatgggaaaggagatgttagaagtcctgggagggaaaggactaggctagggtattaggaaaagactcaaattcggatctctggaaaaggatcttttggagaaaggctgaaaaattgcagtggaggcccccaaggctgcaaggaggtaggaggacagttgctgggccccatggaagctgcaaagggaatgggtgggggattctagagtctgaggaggcagcaggaagatgttggggtctggggggagaggcagcctccatcaggaggatgttgaggctctgga

SEQ ID NO: 88245 - DNA, 951 bp, Homo sapiens
ttttttttttttaggttgaatcaaagcaagttgtcttcagagactgggatccgagatagaaaacacacagtgaagtttaatcaggaacccaacctccggtcctctgctacaaccacggaaacggctccaaacttgaggggggaccccccaacgcctgcttttggcccaaagctctgccttccagccctcctcatacccactggccacctaggaccaggaaaggggggtagagccctgagaattctgggtctggggtcaccagctcccacacctgtgctccccggccccacacacatgatgcccaggggtgggcaatccctgacagcggtggccggcacttgggagctcctgctcagccacctgccacggcccaccctgggggtccggcaggagccagggcagtgcatggcagcataaggccccgctgcagatcgactgccttcagaaacaaaaagtcccggcgcaaaggcgttcccggagtggcagcctggcctgcaccccagctgtgctgcccctgcagagccccagcagcgaggcacacccaggtcaggggagggggcttgggtaccaggggcctcactggctcttcaccaggaccctgtagagtgagaagctgaggactgcggccacggcggccccgacaacccccagcagcccccggagccagaaggaagagggatgcagctctgcgtggaccaaatgtgggaaggcggccatggtggcgagctgggtgaagatggtggtgctgggctcggctgggccagcacaggagaacggcacgggagcgggtagccggtgcttgcggcaaaactcggccggtgatgggccagacaccgcgacaccttcgggcaggtcggccttggaggagacaaagaggcagggggtctgcccgtccatgtaatggtgcttgtagacgctggcacaatgtgcaaaggactaggaattccgcac

SEQ ID NO: 88246 - DNA, 426 bp, Homo sapiens
tttcgtgccccggaaaccatggaagtcctcgtcctggccggataccgtgcgcagaaggaggacgagctgagtctggcgcccggggacgtggtccggcaggagatcccagagaccctgcggggctccggagaggcgcggaggccgcgctgtgcgcgccgccgaggtcatcctgccaaacacccgaggccccaaagatggtgcaaagtgaacttcagctacagcccagagcaggcggacgagctgaagctgcaagctggggagatcgtggaaatgataaaggagattgaggacggctggtggctggggaagaagaacgggcagctgggagccttcccatccaactttgtggaattgctggacagtgggcccccaagtgagacctcgactctgtgaccctgtgactcgcaatctccaatgaccctccca

SEQ ID NO: 88247 - DNA, 431 bp, Homo sapiens
tttcgtggcgctactagatgtatgcggagccccccgagggcagcggccggaatcggctctcccggttgcgggaagcgggcgtcgctcggacccaggacactacagtttctctatgcgatctccagagctcgctttaccccggggaatgaaggtcggggcagtagggaagcccctagggatgcagggaggcgggcgctgaggagtggagggtcgcctgagaggaggaggcgagagcgggagcgcggggtacagggtcgggggtagccttcagtcccggagagcgccagacccaaagaagaggccacatggggatggggcctgagaggaggaagtgcaagttaggacaaagagttacaggtgaggtgggggctcccaaaggaagacaagagaactttcctgcccttgtccacacacaaatggtggagcctttt

SEQ ID NO: 88248 - DNA, 452 bp, Homo sapiens
ctgctccggaatttccgggtcgacgatttcgtaaatatttaaaaatgcttcatgtgatgttacttaggggtaagattaagtggttgatgattaagctgcagagtcagcatataatttattcttatctttggattttcctggtctccatttcagtatgtgcttaggcgtgttttcatatttacctccagtattttgggaggcatgacctcttagtttcataccctcagtacccggaaaagcaaagagtatacatgtgaaccttgactcacagactttttactgccctggacattttagttaccttttcctttggccttctacttgctggaaatgtggatccggtttagaagggatcaaggatgggagctctctaggtttatttttttaatttttctatcagcctaaatcatgctttgatctcttgggttctttattccttgctcagcgatgca

SEQ ID NO: 88249 - DNA, 393 bp, Homo sapiens
  misc_feature (1)...(393): n = a,t,c or g
tttcgtcnngntatgcgcactgcaccctgctggatatgtgcatttttaaatttcactgccaggttgtcttcatggaggttgtagttattgatacttctaccaccagtgtgtgttataacactatagagtgttataaaacttcttatctttgccaaactggtggataaagaacggtatcttgtaccttttttttaagatatgcttttcattatgatatgcagaatactttaaaaggtacagactacagatggtgaagttcacacattggacaaacctgtgtaaccactataccagtcattactctatccccagcctctggaaaggtaaccattatcctgacttaaagtatctattcattattcttgtgtttcatataaacatacagtgtgtgct

SEQ ID NO: 88250 - DNA, 571 bp, Homo sapiens
tttcgtgctggttggaggagtggaagggcagatgaaatactagggaggtggtgaccagggagacagtgaagccacaggcacaggcagcagccattagtcccatacacaccccatgtcccatgagcactgagtagcgcagtgggttacagatggccatatagcgatcatagcccatggctgccagcaggaaggagtgagaggagccaaagaagaggaaggaaaacatttggatggcacagcccaggaaagaaatggtcttcttctgggacagcaggtcaaccagcatcttgggtacaatgacaaaggtatagcaaatctcagagcaagaaaggatggcaaggaagaagtacatgggagtatgaagggctctgtccagcacaatggtggaaatgatgattgcattggtgcccagagtgaacaggtagaggagcaggaagataacaaagagcagctgctgcagcctggccagggatgagaagccgaggacgacgaactctctcaccacagtcttattgacttgctccatggagagcacttctataaaggagagtcaaggacagaggtagaaacc

SEQ ID NO: 88251 - DNA, 1498 bp, Homo sapiens
caatttccagtcctccaagctccattcatgaaatgtcttccagtgtcaaaacccccatttttaataggaatgattttgatgattcttcatttctcccacaagaacagaaagtacaccttagagaaaaaccttatgaatgtaatgagcatagcaaagtctttagagtatcttccagccttactaaacatcaagtaatccatactgtagagaaaccttacaaatgtaattcatgcggcaaggtctttagtcgcaattcacaccttgcagaacattgtagaattcatactggagagaaaccttacaaatgtaatgtctgtggcaaggtttttagttacaattcaaactttgcacgacatcaaagaattcataccagagagaagccgtatgaatgtaatgaatgtggtaaagtcttcagtaataattcttaccttgcacgacatcaaagaattcatgctgaagagaaaccttacaaatgtaatgaatgtggtaaaggcttcagtcataagtcatctctagcaaatcattggagaatttatactggagagaagccttacaaatgtgatgaatgtggcaaggccttctataggattgcgctgccttcacaacattggagaattcatacaggagagaaaccttacaaatgtaatgaatgtggaaaagtatttaatcaactttcaaatcttgcacgacatcgaagaattcatactggagagaagccttacaaatgtaatgaatgtggtaaagcatttagtgagtattcaggcctttcagcccatcttgtaatccacactggagagaagccttacaaatgtagtgaatgtggcaaggcattcagacacaagttatcactaaccaatcatcagagaatccatactggagaaagaccttacaaatgtaatgaatgtggcaaggtcttcaatcgaattgcacaccttgcacgacatcggaaaattcatactggagagaaaccttacaaatgtaatgagtgtggcaaggcctttagtcgcatttcatacctagcacaacattggacaattcatactggagagaagccttacaaatgtaatgtctgtggcaaggtttttagttacaattcaaactttgcacgacatcaaagaattcataccagagagaagccgtatgaatgtaatgaatgtggtaaagtcttcagtaataattcttaccttgcacgacatcaaagaattcatgctgaagagaaaccttacaaatgtaatgaatgtggtaaaggcttcagtcataagtcatctctagcaaatcattggagaatttatactggagagaagccttacaaatgtgatgaatgtggcaaggccttctataggattgcgctccttgtacgacatcagaaaattcatactggagagaaaccttacaaatgtaatgaatgtggaaaggtctttattcaaaattcgcacctagcacaacattggagaattcatacaggagagaaaccttacaaatgtaatgaatgacgaaa

SEQ ID NO: 88252 - DNA, 494 bp, Homo sapiens
ttttttttttttaagaggaaaacccggtaatgatgtcggggttgagggataggaggagaatgggggataggtgtatgaacatgagggtgttttctcgtgtgaatgagggttttatgttgttaatgtggtgggtgagtgagccccattgtgttgtggtaaatatgtagagggagtatagggctgtgactagtatgttgagtcctgtaagtaggagagtgatatttgatcaggagaacgtggttacttctcttcttctccatgtttgtttcttcagctgctttctggtacttggagaatatttccacaatagccgatgacttgttcttgttgacaagagaaagttctttggctgttaccctcaatgatagtgaggtccattgccgtctattaaatggagatgattccatcttgtctacagacactgaaatacctagcgcacctgtcgcgaccaagctgctaacacctactgctcctgcggcccccggtgatcacct

SEQ ID NO: 88253 - DNA, 694 bp, Homo sapiens
  misc_feature (1)...(694): n = a,t,c or g
tgcaccgccgcgccgtaattcccgggtcgacgatttcgtaagacacggaaggcttggtgggcagagagctcttgaggtggaggggggaggtgacagggctaatcgcctcacagccattgcctgcctcccggataacgctgttgaccttggggctgcagatggtcacatcgacagtcctcttgcctttcagggtaggcctctcctcagccgggtggtcgctgacatctttcccaaaggttgcgaaagtccgtttggtggggccgcagtcgtcataagcctcgacatcagcagcagtagcttcaatagacagcgcgatgatgttcctcacatgctcaggggacttggaacggatgggcatggggttccggggcatccagcacctgtcagagtggccaagaatccggcattcttcccggcaatgaaatccttcattctgatcatgatcaggcatctgagatcccatggaggtcacactggtgttcagcacatcgttgacagcagtatcacaatacaggctccgctggacatcatgctcactgtcaagttggacactctcctcatgtccactatccttcaggctgtggccctctaaanaattgaaggagggcaagcctctttgaatttaaagggggcttcgggctatttcaacgggagggtgggagggccaaaaagaaataggttttcaagccctttt

SEQ ID NO: 88254 - DNA, 1638 bp, Homo sapiens
tttcgtggccgcggggcctgacccgcggacagctgccggcatcagcacccctgctccagtcgcgggcctgggaccccgggctcctcacgtgcaggcgtcggtccgggccactccagtgacgagggtaggatccgcagccccttcgcgaagcccgagcgagaccgggcgacaggcaggcagagaatatgttattccatccttggcccacagatttatggcagagatggtggatttctttattctcttctttataaaagcaaccattgtcttaagcattatgcacctcagtgggataaaggatatctctaagtttgctatgcattatataatagaagaaatagatgaagacacatcaatggaagacttgcagaaaatgatggttgtggcacttatatacagattattagtttgtttccatgagataatttgcatttggggagcaggtggagcctaccccagggaagttccctgcctggggcttcgagttgtgacatgtgatacatcagtgcttattgcaccaagtcgggttttaagtgattccttcctcaaatgttaagcattacaaccgtccactaatcccgagcttttgatcaagaatttttcaattgcttcttttttccctgctttcatcacattgctgttttttcagcataatcgaacagcttatgacattgtagcaggaaccattgtggtaaaaagaaatggggtcagatgatgccccccaaaaccctgatttccacacactaagactaaattatgtatcaaggccatcagtatccctgggttacactaattgatgatttagaaattaaagcagtcactccagtgtgatgcaggtgactactctgaaagtattgattatacttgaatgccaaagaacttgtccagaagaaaaacctgttaaattcaagtattaaaatttttagatcaaaaaggcaaatgattttataaacaatggacaatatatactttcttaagatctaaggtgctttcttaagatctaagaatttgctgaaagcattttcagctttgaaatctccaaatgaaactttaaaatttattttggtttatcccaaaataatggaaaatgtccagttgtgttttgtaaacacctatgtaactcatcttttagtttacacttcctggggaaattggctttggtgtttagaggagggaatgagaacacaaattggataatccactgtctcccatcccaggaggtggtgagttggctacaagagaaagggacaagtgaggcaggcctagcagttcccttacctgaagttttcaaatccatactgcagttccctctcgtaatgatgtaactttacaactattcttaatgcttgaacatgtatttaggggcaagtttctcatgatgatgaaaaagtatcaagtcatattgctatgttaattggtttttttttttaaaaggtaagttagtgattactgttaatggtgggggagtaagttttcactgtaaattgaacttataatttatgtgcaagtgttttcagtgccctgaatcaaactataaatgtggggagaaatcacctccatcaaacagttgcatatttactgtaaaagtattcccagtatgtgtgcagcatgaagaaagtattagtgcttaaaaaaaaa

SEQ ID NO: 88255 - DNA, 488 bp, Homo sapiens
ctgagtacctctgcggaaccgccccggaatttccgggtcgacgatttcgtgaggtatcagctttctccgctagttcccaccctggtagtccttagcccctggaatgcgtgagggagatgcttagggagttctcgaagtggggcgtagaggcatcgcctggcaaggcctgggagcgaaaaagatctctacttcgtggagccgttggacgctaccggggagccactggtggggaccttttttgggccccctttccttcgtggggtactatggagttcccagaacacagtcagcagctgctgcagagcctccgggagcagcggtcccagggtttcctttgtgactgcaccgtgatggtgggtagtacccagttcttggcccatcgggctgtgctggcctcctgcagcccattcttccagcttttctacaaggagcgggaattggacaagaaggatctggtgtgtattcacaatgaaattgtcaccgccccc

SEQ ID NO: 88256 - DNA, 14139 bp, Homo sapiens
gcactgcagcgccagcgtccgagcgggcggccgagctcccggagcggcctggccccgagccccgagcgggcgtcgctcagcagcaggtcgcggccgcgcagccccatccagccccgcgcccgccatgccgtccgcgggccccgcctgagctgcggtctccgcgcgcgggcgggcctggggacggcggggccatgcgcgcgctgccctaacgatgccgcccgccgcgcccgcccgcctggcgctggccctgggcctgggcctgtggctcggggcgctggcggggggccccgggcgcggctgcgggccctgcgagcccccctgcctctgcggcccagcgcccggcgccgcctgccgcgtcaactgctcgggccgcgggctgcggacgctcggtcccgcgctgcgcatccccgcggacgccacagcgctagacgtctcccacaacctgctccgggcgctggacgttgggctcctggcgaacctctcggcgctggcagagctggatataagcaacaacaagatttctacgttagaagaaggaatatttgctaatttatttaatttaagtgaaataaacctgagtgggaacccgtttgagtgtgactgtggcctggcgtggctgccgcgatgggcggaggagcagcaggtgcgggtggtgcagcccgaggcagccacgtgtgctgggcctggctccctggctggccagcctctgcttggcatccccttgctggacagtggctgtggtgaggagtatgtcgcctgcctccctgacaacagctcaggcaccgtggcagcagtgtccttttcagctgcccacgaaggcctgcttcagccagaggcctgcagcgccttctgcttctccaccggccagggcctcgcagccctctcggagcagggctggtgcctgtgtggggcggcccagccctccagtgcctcctttgcctgcctgtccctctgctccggccccccgccacctcctgcccccacctgtaggggccccaccctcctccagcacgtcttccctgcctccccaggggccaccctggtggggccccacggacctctggcctctggccagctagcagccttccacatcgctgccccgctccctgtcactgccacacgctgggacttcggagacggctccgccgaggtggatgccgctgggccggctgcctcgcatcgctatgtgctgcctgggcgctatcacgtgacggccgtgctggccctgggggccggctcagccctgctggggacagacgtgcaggtggaagcggcacctgccgccctggagctcgtgtgcccgtcctcggtgcagagtgacgagagccttgacctcagcatccagaaccgcggtggttcaggcctggaggccgcctacagcatcgtggccctgggcgaggagccggcccgagcggtgcacccgctctgcccctcggacacggagatcttccctggcaacgggcactgctaccgcctggtggtggagaaggcggcctggctgcaggcgcaggagcagtgtcaggcctgggccggggccgccctggcaatggtggacagtcccgccgtgcagcgcttcctggtctcccgggtcaccaggagcctagacgtgtggatcggcttctcgactgtgcagggggtggaggtgggcccagcgccgcagggcgaggccttcagcctggagagctgccagaactggctgcccggggagccacacccagccacagccgagcactgcgtccggctcgggcccaccgggtggtgtaacaccgacctgtgctcagcgccgcacagctacgtctgcgagctgcagcccggaggcccagtgcaggatgccgagaacctcctcgtgggagcgcccagtggggacctgcagggacccctgacgcctctggcacagcaggacggcctctcagccccgcacgagcccgtggaggtcatggtattcccgggcctgcgtctgagccgtgaagccttcctcaccacggccgaatttgggacccaggagctccggcggcccgcccagctgcggctgcaggtgtaccggctcctcagcacagcagggaccccggagaacggcagcgagcctgagagcaggtccccggacaacaggacccagctggcccccgcgtgcatgccagggggacgctggtgccctggagccaacatctgcttgccgctggacgcctcttgccacccccaggcctgcgccaatggctgcacgtcagggccagggctacccggggccccctatgcgctatggagagagttcctcttctccgttgccgcggggccccccgcgcagtactcggtcaccctccacggccaggatgtcctcatgctccctggtgacctcgttggcttgcagcacgacgctggccctggcgccctcctgcactgctcgccggctcccggccaccctggtccccaggccccgtacctctccgccaacgcctcgtcatggctgccccacttgccagcccagctggagggcacttgggcctgccctgcctgtgccctgcggctgcttgcagccacggaacagctcaccgtgctgctgggcttgaggcccaaccctggactgcggatgcctgggcgctatgaggtccgggcagaggtgggcaatggcgtgtccaggcacaacctctcctgcagctttgacgtggtctccccagtggctgggctgcgggtcatctaccctgccccccgcgacggccgcctctacgtgcccaccaacggctcagccttggtgctccaggtggactctggtgccaacgccacggccacggctcgctggcctgggggcagtgtcagcgcccgctttgagaatgtctgccctgccctggtggccaccttcgtgcccggctgcccctgggagaccaacgataccctgttctcagtggtagcactgccgtggctcagtgagggggagcacgtggtggacgtggtggtggaaaacagcgccagccgggccaacctcagcctgcgggtgacggcggaggagcccatctgtggcctccgcgccacgcccagccccgaggcccgtgtactgcagggagtcctagtgaggtacagccccgtggtggaggccggctcggacatggtcttccggtggaccatcaacgacaagcagtccctgaccttccagaacgtggtcttcaatgtcatttatcagagcgcggcggtcttcaagctctcactgacggcctccaaccacgtgagcaacgtcaccgtgaactacaacgtaaccgtggagcggatgaacaggatgcagggtctgcaggtctccacagtgccggccgtgctgtcccccaatgccacgctagcactgacggcgggcgtgctggtggactcggccgtggaggtggccttcctgtggaactttggggatggggagcaggccctccaccagttccagcctccgtacaacgagtccttcccggttccagacccctcggtggcccaggtgctggtggagcacaatgtcatgcacacctacgctgccccaggtgagtacctcctgaccgtgctggcatctaatgccttcgagaacctgacgcagcaggtgcctgtgagcgtgcgcgcctccctgccctccgtggctgtgggtgtgagtgacggcgtcctggtggccggccggcccgtcaccttctacccgcacccgctgccctcgcctgggggtgttctttacacgtgggacttcggggacggctcccctgtcctgacccagagccagccggctgccaaccacacctatgcctcgaggggcacctaccacgtgcgcctggaggtcaacaacacggtgagcggtgcggcggcccaggcggatgtgcgcgtctttgaggagctccgcggactcagcgtggacatgagcctggccgtggagcagggcgcccccgtggtggtcagcgccgcggtgcagacgggcgacaacatcacgtggaccttcgacatgggggacggcaccgtgctgtcgggcccggaggcaacagtggagcatgtgtacctgcgggcacagaactgcacagtgaccgtgggtgcggccagccccgccggccacctggcccggagcctgcacgtgctggtcttcgtcctggaggtgctgcgcgttgaacccgccgcctgcatccccacgcagcctgacgcgcggctcacggcctacgtcaccgggaacccggcccactacctcttcgactggaccttcggggatggctcctccaacacgaccgtgcgggggtgcccgacggtgacacacaacttcacgcggagcggcacgttccccctggcgctggtgctgtccagccgcgtgaacagggcgcattacttcaccagcatctgcgtggagccagaggtgggcaacgtcaccctgcagccagagaggcagtttgtgcagctcggggacgaggcctggctggtggcatgtgcctggcccccgttcccctaccgctacacctgggactttggcaccgaggaagccgcccccacccgtgccaggggccctgaggtgacgttcatctaccgagacccaggctcctatcttgtgacagtcaccgcgtccaacaacatctctgctgccaatgactcagccctggtggaggtgcaggagcccgtgctggtcaccagcatcaaggtcaatggctcccttgggctggagctgcagcagccgtacctgttctctgctgtgggccgtgggcgccccgccagctacctgtgggatctgggggacggtgggtggctcgagggtccggaggtcacccacgcttacaacagcacaggtgacttcaccgttagggtggccggctggaatgaggtgagccgcagcgaggcctggctcaatgtgacggtgaagcggcgcgtgcgggggctcgtcgtcaatgcaagccgcacggtggtgcccctgaatgggagcgtgagcttcagcacgtcgctggaggccggcagtgatgtgcgctattcctgggtgctctgtgaccgctgcacgcccatccctgggggtcctaccatctcttacaccttccgctccgtgggcaccttcaatatcatcgtcacggctgagaacgaggtgggctccgcccaggacagcatcttcgtctatgtcctgcagctcatagaggggctgcaggtggtgggcggtggccgctacttccccaccaaccacacggtacagctgcaggccgtggttagggatggcaccaacgtctcctacagctggactgcctggagggacaggggcccggccctggccggcagcggcaaaggcttctcgctcaccgtgctcgaggccggcacctaccatgtgcagctgcgggccaccaacatgctgggcagcgcctgggccgactgcaccatggacttcgtggagcctgtggggtggctgatggtgaccgcctccccgaacccagctgccgtcaacacaagcgtcaccctcagtgccgagctggctggtggcagtggtgtcgtatacacttggtccttggaggaggggctgagctgggagacctccgagccatttaccacccatagcttccccacacccggcctgcacttggtcaccatgacggcagggaacccgctgggctcagccaacgccaccgtggaagtggatgtgcaggtgcctgtgagtggcctcagcatcagggccagcgagcccggaggcagcttcgtggcggccgggtcctctgtgcccttttgggggcagctggccacgggcaccaatgtgagctggtgctgggctgtgcccggcggcagcagcaagcgtggccctcatgtcaccatggtcttcccggatgctggcaccttctccatccggctcaatgcctccaacgcagtcagctgggtctcagccacgtacaacctcacggcggaggagcccatcgtgggcctggtgctgtgggccagcagcaaggtggtggcgcccgggcagctggtccattttcagatcctgctggctgccggctcagctgtcaccttccgcctgcaggtcggcggggccaaccccgaggtgctccccgggccccgtttctcccacagcttcccccgcgtcggagaccacgtggtgagcgtgcggggcaaaaaccacgtgagctgggcccaggcgcaggtgcgcatcgtggtgctggaggccgtgagtgggctgcagatgcccaactgctgcgagcctggcatcgccacgggcactgagaggaacttcacagcccgcgtgcagcgcggctctcgggtcgcctacgcctggtacttctcgctgcagaaggtccagggcgactcgctggtcatcctgtcgggccgcgacgtcacctacacgcccgtggccgcggggctgttggagatccaggtgcgcgccttcaacgccctgggcagtgagaaccgcacgctggtgctggaggttcaggacgccgtccagtatgtggccctgcagagcggcccctgcttcaccaaccgctcggcgcagtttgaggccgccaccagccccagcccccggcgtgtggcctaccactgggactttggggatgggtcgccagggcaggacacagatgagcccagggccgagcactcctacctgaggcctggggactaccgcgtgcaggtgaacgcctccaacctggtgagcttcttcgtggcgcaggccacggtgaccgtccaggtgctggcctgccgggagccggaggtggacgtggtcctgcccctgcaggtgctgatgcggcgatcacagcgcaactacttggaggcccacgttgacctgcgcgactgcgtcacctaccagactgagtaccgctgggaggtgtatcgcaccgccagctgccagcggccggggcgcccagcgcgtgtggccctgcccggcgtggacgtgagccggcctcggctggtgctgccgcggctggcgctgcctgtggggcactactgctttgtgtttgtcgtgtcatttggggacacgccactgacacagagcatccaggccaatgtgacggtggcccccgagcgcctggtgcccatcattgagggtggctcataccgcgtgtggtcagacacacgggacctggtgctggatgggagcgagtcctacgaccccaacctggaggacggcgaccagacgccgctcagtttccactgggcctgtgtggcttcgacacagagggaggctggcgggtgtgcgctgaactttgggccccgcgggagcagcacggtcaccattccacgggagcggctggcggctggcgtggagtacaccttcagcctgaccgtgtggaaggccggccgcaaggaggaggccaccaaccagacggtgctgatccggagtggccgggtgcccattgtgtccttggagtgtgtgtcctgcaaggcacaggccgtgtacgaagtgagccgcagctcctacgtgtacttggagggccgctgcctcaattgcagcagcggctccaagcgagggcggtgggctgcacgtacgttcagcaacaagacgctggtgctggatgagaccaccacatccacgggcagtgcaggcatgcgactggtgctgcggcggggcgtgctgcgggacggcgagggatacaccttcacgctcacggtgctgggccgctctggcgaggaggagggctgcgcctccatccgcctgtcccccaaccgcccgccgctggggggctcttgccgcctcttcccactgggcgctgtgcacgccctcaccaccaaggtgcacttcgaatgcacgggctggcatgacgcggaggatgctggcgccccgctggtgtacgccctgctgctgcggcgctgtcgccagggccactgcgaggagttctgtgtctacaagggcagcctctccagctacggagccgtgctgcccccgggtttcaggccacacttcgaggtgggcctggccgtggtggtgcaggaccagctgggagccgctgtggtcgccctcaacaggtctttggccatcaccctcccagagcccaacggcagcgcaacggggctcacagtctggctgcacgggctcaccgctagtgtgctcccagggctgctgcggcaggccgatccccagcacgtcatcgagtactcgttggccctggtcaccgtgctgaacgagtacgagcgggccctggacgtggcggcagagcccaagcacgagcggcagcaccgagcccagatacgcaagaacatcacggagactctggtgtccctgagggtccacactgtggatgacatccagcagatcgctgctgcgctggcccagtgcatggggcccagcagggagctcgtatgccgctcgtgcctgaagcagacgctgcacaagctggaggccatgatgctcatcctgcaggcagagaccaccgcgggcaccgtgacgcccaccgccatcggagacagcatcctcaacatcacaggagacctcatccacctggccagctcggacgtgcgggcaccacagccctcagagctgggagccgagtcaccatctcggatggtggcgtcccaggcctacaacctgacctctgccctcatgcgcatcctcatgcgctcccgcgtgctcaacgaggagcccctgacgctggcgggcgaggagatcgtggcccagggcaagcgctcggacccgcggagcctgctgtgctatggcggcgccccagggcctggctgccacttctccatccccgaggctttcagcggggccctggccaacctcagtgacgtggtgcagctcatctttctggtggactccaatccctttccctttggctatatcagcaactacaccgtctccaccaaggtggcctcgatggcattccagacacaggccggcgcccagatccccatcgagcggctggcctcagagcgcgccatcaccgtgaaggtgcccaacaactcggactgggctgcccggggccaccgcagctccgccaactccgccaactccgttgtggtccagccccaggcctccgtcggtgctgtggtcaccctggacagcagcaaccctgcggccgggctgcatctgcagctcaactatacgctgctggacggccactacctgtctgaggaacctgagccctacctggcagtctacctacactcggagccccggcccaatgagcacaactgctcggctagcaggaggatccgcccagagtcactccagggtgctgaccaccggccctacaccttcttcatttccccggggagcagagacccagcggggagttaccatctgaacctctccagccacttccgctggtcggcgctgcaggtgtccgtgggcctgtacacgtccctgtgccagtacttcagcgaggaggacatggtgtggcggacagaggggctgctgcccctggaggagacctcgccccgccaggccgtctgcctcacccgccacctcaccgccttcggcgccagcctcttcgtgcccccaagccatgtccgctttgtgtttcctgagccgacagcggatgtaaactacatcgtcatgctgacatgtgctgtgtgcctggtgacctacatggtcatggccgccatcctgcacaagctggaccagttggatgccagccggggccgcgccatccctttctgtgggcagcggggccgcttcaagtacgagatcctcgtcaagacaggctggggccggggctcaggtaccacggcccacgtgggcatcatgctgtatggggtggacagccggagcggccaccggcacctggacggcgacagagccttccaccgcaacagcctggacatcttccggatcgccaccccgcacagcctgggtagcgtgtggaagatccgagtgtggcacgacaacaaagggctcagccctgcctggttcctgcagcacgtcatcgtcagggacctgcagacggcacgcagcgccttcttcctggtcaatgactggctttcggtggagacggaggccaacgggggcctggtggagaaggaggtgctggccgcgagcgacgcagcccttttgcgcttccggcgcctgctggtggctgagctgcagcgtggcttctttgacaagcacatctggctctccatatgggaccggccgcctcgtagccgtttcactcgcatccagagggccacctgctgcgttctcctcatctgcctcttcctgggcgccaacgccgtgtggtacggggctgttggcgactctgcctacagcacggggcatgtgtccaggctgagcccgctgagcgtcgacacagtcgctgttggcctggtgtccagcgtggttgtctatcccgtctacctggccatcctttttctcttccggatgtcccggagcaaggtggctgggagcccgagccccacacctgccgggcagcaggtgctggacatcgacagctgcctggactcgtccgtgctggacagctccttcctcacgttctcaggcctccacgctgagcaggcctttgttggacagatgaagagtgacttgtttctggatgattctaagagtctggtgtgctggccctccggcgagggaacgctcagttggccggacctgctcagtgacccgtccattgtgggtagcaatctgcggcagctggcacggggccaggcgggccatgggctgggcccagaggaggacggcttctccctggccagcccctactcgcctgccaaatccttctcagcatcagatgaagacctgatccagcaggtccttgccgagggggtcagcagcccagcccctacccaagacacccacatggaaacggacctgctcagcagcctgtccagcactcctggggagaagacagagacgctggcgctgcagaggctgggggagctggggccacccagcccaggcctgaactgggaacagccccaggcagcgaggctgtccaggacaggactggtggagggtctgcggaagcgcctgctgccggcctggtgtgcctccctggcccacgggctcagcctgctcctggtggctgtggctgtggctgtctcagggtgggtgggtgcgagcttccccccgggcgtgagtgttgcgtggctcctgtccagcagcgccagcttcctggcctcattcctcggctgggagccactgaaggtcttgctggaagccctgtacttctcactggtggccaagcggctgcacccggatgaagatgacaccctggtagagagcccggctgtgacgcctgtgagcgcacgtgtgccccgcgtacggccaccccacggctttgcactcttcctggccaaggaagaagcccgcaaggtcaagaggctacatggcatgctgcggagcctcctggtgtacatgctttttctgctggtgaccctgctggccagctatggggatgcctcatgccatgggcacgcctaccgtctgcaaagcgccatcaagcaggagctgcacagccgggccttcctggccatcacgcggtctgaggagctctggccatggatggcccacgtgctgctgccctacgtccacgggaaccagtccagcccagagctggggcccccacggctgcggcaggtgcggctgcaggaagcactctacccagaccctcccggccccagggtccacacgtgctcggccgcaggaggcttcagcaccagcgattacgacgttggctgggagagtcctcacaatggctcggggacgtgggcctattcagcgccggatctgctgggggcatggtcctggggctcctgtgccgtgtatgacagcgggggctacgtgcaggagctgggcctgagcctggaggagagccgcgaccggctgcgcttcctgcagctgcacaactggctggacaacaggagccgcgctgtgttcctggagctcacgcgctacagcccggccgtggggctgcacgccgccgtcacgctgcgcctcgagttcccggcggccggccgcgccctggccgccctcagcgtccgcccctttgcgctgcgccgcctcagcgcgggcctctcgctgcctctgctcacctcggtgtgcctgctgctgttcgccgtgcacttcgccgtggccgaggcccgtacttggcacagggaagggcgctggcgcgtgctgcggctcggagcctgggcgcggtggctgctggtggcgctgacggcggccacggcactggtacgcctcgcccagctgggtgccgctgaccgccagtggacccgtttcgtgcgcggccgcccgcgccgcttcactagcttcgaccaggtggcgcacgtgagctccgcagcccgtggcctggcggcctcgctgctcttcctgcttttggtcaaggctgcccagcacgtacgcttcgtgcgccagtggtccgtctttggcaagacattatgccgagctctgccagagctcctgggggtcaccttgggcctggtggtgctcggggtagcctacgcccagctggccatcctgctcgtgtcttcctgtgtggactccctctggagcgtggcccaggccctgttggtgctgtgccctgggactgggctctctaccctgtgtcctgccgagtcctggcacctgtcacccctgctgtgtgtggggctctgggcactgcggctgtggggcgccctacggctgggggctgttattctccgctggcgctaccacgccttgcgtggagagctgtaccggccggcctgggagccccaggactacgagatggtggagttgttcctgcgcaggctgcgcctctggatgggcctcagcaaggtcaaggagttccgccacaaagtccgctttgaagggatggagccgctgccctctcgctcctccaggggctccaaggtatccccggatgtgcccccacccagcgctggctccgatgcctcgcacccctccacctcctccagccagctggatgggctgagcgtgagcctgggccggctggggacaaggtgtgagcctgagccctcccgcctccaagccgtgttcgaggccctgctcacccagtttgaccgactcaaccaggccacagaggacgtctaccagctggagcagcagctgcacagcctgcaaggccgcaggagcagccgggcgcccgccggatcttcccgtggcccatccccgggcctgcggccagcactgcccagccgccttgcccgggccagtcggggtgtggacctggccactggccccagcaggacaccccttcgggccaagaacaaggtccaccccagcagcacttagtcctccttcctggcgggggtgggccgtggagtcggagtggacaccgctcagtattactttctgccgctgtcaaggccgagggccaggcagaatggctgcacgtaggttccccagagagcaggcaggggcatctgtctgtctgtgggcttcagcactttaaagaggctgtgtggccaaccaggacccagggtcccctccccagctcccttgggaaggacacagcagtattggacggtttctagcctctgagatgctaatttatttccccgagtcctcaggtacagcgggctgtgcccggccccaccccctgggcagatgtcccccactgctaaggctgctggcttcagggagggttagcctgcaccgccgccaccctgcccctaagttattacctctccagttcctaccgtactccctgcaccgtctcactgtgtgtctcgtgtcagtaatttatatggtgttaaaatgtgtatatttttgtatgtcactattttcactagggctgaggggcctgcgcccagagctggcctcccccaacacctgctgcgcttggtaggtgtggtggcgttatggcagcccggctgctgcttggatgcgagcttggccttgggccggtgctgggggcacagctgtctgccaggcactctcatcaccccagaggccttgtcatcctcccttgccccaggccaggtagcaagagagcagcgcccaggcctgctggcatcaggtctgggcaagtagcaggactaggcatgtcagaggaccccagggtggttagaggaaaagactcctcctgggggctggctcccagggtggaggaaggtgactgtgtgtgtgtgtgtgtgcgcgcgcgacgcgcgagtgtgctgtatggcccaggcagcctcaaggccctcggagctggctgtgcctgcttctgtgtaccacttctgtgggcatggccgcttctagagcctcgacacccccccaacccccgcaccaagcagacaaagtcaataaaagagctgtctgactgc

SEQ ID NO: 88257 - DNA, 463 bp, Homo sapiens
tccagtgcggtggaattcccacacccggcctaataaggaatattctgaataactttatgccaataaactcaacaacttagatgaaatggacaaattctttagaagacggaaactaccagtgctcactcatgaagaaataggtgagctgaaaaatcctctatctattaaagaaattgaattttagtttttaactttcctataaagaaaactttagcagagaggggtaggcaccatctctgctgtttggtcgactcagccattccagcctgcgggctttggagagtccaaaagtttcagacaagggagcgtccccccagcagcacaacatagtggctttgccagatcatgaccagactgctgctttaagcagcctggatcacttccttctcactgggcagggactcccagttgggcccttcagccatgcccactggcacatactatggacagagctctgatctct

SEQ ID NO: 88258 - DNA, 455 bp, Homo sapiens
  misc_feature (1)...(455): n = a,t,c or g
aaccatgtccagngngctggaaatcgcagtatttgggatatacactaaagtgttattcattgtttacctgaaactcaaatttaactgggagccgtgtattttatgtggcaatcctgtcttatcctctatttagagggcattaccaagctgatactttcaaaactgaatatttggcatgacagctggttcaactttctctctcccactagacagtgagtgactgaaagacaagggcttggcatacctactgatgtatctgtaatatccggtactgccaggcacacagcaggtgctcagtagcaactgatggaatgactaattctaagagccttcaattcccacaactttcctaataacaagaaagatccacaaaactaatgaactattccctccaccaatgttactattttccccaatacaaattagagaagcagcagcttgccatttttttccat

SEQ ID NO: 88259 - DNA, 503 bp, Homo sapiens
ttttttttttttccccatgttctcacaataaactctttattgtttagctagccccagtgactttatgcatcttataaccaaaaaagccttcagtagagcaagtctgagccagaggttttatcacactttgtcctcagggtccaccaggaaccaggtcttggctcacagccaggctggaaacagtcttcacagttctgagcctggagtttgagatctgcctcccctttcaaggaagatccagaggtcacctgcgcttgtagagacatggctgaagctgcaggcctgaaagctgagccttgggccctaccagagggggcccagtcttttggaaatcaaacaagaagaaatggctgtctttggtgctgctttggaaatatactcagctactggtgctcaagagcattatttataaatcactggtcaaagcaagggtggccatgagttattgctgaagaatgcaggacaacttctgtaaaggatgtagaatagcaaaacatgctaag

SEQ ID NO: 88260 - DNA, 407 bp, Homo sapiens
cagacattttgctcccaacggaagtgggagccctgggaagctttgtgagcagaggcagtacatagagggaggtgttttaaggagctgggatgaggatttggttctcactgagtcttttctgcccctaggacctgaccaacagccatttcttcctgtttgatttccaaaagactgggccccctctgggggggcccaaggctcagttttcaagcctgcagcttcagccatgtgtctactagcgcaggtgacctctggagcttccttgaaaggtgaggcagatctcaaactacaggctcagaactgcgtttactgttgccagactggcttggagccaccacctggttcctggtgggccctgaggacccagagggaaaaaacctttttgtcaacactggggggggctgatt

SEQ ID NO: 88261 - DNA, 417 bp, Homo sapiens
atactgctggtgctacttcccttcttgaaagaataagttccatggcaaacataagcatgtgtcaagcattaggttttattctaggtccagtttttcagacttgttttacattccttggagaaaaaggtgtgacatgggatgtgattaaactgcagataaacatgtatacaacaccagttttacttagcgccttcctgggaattttaaatattattctgatccttgccatactaagagaacatcgtgtggatgactcaggaagacagtgtaaaagtattaattttgaagaagcaagtacagatgaagctcaagttccccaaggaaatattgaccaggttgctgttgtggccatcaatgatctggattttgcgaccctatttatctttggcctttttgaaaccctcattactccattaa

SEQ ID NO: 88262 - DNA, 431 bp, Homo sapiens
aggcattcggcacgagctgtcccagtgtttcacctgtttcacaaactcttggcaggccagccattgccagctgaaatgacacttgcccagcttttaactctcctatatgaccgaaaacttcctcagggttaccgctcaatagatctgactgttaaattgggatcaagagttataacagaccccagtctatcaaaaacagattcttataaaagactacaccctgaaaaagatcatggagacttacttgctagctgtccagaagatgaggctctcactccaggtgatgaatgcatggatgggatactggatgaatctttgcttgaaacctgtccaattcagtcaccattacaagtttttgcaggaatgggtggactggctcttattgctgaaagactacccatgctatatccagaagtaattcaacaggtgag

SEQ ID NO: 88263 - DNA, 441 bp, Homo sapiens
gcggccgcacacaggaagaacaggatgcccttgggcgtgttgaggacctgcaggcacggcggtgcgaaggcccaccagccgcacgccacgctctgcccggccgagacgtaccgcacctcatgggtcccccgggcgccatgcttctcggcccagagctggcagaggggctgcttgctggtgtccagggggctatgggcagcggagcggagggagccggggctcaggggtgtgcccggggatgccctcctgctgggtggggtgtggtcaagcccgttttccatggctgagttggggctggggaaggtgagcggcttgtcccccagctgatgcaggggcatctccgcgcctccgcctggtgacctcgaggcttcagccacgcagtgggagtggcctcagcgggagtggccaagtggtatctgaggggctggtgtgtccgtcccc

SEQ ID NO: 88264 - DNA, 860 bp, Homo sapiens
agtgtggtggaattcaaacagagggagaatatttaatcatttacagtttaaatttcatgatgacccttcataaagcagcagcgcatttcagtttttcatgtgttcatagcagaaacactttcaggtgctggtctgacggattgttttatttaattgtcttacctctcttgaggttgtaagacctgattccaggccacagttaccctactgtgtcctacttaagtggatgccatttttagtctctcttggaattgaaaattgcaattgtataagaaaatattaaaccacacagctaaggaagaatgtagagagatgtagctgccatttggaaatgtgtgggagcatttttatagtgatgactggagtttcctactggcattagtgaacatgggccagcaatgctaaccagttccctgcaacatgcacaactgctctggacaacaagcagttcccctcaaaaccaagaacccttccactgagaaacactgagtaactgaagggattctatgtggatggtgactaaacttgttcttagaagttttagagatagaactaggaccaaatagtatgaatcagaagttacgggactctctctctctctctccatatatatatggatggctctctccatatatatatatatgcgggggaaaacggcctccacccacacacctcacacgcgcataaacggttattagccccagggataacataccccttttttccccccccgctacatgtggtccgattacacgtgtcctgattagccgaggcgtcgccccctcttctttccgaggcctaggcgccgtcctcgttcaacacctacacgagagggcgtagcagacgtccgagatggggac

SEQ ID NO: 88265 - DNA, 872 bp, Homo sapiens
  misc_feature (1)...(872): n = a,t,c or g
tttttttaattttaatagtatattttatttaatgcaaaatatccaaaacattatttcaatgtggagtcaatatgaaatattactgagatgttttacatcttcatactgttttctaataatatatgaattattgaatgaagtacgtattttacacttacactgtatcagaatttggactagccacatttcaagtgctcttggacagcacaggtctattattctccaggcctcagtcattttctgaaccaactggaggcaagaaaacgagtgtgtcattgaaatagtgtccaaatgccctgagccggtacaggccatacatcattacttccatcttttggggggtcagtccattgaaagtaatagccatatctgaacagcagccttctactacttgctgagggttattagacaatgcctcttcaataagctgtgcgattggtttggtattaaatacatctcttccttcataatcctctgcattttctgcatgaactcctgcatatttcaggcatattgccagctgcttatcttcagataacttccaaatcacactttgatctgcacaggtctcagagttatcgagaagtctgttaagtcttttcatcaactctctgcttaagacaatccctccttccacagtcacgtattcgaggtctccaaatataacagtgtggcccagatagaagggctgggatgcatcccttgtaaacaaaaggtactttaaattttcaatgtcagcaaacgtagtgggaagtgcacggaagacccagttgtagttgtcgccattcttttaaaaaaagtatttgtaagcggtcttaatctgtacccacctgtcattactttttatattganctaatggatttggcgtagg

SEQ ID NO: 88266 - DNA, 584 bp, Homo sapiens
  misc_feature (1)...(584): n = a,t,c or g
tttggaggaactcgcagagttcaaattcaggctccatgacttcctagctaagtgaccaaggcaaattacagatgagtttctttatttgtgagatggggacagtaatgccacatgctggcacggggcagagtgtgtggagcaccgtggctggcacatgatgagcgctcaggtgggggcactgatgctccggcagggccccagcggagctggttcctccgccagatggaactggataccaccttcctccgggagctcaacgtgctggattacagcctcctgatagccttccaacgtctccacgaggatgagaggggcccgggcagcaacctcatcttccgcacggccaggtctgtgcaaggggcacagagcccggaagagtcgagagcccaaaaccgccggctgctgcccgacgcccccaacgccctacacatcctggacgggcccgagcagcgctatttcctgggcgtggtggatctcgccacagtctacgggctccgcangcggctggagcacctgtggaagacactgcgctacccaggccggaccttctccactgtcagcccggctcgctacgccctgtatct

SEQ ID NO: 88267 - DNA, 420 bp, Homo sapiens
  misc_feature (1)...(420): n = a,t,c or g
tagaccagcgtggtggaattcgtcactgctgtaagggaggtggcagcatcagaggctccccttgcctgagtggccccagaccccagctgtaagggaggtggcagcatcagaggctccccttgcctgagtggcagcagaggtctggggtcactgctgaagacctggacctggagaagaaggtggcactctggtgcaaaagcgcactgcggggtgaggccaaggccatctgggactgcagaccctcacggccttcccacactttgtcctcacttgcaacagggacttcttgtctgcctgttgtatgtaaagcacccagcatggatgcacagcaggagagacacaagccccaagactatgtggctgtctttctgggctctgtcatccgtcccattgatctatgtgtctagttttatgctaggn

SEQ ID NO: 88268 - DNA, 802 bp, Homo sapiens
gggaattctctggccattccaaacttcccctccaaattcgatgagccgtcttgccaactgtgattgcacaatgccgagacgggtgagcagaaacggttgtgcttacgtaggtgtgtggttctttgtgatttctgtggctaacactgccatctgcttcatgtccagggctgggttccatatctgtctgagctcttcaccacctcgtctacagcagtctgtgacccaaggtagtaattgcttaataaggctcatggtctcaggcgccagaaagttgtattcatctttctatcctggacctgcacaggaagtcagtgccccatatgcatttgttgaatggaaggaattttaaacttcttgaagtttccctttcttactagttctatatctcagcccagcccagagctgagcccataacagggctgatgggttggccaatggatggaactgctgaaaagtttcctaagtctaagtggattttgatccccaaggacacaaagaaacccaaaggcttgacacaaccaagtatctggagtgactgttggtgaaaggccagggcccatcacatgtgagccatgatcatggggccatgggaaggggatttagtgagatgggaagaatgtgcgtcatgaaaccagggaaggactttgcatgaacccgtggcgatcaggtgcccatgaaattatgaatgtggcttaactcagcattcgtccctgaggtctgattcccacacaaaacaaaaaatagggaacggaaggaaaggaaagggaaggagaagaaggaagggaaggaagaggagttaaag

SEQ ID NO: 88269 - DNA, 430 bp, Homo sapiens
  misc_feature (1)...(430): n = a,t,c or g
gtccagcgtggtggaattcccggcgaccccctgccgtgaaccttaaccctaccttccacgacaaccctcccaacctttccttcccgctcttccgggtgactccctgtaccgcgcagcttggtgacccccgacctttcgttttctggtaacccttgaccccgcactcatcggtgcccccgagccccttggtgaccccgcacccgcttttcctcggtatcctggccttcccttttggggactctcgactccatgcgcctcgtgacctcgaccccttcctgggagtgacccccggtctctcccgccgccccgattcctgactccaggctcctcgggcgttcgtgccccttcctcctccttgtccccggncccaggacccttgccctctcggccccgcagcgcagccctgtctccctcccttcccttggctccc

SEQ ID NO: 88270 - DNA, 613 bp, Homo sapiens
ttagcgcatcctctgtagaccgctggcgtacgtgtcggtgcagggctgtcctgagggctcctgttccacctggtagattgctaggtgcggtgtgcaaagctgtgtaggtgtggcctcagccagcctggggagctgcaggtggaggtggcagggaactctgtgctgtcagtacagagcctctgggctggtgcatttggtcagcgacagcatttttgaaacattggggttgttggagtggttggattttccctggaattgagtgagaaattcagaagactgaagcccaggcttactgtctacctttcacggaggcctagccgtgagaggacagaagaaggcatgtggcgaatcatgacagcagacaaagacaaagagaaggaccgggactgagactgggactgagagagagagaaaagagacaaagcaagagagagtgagaattcaaggccacgccggagctgtaccttggaaggaggagccaaaaattatgctgagagtgatcacagtgaagacgaggacaatgacaacaatagtgccaccacagaggagtccacgaagaagaacaagaagaaaccaccgaagaaaacgtctcgttatgaaaggacagataccg

SEQ ID NO: 88271 - DNA, 443 bp, Homo sapiens
agtgcggtggaattcagccgggcgcaggtggggtccacggccgtggcgcggctgctgagcagggactggaactcaaacctgctgccgccgccaccgccgccatgggctgggctgccggggctgctgctgctgctcgaagcggagacgcccagcggccgtccctccatgcccctccggggacttggcatcgcagcgggcggcccggatcccgggacctggccggaccaaacagaggcttcccggccctgcagcctcttccgcttccgcactaccatcccggaggggcggggagaggagccggcgagagcgcgattgtgacacctggtggagacgtgggagggagttggaatttccaatgtgaggagagcagaggggaggatgttggcgttgggaggtacaggtgagggagtgaggtgatggggaaaatgtcagtgtctgtaggc

SEQ ID NO: 88272 - DNA, 2329 bp, Homo sapiens
  misc_feature (1)...(2329): n = a,t,c or g
ttttttttttttagcgtggttcttgcgtgtttacacgcacacacacagaatgctttacagtatgttcttggtgagctggtgcttaagttttgtgccatctctccctataatcttcctaggagctgtgagatagagaaagctttccttggtaactgtggagaggacacgtttcttgcgagtatggctggagaagcccccacctccggtcccaacacaacggaacacatggagttttgctgtggtgtctggaggatcctgtcttgagcttgcctttgcttaggctggactgtgtaagacaagcactgtgaagtgttccaactttatttaaaaccagacagccctgctaccatgcccccgctcctcagcattgctctaggggaggagctggatgaactatggcccttctgccaagcccaggtgctaggggaggaaccccttgcttgagatgtacaggatggactcctcacttcttctgggcttgtgccctggcccgttgaatcttgtcagctgtggccccatctgtggctcccgtgcagtgggacaatacgaggctcagctcagcctcattccggtgttcgatggccacatctgcagcctgagccacatcgccaacaagaagcaaagccttgaccttctgctcgggacccacgcgggaagcatacttcttggcttcgtatttgttatgttgtttcatgcagatctccacaaaaggcaggtagccaatgggtgatttcttgctcttggaaaacttctctagctcttcccaatcttccaaatctgccagggcagtcagcttcagccaccagagcctgcaggaaagctgggcttggaggtgttgcaggagaggcaggtggtcctgggacccacatgcagcctgggccctcacctacctcttgtcagggatgcggaagtcacgtgccagctgctctgcacgcttgttgtgaccgccaagaatgagggtggtaactgtgtcatgtagagacaggtctaggaactggccccccagctcgtcttctaggcgccgctgcagccgtaggagccgcatttgatcctctgtagccttggctgcaaactcattcttggccttgtagaaggcatcggcggctgtctgcagagctgctactcgcccctcaatacgctcttctgcagcatagctggctcggatgtggaagctgcccaattcctggtgattgtcatcctgattgtaaaggtccttcagcgtctctagctcctgatgcttacagaactgtcggtacaaactgagggccatgggctgattccgaagggtcatgaaaaaatctcctcggttcagctcgttcttcaggtgcagcaacaccgtgaacaccaggtcagtgtccccgctctcgatggccttgcttagtgccagtttgctcctcttcatctttaggagaaggggtacctgctcccctgagcgtggctcatactccagcagcttgatggccagctccgtgcggccacaaccataggctcgtgcagcaatgtcggagtaagagacaccaggcgtgtcccccagcttctggttaatggctcgagccacatcctcatctgagacatccttctgttgcaccttgtagcaggcccagtgggccaggatcctgctgacgccctgtacttcaggaaggcgcaagtactcgcatatctggatggccagggggtaaagtctccgcaacacgagcctgtccagcagcacctggatggtgagctgcttatattggctataggtgagcgggatcccgatgtgatagtcccgaacagcattgagcacacgcaggtcctgacacatgtgcacgaagctgtcgggtggaaatctgtccaggaaacactttccgaaggaggcggccctgagcagactcttctgcatgtctggctggtgctcatgtcctgcagcctcaatgcactgctgcacggcctgggtcagctggcccagctcctggatctcccgcaggtactcgtccgccttctggctctctttctcatactccttctgagcctccaggagcagcgccccgggggccattgaggcaattttgaagatttcctcgctggccgctggaacctcatgcaggaactcgtgggtgctgcgggagaagatgcggaccccatcgagctcaggcaccaggtaggagtcctcatccagcacaaactggatgctctcgggtgcatcgcccaccaccatcagccgcctttcccaggccaccaccacggccctctccttgctacgaggacgaaaacaccagaacatctgctttggaggtgcccggatgttgcagttgagctcncatagcttctaanatttccagaacactac

SEQ ID NO: 88273 - DNA, 392 bp, Homo sapiens
gagtctgggcagtctctgcctccaccccagctctctggcccgagcaaaggagctggtattcctcatctgggcaccccgggcccccgcccgccttcctgtcctgccagcaggaccgctcccaccacgagccagcccagaggacgtggcagtcccacagcctctgcacttggcgctctggcagccctgcctggccagacccacgctgtctgtagcccctgaattcctggcctcctgtgagcagcgttggtgggaggtggaagactcccccagggatccaccaaccagccgggcaggtccacttggggccagtttctacctcggaaaatcctggcttcctcagcgccgacccccagcagccctggcctcctcccctgctcactgctgactgcttg

SEQ ID NO: 88274 - DNA, 435 bp, Homo sapiens
acccgtccggaattcccgtgccgaggggccgttatggagcaaggcacgtcctcgtctttgacagaggcgtttttcaggagtatgctaagctatgactgagatggaaggcaggtggcctcagactcccatgtggcccccagcgacccccaggatgtacctgcttttgtgagacctgcacgtgtggagcccacaaacagggatggcggagaagctggagaaagctcggcagagcccccgtcgagagacatgggcacagtggggggccaggctaaccacccccatacactcggcgctcgagctttggggtcccctcggaaacggccatagcagcaggatgtcagctcaccagccaagactgtgggccgtttctcggtggtcagcactcacgacgagtggaccctgtccttcccccacagtctgagatactctgccccg

SEQ ID NO: 88275 - DNA, 423 bp, Homo sapiens
  misc_feature (1)...(423): n = a,t,c or g
ctttcttgggcagtttgtccctaacattccagccctttaataggtaatagaagaggggtgccattgtctggctgcttcttgctgggaaggggcgacggttgtgggggaaggctggacagtagggactacagtttttggagccattggtattcctggagcagcattatatcttgtattgtcgcataggtgaaggctctgatacggtcctgtaaaaactgggtgagatggtgtaggagacaatggccgaatgctatgacaagaaaaatggttatggccgggcctagaaggggcattagctatggaaactaggtattaaaagaccaggagggccacgctggccatcaagggatgttttctttaattntttgtgctccgtcctttagtctttttacagcatgttgtactaagccagactggttacaa

SEQ ID NO: 88276 - DNA, 630 bp, Homo sapiens
ccggaattcccgggtcgaggaatgggagcaaggtccgctaccggagggccgcatcccacgaggagtctgagtctgaggtagggcctccctgactctccaagggcccaagccgtcgtatcgctggcccaagggggtctctggtctcatgtctgtgtatgttcttcccttgagtgcagagtcacagtgcaagccagagggcaggagaagaggctgagccagagatgagcgaggggcagacagctctgtccagccaggacccattcccactgtcccttgggcctgcctagggcaggagggcagagcagatgggagtggcttgcctgcgacagttcctctgtcagtggagatgacagacaggagagggaagtgctgccttgtttggtgagctggcaaggaccgtcatgggcctaatggttgatcttcaagcattaggatatttgaatctctgcccaacactaaagagcaagggaagtgttggctcagacagctggaaacttctaaaatataggggtagccagaccttgcaggaggaacctcatcccccccttattttctggtcttctgagttcaagggtttggacctcagggaagaacggtggccatgaatagcagccctgaggccaggatatg

SEQ ID NO: 88277 - DNA, 906 bp, Homo sapiens
  misc_feature (1)...(906): n = a,t,c or g
cagcggggtggacaagtggcgtgtgtgctgcgaccccgagggaagatgaacgggacgcggaactggtgtaccctggtggacgtgcacccagaggaccaggcggcggcgggcaggaagacctatgccatggtgtccagccactcagctggtcattctctggcttcagaactggtggagtcccatgatggacatgaggagatcattaaggtgtacttgaaggggaggtctggagacaagatgattcacgagaagaatattaaccagctgaagagtgaggtccagtacatccaggaggccaggaactgcctacagaagctccgggaggatataagtagcaagcttgacaggaacctaggagattctctccatcgacaggagatacaggtggtgctagaaaagccaaatggctttagtcagagtcccacagccctgtacagcagcccacctgaggtggacacctgtataaatgaggatgttgagagcttgaggaagacggtgcaggacttgctggccaagcttcaggaggccaagcggcaacaccagtcagactgtgtggcttttgaggtcacactcagccggtaccagagggaagcagaacaaagtaatgtggcccttcacagagaggaggacagagtggagcagaaagaggcagaagtcggagagctgcagaggcgcttgctagggatggagacggagcatcaggccttactggcgaaagtgagggaaggggaggtggcccctanaggaaacttcggagcaacaatgctgactgcccagcagaacgagaaaaggctgctacccttggaaaaggaaagggcggtttgcgcgaaaaaaacccccaccttgggtgaaaggctcatgaacccgccaccggaaggtcccgcaaatgaatttaccacttccgcc

SEQ ID NO: 88278 - DNA, 620 bp, Homo sapiens
cttctggaaaacgttctgtcacctcagcagccatcacggttttgctctttgcacagcacctctgtgtgtccctccagggagagcttacagaccagaacgagctggagtgcacaccatccttgcctacacttgcaaacaggcggggctgcttatacccaagcacaactttgtagcagcaatatcacctcagacatttggagtgtggatccctcctctgtggggagcagcccccaacgaactggagctcatgagcaaaatcctgcagacagtgaactttatcattctccaagccttgattattcaccttcccactaccaggttgtccaagaaggtcatttgcaatttttaaggtgcatctctccacattcagattctacgttgacgcctctgcagtccatttcagcaactctctcatcttctgtctgctcctcttcggaaacatctttgcacctagttctcccaagcagatcagaggagggcagcttcagtcagggaactgtgagttccttcagtctggaaaacttaccaggatcttggaaccaggaaggaatggcatcagcttctacaaaacctttggagaaccttccactggaagttgtcacaagcacagcagaagtgat

SEQ ID NO: 88279 - DNA, 432 bp, Homo sapiens
gaggggatgtcgccaggggaagccgggtgctggggacttgtgacaggcagggacccacagtttcgcttggggaagccgggtgctggggacttgtgacaggcagggacccacagactcgccaggggaagccgggtgctggggacttgtgacaggcagactcgcccgtccaggcggctgggcctccttgccatggggcctgggaaggcccggatggtgctacctgtgctgtggccccacgtgaagccttgttgctgtggttaaagacgctgggccctgctctcgaggccaccttggagggtcactgacccttggccctcactctccccatcccagagggtgcctgtgtgagtagaaggggctgcgctgtgtggcgcggtaaggccggctcagggcagacagggagggtgggcggccccgggggggctgcctctg

SEQ ID NO: 88280 - DNA, 431 bp, Homo sapiens
ccgggtcgacccacgcgtccgcctctcctaactctccttgcccacgtctcccctgaacctgctggccccagctgcgattcacttgctcaaccgggtgcgtcaggagtttgagttcaacatgacagccacccaccacttctctgtggatctcaatgcctctcggagcctgtcccaggtagccatggacctccacgaggctgtcagcatgaagctgcaccgtgtccgagaggccctggctctgatgggcttcaccacgcctctgctgcttgtgcttctctacctccaagccctattttaccggtattgttacctgaactgggaccattatgacaatatctacatcactagccgattcctgcgcatggaggctgtgcgctccacggcagggctgcccacagtgctaccgctcagtgctcacgaggccaggcgct

SEQ ID NO: 88281 - DNA, 1589 bp, Homo sapiens
cggacgcgtggggaaaccgctgtgctgtgggcgcagcgccgagattgattcaccttcacctgtgctgcactccagctgacccaagtaggaagccagacgagctgtaaaacatgaacggaagagtggattatttggtcactgaggaagagatcaatcttaccagagggccctcagggctgggcttcaacatcgtcggtgggacagatcagcagtatgtctccaacgacagtggcatctacgtcagccgcatcaaagaaaatggggctgcggccctggatgggcggctccaggagggtgataagatcctttcggtaaatggccaagacctaaagaacctgctgcaccaggatgctgtagacctctttcgtaatgcaggctatgctgtgtctctgagagtgcagcacaggttacaggtgcagaatggacctataggacatcgaggtgaaggggacccaagtggtattcccatatttatggtgctggtgccagtgtttgccctcaccatggtagcagcctgggctttcatgagataccggcaacaactttgaaaaacttgctctctttcaatactcccaatgaagatacatttcactcaccctccacccctgctattctgccatgtctttccctctctctgcatagccagatttgaagtgactgatacccaccccaaaccttgctgttcacagtctccaattcttcatattctaatgggaaagtaaaggtattgtttgaaggaaaactgaagaaaagacttggcttagaacaaatgaggagttatatattttactaggacttttgatagaaattcagctacaacccaaagagagaaagattgagtcttcctgtcaccataggcaataccttttttcttagctggcatgccataaaggccagctatgtgatattagaggaagaaaggatttttctttttaatgatcttccttgggaaattattgtggcctttatttaatttctaactacgtacctgggtgcctatatcgacaaagagtgagaagagcatttttacttttttaaaaaagcaaatacatatatacacatacgtatgcaaatattatagtataatagtgatccctatggagaattaaaggtgagaaagctactttgtggtgatctaggtttctgataaaagggatgatcttaactgaagaatttaaagagatacttaaacagagcaaatgtagtaggaacaagggagtgagccttataagaggacgttcagtctcatttattaaaataataactgagactgggagaggtggctcatgcctgtaaatcccagcactttggtagcctgaggtgggagattgcttgagtccaggagaccagcctgggcaacatggcggggcctcatctctatttaaaaaaaaaatagaaaaaaatgtaataactgaagcaactaattaaaaatcttagaagaacaatatttattcttataacagccaactatggggagttattataaggtaaattgccataatccagcgctgctcacatctaaaaaactttgaggggtaaaggtaaatcgtaccaatctctgggctgccctagtgacttttttgatacct

SEQ ID NO: 88282 - DNA, 467 bp, Homo sapiens; identical to SEQ ID NO: 65091

SEQ ID NO: 88283 - DNA, 618 bp, Homo sapiens
cttagaaatataatgcgctaagctcattttaaaaggacttgtattcagaatattttatgtattttgtatgcaaaaacttttaagccaataagttacacctgctttcttatcatttgatcaatgtatctgcttattactgtccttcagttccaaacttactctgattgcctatgttatttctctatttttacctactgtctgatttttcttaatggaaatgctcaccatatgcttacagtctttggtgggtagacaaagggaagagagaaaacttagaaaccaaaagataaagaaaagaacttcagtgtggacatagtcatgggcacatcaggacactggcacctcactgagcagggctcaggtgtcatacaggtcctttgaacttatctctttggacacaaggcagaccaaattcttatccactgataccaccctatcatgttggccaaagaatcaggcggccacgtgtgtttctgggccagactgacccatccataaaaatattttgagacaatgaaggaaatattttactgaattgttttgggctatttatttcatcctatttcccccaaatgtagattttcctggcctaacacactgaggatttgttcagattct

SEQ ID NO: 88284 - DNA, 672 bp, Homo sapiens
ttttttttttttacttgtcacaagcaaggagagcgctgggaatactctccaaagcggtgtctctgaaggaaagtgacaggagggttttatggggtgatggagaggggagaagagtgcattggtgcatgtaggaaaggggtcccagtggcgcagccgcagtgagtcgtcctgccagcacacaggtcacatgttacggtcatgaagctatagctccccctggggtagtgacttcaggatggtaatgaggaaagttcacttgggttcatctagaagttgccggggtctgtcaggagctggttccaggtgactaggtcaccacattccacacgaaacaagggaagaaacaggcagcaaggcaggaagctttccttcctggctgcaggtgcctcttgggattcagttgcattcatcttcctcctagtcttccatcctatttgtggtcacacctccagcctctttcaagtccacccagagagctttttctttccgtgtgttggaacgcagtgttgacaacttcctggccttccagtataagcagaggagggagatgagcagaaggaggagcaggacgaagggacagatgaacaggaaatagagtaaaggggccgaggagcagatcctggaaggaagcgtgggctcttgctgcagacacagttcttctcttccatcccg

SEQ ID NO: 88285 - DNA, 648 bp, Homo sapiens
aagtattttgaattgttttaatgcaccaaactcaaaagcaaaacatcattcaaaccaacaggctattagagcaccacccttaagtgctgctttgtctctctgcttattactctctcaaaagcaataaaacagaaatcatatcaccaaatttgaatgttaatatatttccaaaataatctggacagcaaacagagtcttgaaatgccatctcaaacattctttagaaaattgttaggagggcaaaaagtccataaagtatggcacaagggtaggcaacaagaagctgctgtccttccatgtgcaaggctgcaatgaagatcttggaagctgagagactacaccagccaatgatgaccagggatgacatgattccaaagatgccctgcagtgaaaagaacatggcgcaaccagacaggatgaccatggggagcaggcagtaacccagcacgctggccacacagccgtacgacacccctgaagagctcatcaggttcagcaaggcatgaatcacaaggcagccaatggcactcatgccatacacataaccaaactgaacttttcctgccagaagcaaggtggctcccagggctacgcaaaaaagaatgggtccagtgaggtccgtttcattcataatgctgccatctacct

SEQ ID NO: 88286 - DNA, 613 bp, Homo sapiens
tgaatatatatgtttgtctctctacaatgctgtttggagtttccatcaggttaagtgaatgttctgggcaccttacctgtcctctggcttcctcacaccttggctcctgtctgtgcttccagcatagtgagtttgaaaagcaagtctttatgtggatgtaaacagaagcttacatgagaggagcagaaaaggatgctctgcctgaagtttccccttgatgtggatcctatgtaagaccctggaaagggaaggaggcccttaccttaacccctgggttcgagtctggaggataaggcttggactgttctgtgcctctctcgtttcttatcctctgctggaaactctttctaattgtgaagaacaacggttgtctcttccctgcagaagacaaatctgtctgataaattctctttcttatttaccccgggagttatcgtggggcccacaaatattgcttggtgcaaaaaatgctatgaaataacatttgtggacaggatagcacatcgatagaactgcagaacttagcggaaaatggccgaagaaaagaagggggcacgggtgccttgtgtgttgccacaggtgggttggcctgtctggcaaggacttttagaga

SEQ ID NO: 88287 - DNA, 414 bp, Homo sapiens
aacgatttgcacatgttccctggaataatataccctagtataatattaaaaaaaaatcggtttaagagaggatgcttccttttttttaatttttttctgtatttcaaaaggatgcatagtctgaattcctgaagtaccacttacggattattctcctaattatgttatttcagggacattaacatgtttaattctgaattgtaaatttccgttattgtaactaggactttcatttctttccccagccatatcctgcaaatgagagctctaaacttgtgtctgagacggtgcatgactattagcatgcagcagagtacatgaagaacagtcaggcacggttacctttggcaagtgttaatttatgaaagtattttatagagaatgagacaaagaacatgcttatatggagacata

SEQ ID NO: 88288 - DNA, 433 bp, Homo sapiens
tgaactggccttcagtcctgccacaggcgtgatggggccccccagcatgtcttgagccggggaggcccgagaaccagctctggacgtgagtaccaagccccatgcggtggagtgcgtgggagccatggctataggtggtgtgtctgttccacgtgcgttctggaagggaagacagtgacccctcagagagccggtcagataaggtcaactaaatgcagcttttgttcatgaattagatacctggagtagctgcgggtgggatgcgatgtaccacatttgtgttcatgaggggcctggatgccgtacgggcggacgcagagtctcagaggagactgcactggaagctgacagcacggtccttagagtcaaatttcgtctgtccatttgctcagtagccctgggtcttgactcacaggtggaatgggagtgcaaa

SEQ ID NO: 88289 - DNA, 412 bp, Homo sapiens
acacctggactagccgggttgtatttggaaacttttagtttgtttttccgtgctgtgtaggggctaacggtggactcccacaaggacgttcaacctccacagcagcatccaatgatatatatctgtggagagtgtcacacagattatgtaataaaacctagggatccaatcagatgcatagaatgtggatacagaataatgtactagaaaaggactaaaagatgtattcttttaacgatgctttctaaatatgagctaggaggaaatgaataatgctggggttgataaagattaatttctggttaaaatgacaactttatggattacagtacttaaaaaacaaacatgattagcattttcatggaccaatgcataggctctaaataatctaaataatgctagctgattgtgg

SEQ ID NO: 88290 - DNA, 624 bp, Homo sapiens
cctacctcagtgtcaactgttgctcgcaagttcctgctgctgaaattgcaaatcctacttttagttggttgcttttaatatgctattgcctagaaaactagacatgggggcttatttaaatttaatataaaataataaatttgtcacgaattatatagaataaagagataattttatagcaaagaggagacctaggcagcttttcctagctgattatgggcctcttctttttaatattgaagctcttaaatttttatcctagcctcttttgcaggcagttagctgtaagaagtttattgagcttcatgggacaacacttttcttgtaaaattaagggcttgagctagatgatcattaagggctgtactgatttcctttattttcccgtattctaatgatgatttattgctaatccatttgtcttctgatttctcattagaatagacctgttttactgatgcataataaggcacttgcattttagaagattgtaggtttttgaaaacattctcatttccactctttatcttgtttgggtaaatagaccccaaatttgattctaaatcacaggaacaaaggtcttttagaatacctaacccatggatgattatggacatctattca

SEQ ID NO: 88291 - DNA, 370 bp, Homo sapiens
gctgattcattcaccttccatgcagatatatgcacactttctgacaaggagagactaatcgtgaaacaagctgcacttgttgagcttgcgaaacacaagcccatggcatcaaaagaacaactgaaagctgttatggaggattgtccaactctttgatagaaaagctgcccggctgacgatgatgagacctgctttgccgacgagggtaaaaaacttgttgctgcaagtccagctggcttaagcttataacatcgcatttaaaagcgtctcagcctaccatgacaatattataaagaaaatgaagagcacacgcttattcatctgtttctctttttcgttggtgtaaagccagcaccctgtctaaaaaact

SEQ ID NO: 88292 - DNA, 597 bp, Homo sapiens
ttctcttggctgttataaatattgcggcaatgaataaccttgtgggtatattgttttttatttgtgcagatacagctttaagatagatgtggggtgaaaggtaaacacatttgtagttttgttagtgtcaaaatgttacattttctttttaaaactttttaattttttgtagagatgaggtctcacagtgttgctcaggagttcaagaacagcctgaccaacgtggtgaaaccccatctctgctaaaaatacaaaaattagcctggcgtggtggcgcgtgcctgtaatcccagctactcgggaggctgaggcaggagaatcacttgaacctgggaggcagagactgcagtgagctgagattgcgccactgcactccaacctgggtgacagagggagactccgtctctggatgtaacattctggactggaaggggccttgtttttgaaccttttttcgctgtttacaacaagactattttttggcttcccagggccccgggttattgtgtgaaaacggggggggaacaaaattttttttaaggaacataaacccctttttcaaagggcaccccgctccttatgggggggaaaatttgc

SEQ ID NO: 88293 - DNA, 319 bp, Homo sapiens; identical to SEQ ID NO: 67018

SEQ ID NO: 88294 - DNA, 616 bp, Homo sapiens
  misc_feature (1)...(616): n = a,t,c or g
gaacaaatgctatataccaggatctatataatcatagcccatgaggttaattttccctgtttttgtcacttttggtaaaaggagttttcatagaagtttttaaaattgctgcttatcagaccttttaaagcattatgaagggctcattcattgtcacccctcctttttaaaaatctgttttactttctacctctaaactgtcagactctggaagcggcttaatctgattaaaaattgctgagaacagcacttctcaactctgatatccagataacacatcacactgcagtcagtgggagagaagcagtagtgagaaggagggtatcggagcaaggatccaggaagtgcccacaacctgccatctgccctgtcctgaccacccatgaacagcacatgcccacccatggagggggngngnnagnnacnatgcnacccccgccctgactcccgcaaaaaaggggtctaaccattagagagaaggctgctttttcctcaactgcatgggggcgcgactaccaacatcgccccgcttccgattacccttgaggccaaacccactcccttcgaccacatgcgcccctcctcccccacagttgggggggtcaaccccctcacc

SEQ ID NO: 88295 - DNA, 344 bp, Homo sapiens
gggaattgtttgcatggggcaagctttttacttatttacatcttccgtaagagttttgaagggaaaagatgctgactctgctgattaagattaaactggatattatacatggaatacatttccagttggcatcctacgacctgggacattactttctattaaacattattaatgttactctgaaacttctttggatataataacccaattcactttctcctagttgactaagtcacttctgctatacttcttatagataagcccgcagtacttcctatagataatcctatatgacacaagaagccttagagatcttattagattctaagaacgtattatggagc

SEQ ID NO: 88296 - DNA, 386 bp, Homo sapiens
gaatgggctccaacccagccagggccctgcagcaaatgaggtctaaactaaatcataatgcagcgtttatgcagatacccatgggtttggaggggaattttaaaggtattatagatcttattgaggaacgagccatctattttgatggagactttgggtaagtgctaaaaatacattattaaaattttaaattttaaaaagcattaaaaagaaggaaaggataagttcatcaaacgcagagtaactatctttttgaaatgcgactgcaagaatactctgagatggttttgttttaatacctttaatcctagtcgctccccattttatttagtatttattctgtgagagactatgttactttttgggtaatatacccatatcacatg

SEQ ID NO: 88297 - DNA, 769 bp, Homo sapiens
ttttttttttttcattgttcccaatgcctcctgccctcctgcatttattttttacacactcatcctttgccatgtggctttgcagctcctcgtgctagaggagaactgcctttccccatctgatgctggacatggccatatgggttgctttggtggatggaatgtggacagagcagcaggtttctgatctggatgagacttcaagaagcaccacaatctcaactcatgcttgttctcctctgtgaaaacaaagggatgttgctctccttcaaatgcagccccaagtatgcatgctgctatctgccttctctgtcattgataaattacacaagcagcgcttatcagatgaagcacctacttatgtcgaatgaatggcagcttcctggagtgaatggtgtctgtgcctggagcaggatttgcttggcctcctgagttgtcttcttcagcatcccccaggtaatgtccagggcctgtgtcatccaaggaagccacatcatccgggattgtgggtcctgtagggtcattttcttcattttggtaccgggttgggtcctagccatgccatggtatggtttgatgcctcgtgctggaatccaaagaggacctgacggggtgtgaacacaagcatatcctctttcccacattagcaaatcatttggaccacaccatatattactatttacatccttccataaaactgaaggttttatatcttgagtgatttttgcaaagcgcttttctatacctaattgaaatttatcatctaaat

SEQ ID NO: 88298 - DNA, 729 bp, Homo sapiens
gagtcatctgaagatagtgacaaaccacttcataccctttttggagacaaattatgcacaggggccacgcttcgtgaaacctacggtgaaacggcggactgctgggcgaaactagaacctgaaacatatgaaggcttcttgctgcacacagatgaccacccaggccttcccccattggtgagaccataggctgatgtgatgtgcactgcttttcatgacaatgaagagacatttttgaaaaaatacttatatgaaattgccagaagacatccttacttttatgccccggaactccttttctttgctaaaaggtataaagctgcttttacagaatgttgccaagctgctgataaagctgcctgcctgttgccaaagctcgatgaacttcgggatgaagggaaggcttcgtctgccaaacagagactcaagtgtgccagtctccaaaaatttggagaaagagctttcaaagcatgggcagtagctcgcctgagccagagatttcccaaagctgagtttgcagaagtttccaagttagtgacagatcttaccaaagtccacacggaatgctgccatggagatctgcttgaatgtgctgatgacagggcggaccttgccaagtatatctgtgaaaatcaagattcgatctccagtaaactgaaggaatgctgtgaaaaacctctgttggaaaaatcccactgcattgccgaagtggaaaatgatgagatgcct

SEQ ID NO: 88299 - DNA, 392 bp, Homo sapiens
tgcgtgacctccaaagtacaggcagacatccatgacgcccaggcagcagctgcagatgagcatcgaactggctccacacaaagtcctcggacacaacctcgagatgaagactacgaaggggctccatggaattgtgatagctgcacctttcttaaccacccagcactaaatcgctgtgagcagtgcgagatgccacggtacacctgaattcagaaaagtctgcgccaggttgaaagtgaaactttgagcactaccagaagaaaaggaaacctcgggactctattcatccacccagccttttcattttcgattgcacagcggggaggaggaatggctttgtggtcgtcgttgtgctcacgaaaggaaaaatggggaggtcttttttttctcct

SEQ ID NO: 88300 - DNA, 2626 bp, Homo sapiens
gaattcctcgacactgttggcctactggatttatttgaaaggaatgaggatcctgcactcttcctccctcagtaagtaaatgccagtccctaggaagagagaaccaaaatgtctaccggaccagatgtcaaggctacagtgggggacatttccagtgatggcaatttaaacgtggctcaagaggaatgctccaggaaaggtttttgttcagtccgacatgggctggccctcatcttgcagctctgtaatttttcaatttacacccaacaaatgaacttgagcattgccattccagctatggtgaacaacacagccccacctagccagcccaatgcctccacagaacggccctccactgactcccagggctactggaatgaaactctaaaagaatttaaagcaatggcccctgcatatgactggagtcctgaaatccagggaatcatcctcagctccctcaactatggctcattcttggctccaatccccagtggctatgtggctggaatatttggagccaagtatgtggttggtgctggcttgtttatttcctcattcctgaccctcttcattccactggcagctaatgcgggagtggccttgctcattgtcctccggattgtacaaggcatagcccaggttatggtattaactggtcagtattcaatttgggtcaaatgggctcccccactggaaaggagtcaactcaccaccattgctggatcagggtcaatgctggggtccttcattgttctacttgctggtggtctcctctgccagaccataggatggccttacgtcttctatatctttggaggaattggctgtgcttgttgtcctctctggtttcctctcatttatgatgatcctgtgaatcatccctttatcagtgctggtgagaagagatacattgtgtgttcattggctcagcaggactgttcaccaggctggtctcttcccattagggctatgatcaaatccttaccactctgggccattttagtctcttatttctgtgaatactggcttttttataccattatggcgtacacaccaacgtacatcagctcggtacttcaagccaacctcagagatagtgggatcctgtctgccttgccgtttgttgttggatgtatctgcattatccttggaggtctactggcagactttcttctctccagaaaaatcctcagactcatcaccatcaggaaactcttcactgccattggggttctcttcccatccgtgatcctcgtgtccctgccctgggtcagatccagccacagcatgaccatgaccttcttggtgctgtcttctgccatcagcagcttctgtgaatcaggagcccttgttaacttcttggatattgctcctcggtacactggctttctcaaaggactattgcaagtctttgcacacatagctggagccatctctcctactgctgctggatttttcatcagtcaggattcagagtttggttggagaaatgtcttcttgctttcagctgctgttaacatatcgggcctggttttctacctcatctttggccgagcagatgtgcaggactgggctaaggagcagacattcacccacctctgagcaaaccgagagatgtgctagatcctggtgcttagttcatcattgttttccctcacagacatttctctttcatgcctgcttgactgataagccattagctagaccctgactatgtaacgctaaagattttaccatgcctggaaattttacaggggaagaaaacacgctagttatttaactgcaagctactaaaagcataggtgtgttgagatttctgtgttctccactcttccactgttatcctagtaaaagcatcaggggctggggacaatttctttccaaagcaaaagaggaagccagaccttgggaccgagaactgagaatcacaagggagttgcgcccaacatgcagaacatgaatcctctgagctgtcctcaaaagaaagccccaaacaacagaaagcatagtgttttccattgttggtgaaaaatgtcaaggaggaaagaacaataatgattccatcatgataagaggaatgaacgtgtctgcaactaatgggagcaagatagtacactttaactctttcagacaacttgcattctgtggatgccagctttggaatcagagccgcctctggaatacctgtgcttccagagttagcttttggacagttaccttctttctggccatcttgacttctgccccacatctgctttttggctttgtgcagatctttaacatgttagtgaacagacattgcccagtgtctcttctagcccctccaacagttcttcatgtagcactgcttttggacagtgacccatgatatctgccttcgtttgcccctctgactgttggaatcccacgcaccattcagtaggattcaattcaatgtggaaccattcaacattcacctcattaacctaaaatgtctcccaaagatgtatgtaagacacacactgccctaacctcacttcaaatgtctggagaaatgtgtgtagtgcttttgttaaagcccctatatgggcagcatggaggatcataagatagcaaaaccatttcaacactaaatgaatattaatgt

SEQ ID NO: 88301 - DNA, 357 bp, Homo sapiens
ggttttctgcagtcaactgaaaataatttctctcaaattgaaaggattacttatcttgtcatactattgaacacaaaattaagtgagcctttaaagaaagctactgtgtgaacctcatcaaccatctcatgattatctttaatagagtccagaggaagtatttatggcaatccggaatcctctggagtggcactgcaagcaaatggatcattttgttggactcaatttcaactctaactttaactttgcattggttggacaccttttaaaaggtaaaaaagccttatttagaatatttttatgaagtagtattaagaaaccagaagtaatttgaataagtgattacttgaaataaat

SEQ ID NO: 88302 - DNA, 367 bp, Homo sapiens
gggccatcctacgaaatgcccgagggagcacccataccccactggatgaagaacgggaacctatgatgcatagattccgtcattttaaggaggttttaaacagtataacagaactctgacaaattgagcccactgtattccttcgaccttttttggaagcgattcgctctgatgataccactgggcctatcacttaactggtactcaactatgttaacaaggtcctgccctatgcactcataagttacagatcaggctttgttgcatgaccacagcacttcatttcccacctttcctggggtgcccaggccttatgcaatgagctgctgatagggggaaattttttacaaccaactattttcttgga

SEQ ID NO: 88303 - DNA, 1703 bp, Homo sapiens; identical to SEQ ID NO: 88044

SEQ ID NO: 88304 - DNA, 385 bp, Homo sapiens
ggcacttctgccacctgaccccagcacttgtcccttgagccctggttggtctcggcacagacagccctacctgcctggccttggcctcggcctcgaccccacccagccccagggctcgcccgtggggggatcctgatggctgctgttctcacagggaccgacactcgcattcctccagcttccactcggctgatgtccctgaggctacaggcggcctgaacctgctgcagccgaggcctgtggttctgcagggcatgcaggtgcgccgggtgcccctggagatcccggaggagcagacactgatggaagaagcgccaccccgggcccagcatagttacaagtactggcttctccctggccgctggacctctgtgcgctatgagcg

SEQ ID NO: 88305 - DNA, 389 bp, Homo sapiens
  misc_feature (1)...(389): n = a,t,c or g
cactgtgacaccgccatcacaggaggttgaccggaagactgcgctctggcctcttatcctagcagccttcattcatcccagcatatgttaggctatacggccatccaacaaaaagaaaaagtatgggctctgaccagacagatcttacactctgcctgcctctcagaggtaacccagagcacagagaggttaagcgatttgcttaaagccacacagcaacttttcctccccttccattctgccacaggttaagttcctgatgaaaagctactccttcctgagagaggctgtgcctgggacccttcgtgccagacgaggcatcttcatgctgctgctcatcttctttgccttcctccattgctggctcaacgcctttgccgagatgctan

SEQ ID NO: 88306 - DNA, 353 bp, Homo sapiens
aatgctgttggatttcctaaagaagtgtgtttttgttcaaggtattttgatcacaactatagcctccaagggagaattgcagaattggcctgacctcttaccaaaactctgtagcctgttggattctgaagattataatacctgtgaggtaaggatatttgtttcatacataattgggtgttttctgtttttcttgtcatgttgtgtattagcagcttttgggaaaaatagttcctctgaaacatacagcttctcaaaacttagaaacctaaagttacctttgtgttatattacatttgtaaatcatttatttttctataaaaactgttacattataaacctcttttactgtt

SEQ ID NO: 88307 - DNA, 394 bp, Homo sapiens
accatactggagaatccaaggatggagagccaagcccacgatcagctgcccacaccatgcccaggaggaagaaaggctactgcgagtgctgtcaggaggccttcgaggagctccatgtgcatcttcagagtgcccagtaccggagctttgccctggaagcccatctatatgcagaagtggacaggatcattgctcagctcagccacagctttgcagacatccctttccaggctggcctccccaggtgagtgccacgctggcaggcacaactgtgtctgctctctcctctgttgccctctgggtgggaagagaccctcaggttggtggctgctgggaccagactgtgatgttttcctcttttctcaccttcctttccccttatcctcagtcctgt

SEQ ID NO: 88308 - DNA, 89 bp, Homo sapiens
ctggggccttcgctcttactattagaccagcgagatgaaagtcctgaagtttgcctgcaaggtactacaaaaggatcctaaggaatggg

SEQ ID NO: 88309 - DNA, 88 bp, Homo sapiens
gaccaatctgtagctcaaggtcctgaagatatgctttaatgactacaggacacccactatgcttgaatgtgaggtcatgggcaatgag

SEQ ID NO: 88310 - DNA, 393 bp, Homo sapiens
tggacttgcccatttggaccaaggctattctagaatcatttcgtggagagttagaaacctgatccttctttcccctgtgtataggatcctttattgatatcatctactgttagccaactggtgttccttagataactcagggaggggtctagtgagtgctaactctgggttgtcagctcccctaagacaatgtgttgtctctctagcacaatcctggaggaagagaaggctcaccacgaagagcgcatgaggatggagtccatatgacaggccacagtgtcctgggactccggagggtctgatgaatcaccgcccaagcccagcagaccgggttatcccagtccgaggtccagccgaagattttatcccagcccacagcacatggtacacacg

SEQ ID NO: 88311 - DNA, 692 bp, Homo sapiens
gaagaacataggattggatcttttactccaaagagacttatgccttctccctccagtttgtaatatagaggttgtaccaatgagttgagcaattaggtgcatcttaaaagtagaaatggcacatggactggcttgtaaagctgtgagggtttagtgaagttacacacctggaacgttcagcacagtgtctggctcatggtgggggtgctgccaaaggacaccattgttgttttattgtgatgcatctctccagcagcccctaagcatacagaagcagataagtccttctcgcatatgggcagactggagctcagagagggaaagggactctcccaaggtcacacagcaaaggaggagctaggcttgccttcatgactccaaaataaggacagtttctcctctgccaccctgtggcccccgccgggccgctgggcctactggtctttgtatctgaggattgaggctgtgtgggctgcttcaagtcccccagcttgttgactgcttggtgttcaccagcccggctggcacccaggaagcaaacaaggctggaaatgtcacggggtgtagcctgggggagttgtgctctggctttgcccagcagcactgggaggactgccagggatttggagcctgcgaggaaggaccttgccaaagatgatccctgtaagtggaactggactggcggccaacca

SEQ ID NO: 88312 - DNA, 696 bp, Homo sapiens; identical to SEQ ID NO: 67889

SEQ ID NO: 88313 - DNA, 4323 bp, Homo sapiens; identical to SEQ ID NO: 59334

SEQ ID NO: 88314 - DNA, 413 bp, Homo sapiens
agagaacccaccatggtgctggatcctgccgacaagaccaacgtgaaaggcgcctggggtaacggcggagcgcacgctggcgagtatggagcggaggccctggaaaggatgttcctgtccttcctaatcaccaaaatctaatttccgcacttggacctgagccacggatgtgcccaggataaaggccaccgaaagaatgaggccgacgcgctgaccaacgccctagctcacgtggacgatatgcccaacgcgctgtccgccctgagcgaactgtacgcgcacaagcttcgggtggacccggccaacttcatgcttgtaagccactgtctgctggtgactctgggcggacatctcccctgcgaggtcagccctgctgtgcacgcctccctggacaaggacctggcttctgagag

SEQ ID NO: 88315 - DNA, 507 bp, Homo sapiens
gcaggctccttaacctttctcagcctcagcattccacatcttcaggtgctctatcttcccctgctggctcaggaagtccctgttggcagcgtcggggcgcaaaggagactggtcaggggggtgcgtgaagtcctgggtgaccttctcagagagcttgcagatgacctgctgcttggcgtggttcttgtccataagcagctgcacgtgctgctgtagctcctgcacctgctgctcccgcaggctcgctgtgtgcgccaggctctcccgctcctgctccagggcctccacccgccggcccagctccgcgatctgccgcactttgtgccgcaccagctccagccggtccttgtcctcagccgccgccaggtatgcgctggacgcccgcttctcctgctgggcggcctccagtgccttgtgcaggatcttcactaagctccttctgaagactttaactccttggtgagcatcagaacctgttgctccaaggctgccactttctcctgggca

SEQ ID NO: 88316 - DNA, 348 bp, Homo sapiens
  misc_feature (1)...(348): n = a,t,c or g
tgacagtagagtaaaagctggaaacccctttggagagtgagtatgaatcatccatctcacactaaatacacgcatgtggactcatctcagtgaattgagggcttaaagttaaacatatgggattggagttgtgtgtccatagggtttcactgcctatttgatttgagtttatccctattaattttttacagtgaaattttattaaagtataatgtacatatattttcagtggattttgctctgaaggttctccagtggtctgactacgagatagtgcggcttcagctgtgggatattgcaggtaaagtgggagggctagataggaacaagggaagaaattttgatttn

SEQ ID NO: 88317 - DNA, 365 bp, Homo sapiens
  misc_feature (1)...(365): n = a,t,c or g
tagattgcatcctgattactttgtcgtgctgctgctgagacttgccaagacatatgacaccactctagagaagtgctgtgccgctgcagatcctcatgaatgctatgccaaagtgttcgaggaatttaaacctcttgtggaacagcctcagaatttaatcaaacacaattgtgagctttttgagcagcttggagagaacaaattccacaaagcgctattaattcgttacaccaagaaagcaccccaagtggcaacttcaactcttgtcgaggtcccatgaaacctatgacctacggcccccctatgttggatacatcctgaaacaaaaagaaagccctgtgcacgaaactatttattcgcgggcn

SEQ ID NO: 88318 - DNA, 400 bp, Homo sapiens
  misc_feature (1)...(400): n = a,t,c or g
gggacggtagctttattcggtcctgagctgtgctaacacctcgcccaggaaaacgatgcagttggacaggccccttcttcacggtatccatgtgcgaccgaaaggccgggatcaaaaatgctgacatgtctcaagagatgcaacaggactttttggtgtgcgctactcaggcgctggagaaatactacatacagaaggaccttgcgggtcatataaagaaggattttgaccagaagtacaattctacctggcattgcatcgtggggaggaacttcggcagttatgggacacatgaaaccaaacacttcatctacttctacctgggccaagagggcaatcttctgttcacatcttgattacagcatggactgtgctccacacccagtgatccatccaaaan

SEQ ID NO: 88319 - DNA, 370 bp, Homo sapiens
ggttttgtcaggtcgacccacgcgtccgctcagaggtgaaattggtaaccctggcatatattgtgctcgcggtgctcctggagctgtaggtgcccctggtcctgctggagccacaggtgaccggggcgaagctggggctgctggacctgctggacctgctggtcttcggggaagccctggtgaacgtggtgaggtcggtcctgctggccccaatggatttgctggtcctgctggagctgctggtcaacctggtgctaaaggagaaagaggagccatagggcctaagggtgaaaacggagttgttggtcccacaggccccgttggagctgctggcccagctggtccaaatggaccccccggtcctgctgga

SEQ ID NO: 88320 - DNA, 1180 bp, Homo sapiens
ttttttttttttaagggagtagtaaagctgtctttgccgaatctcccttccccgccccctccgccgttggcccgggtacccccctgcaggcggccagactcagcacgacttcagcacctgttgcaggtggaggcgcacatctgcagccgtttcccagggcaccacgctggcgcggaacgagctgggctcggccttctgggcctcctgaatgaggcggtgcatggggtagccgcggcgcgggaaggccacgtcgccgcccgccagcagccccatggggcagaagtcgttggcgccgtcgcccacgtagaagaggcgctcgaagtgcacgccgtcgtgggcccgctcgcgcaggtagtcgctgagcaccttgtgcttgcacatgttggcggggcagcgcgcgcagctgtgtgtgtggaacggccgcagagccagcagtccccgcgcatccggccccgacgggttgctgaggatgcggcggaacaggctgtggtggccggcggcgcgcagcgagctctccacgccaaaggtgttggcatcggagatgagaatcacctcgaagcaggcgccctgttttgccacaaactgcagcaggtcgctcatgcctggcgacaaagggatggcttcgtagatggcgctcaggtcccgcggccgcacgccctgctcgcccaggtacttgaagacgcgctgcatgtactcgttgtagaagccctcgcggtaggtggctcgcaggctctccgggagccgctggcccggcgcggcgcgcacgatcgaatcgtcgctgttttcgtccacgatagtctcgtcgaagtcgaaggtcaggaggaagcgcggcgcgccctgcgcggccatcctgccgtccctagataggcagcggaggccagaaactggaaaacagccactcattgtcggtgcattaccgtgagcaccacctgtagggactctgttggcctccagccgtcgtcacacgttcgtgggggcggcggcagcagaggtctgtcccggctgagtttggagtgtaagaagtggggaagggggctagctgaggtattggggcgcaggatggagcaaggggtgcttacgggaattggaggggacgcggtgtcttatccacccccggatttctgggctccggctcacgagtccctccagtcccgagggactgaggatgatgtgcgtctga

SEQ ID NO: 88321 - DNA, 1634 bp, Homo sapiens
ccggagctgccggagtggctgcgggacctgcctcgcgaggtgtgcctctgcaccagtactgtgcccggcctggcctacggcatctgcgcggcgcagaggatccagcaaggcacctggattggacctttccaaggcgtgcttctgcccccagagaaggtgcaggcaggcgccgtgaggaacacgcagcatctctgggagtaaatgtcccttcaacggtaatggaagccatgtgcagacaagacgccctgcagcccttcaacaaaagcagcaaactcgcccctaccacccagcagcgctccgttgttttcccccagactccgtgcagcaggaacttctctcttctggataagtctgggcccattgaatcaggatttaatcaaatcaacgtgaaaaaccagcgagtcctggcaagcccaacttccacaagccagctccactcggagttcagtgactggcatctttggaaatgtgggcagtgctttaagactttcacccagcggatcctcttacagatgcacgtgtgcacgcagaaccccgacagaccctaccaatgcggccactgctcccagtccttttcccagccttcagaactgaagaaccacgtggtcactcactctagtgaccggcctttcaagtgcggctactgtggtcgtgcctttgccggggccaccaccctcaacaaccacatccgaacccacactggagaaaagcccttcaagtgcgagaggtgtgagaggagcttcacgcaggccacccagctgagccgacaccagcggatgcccaatgagtgcaagccaataactgagagcccagaatcaatcgaagtggattaacggattgactggttggaattaaactgcaaggaaagtcatgattaaatgtcacggacacttaagcaaaaccaaagatttcctctgagcaactttcaatcagtcccagaaaaccaaaagcagtaataaaataagtaagatgttaagagatattgatcctggcatggaagtcagaccaggaaagagattatttatttatgacttagggatgagacttatttcagtggacaactaacctgggatggttaacatttccagtcccaccatgtattttgctttgtttctaaaaagctttttaaaaactgttatttaataccaaagggaggaatcgtatgggttcttctgcccaccgttgtgactaagaatgcacagggacttggttctcgttgcacccttttttagtaacatgtttcatggggacccactgtacagcccttcattctgctgtgtcagtttggcctggcctgacactggctgccccagcggggaccacggaagcagagtgagagccttcgctgagtcaatgctaccttcagccccagacgcatcccatttccatgtcttccatgctcactgctcatgcactttttacacggtttcttccaaacagcccggtcttgatgcaggagagtctggaaaaggaagaaaatggtttcagtttcaaaattcaaaggaaaaagttgaggacttattttgtcctgtcaagattgcaagaacatgtaaaatgtacggagcttcataatacgttatattgttccgaagcagctcgttgagaaacatttgttttcaataacattttagctt

SEQ ID NO: 88322 - DNA, 386 bp, Homo sapiens
tgaaaatatagtttatttagggaaattcaaaagaaagggttaacatgaatccagcaaaacaaccttatccatagtgggtaaaaaaaccaaatctgctctcaacctgaccctacttcagagttttctcctagttccttttccctactggtactttcccagtccttgctcctaccctccttgtctaatgaacgtgattgaattaccatttagaatgtccttctcctccaacctcaaccactatggcatgacccatgtagctagtgtcagcgatgtactgttggacaactcattcactccaccttgtcagcggatgggcggaatggtctcttttcggacttttgaagattttgtcaggtaagacattgtggaactatgtctgtacaagg

SEQ ID NO: 88323 - DNA, 714 bp, Homo sapiens
agttaacacatatcctgatactttatgtataaaattatacttgtgtttaattttcagtatcacaggctgccactggaacagatgattcacttctagggggtttaccagcagcaaaccaaaccagccagcttattatacagttatcatctgtcccaatgttaaatgtttgtttcaacaaacttttttccatgcttcaaggccatcatgttcaggtatgacttcaggagaaatggtgtatttttacatattattgttagcctggtaaaagatgaaactaattgggaagttcattctaatcctgtcagggatgatttctttattatattcagttggaaaaatattagaaatactttgattaccaaagtaatcacacgtttctcaatgatggaccattgataattttaatgattttaagcttcagtactttaattcctactacacatacacacagctgtgatttagagacttgaatcacagggcatggtggcttgagtttgtagtcctagctactcaggaggctgaggcaggaagattgcttaaggccaggagttcgagaccagcttgggcaacataacactagatcctgtctctaataaagtaaaaaaaattaaccaggtgcagtagcacatgcctacagtcccagctactcgggaggctgaggcgggaggatggcttgagcccaggagttcaagatatagcagaccttgtctcaaa

SEQ ID NO: 88324 - DNA, 1494 bp, Homo sapiens; identical to SEQ ID NO: 65203
  misc_feature (1)...(1494): n = a,t,c or g

SEQ ID NO: 88325 - DNA, 391 bp, Homo sapiens
  misc_feature (1)...(391): n = a,t,c or g
gtctttttactttctttattattanctcttccctcctcttttttcgtactcttatctgatccttttatttttcttttcccctttttacactatctttccactctttttcattcttttttattatcttgcctctctcatctttattcaccctactctcttctttctttaatctcattctacccatatactccttcctctttcttctcacttttcttccttttttctttcccttttttcattttccctattctattctatttttaaaaagccaactctgtccttctaattggtcacaaccacaaagcgtggaaaatactgactcagttcaaaccactcattttacacttaagaaaaccaaggctgttaaagatggactatcatttgtttaagt

SEQ ID NO: 88326 - DNA, 444 bp, Homo sapiens
cagaattcggcacgagagagagctcttcaatacctgaaagaatactcaccctcttcaacagtcagcaggttacccaattctgctgatgaatgatactggactggctcagagctcttcacatttgccagtggcaggaaggggtcataatccgtggatgacaagtcagccagggtcagtatgtagtgactctgttgggtgtacgtgcttgagccacacacacagcagtgcaaaacctgtgaaaacagaggccatgtgcaccacggatgctactcaccgcgtgtcccctgacaatctgtcaaactactgcagcacttggcagctaggactcctgcttggtcctaactggaaatggaatgaccactcttaaatatcttcttgctattaggcaaatttattttgctcctttcatatcaatgccaagaaatatgttctcaaggcaaaacg

SEQ ID NO: 88327 - DNA, 399 bp, Homo sapiens
taaagataaagcttctgtctccaaaaaggaatgatttctgtacaaagatgttcattgtacatgataagtgaataatatatttctcctacaacatttttttaaagataactgaactgcttaatgatgtggaaagattaaaacaggcactcaacggcctttcccaactcacctacacaagtgggaaccccaccaagaggcagagccagctgattgacactctgcagcaccaagtgaaatctctggagcaacagctggccgtgagtaaccaggcacacggggctttgcaggaatatgtgctggctccctgtagttagtttggaaggctcatttagaaattaaagggatctgtagctatgttcggatcccagaatataattatttttatatgcgaaaagttac

SEQ ID NO: 88328 - DNA, 394 bp, Homo sapiens
gctattttgagggtgtcaggcataggggtgttgggacccagtgctagtttctggagtttcttccaaatcatctggggctgcctgagttaggaaatggtcctttaggaccagttgcccttctggtgtctctgggtctaggttagtatatctcattagggcctcttgtagcctccctaggaaagcagaggaggtttcaagaaggccttgatctattaaggccaatttattgtagttcacaggctttgttctgctagctttcattccttctaccagatagaggaatatgtggttccttgtccacatgccccactaggtattgtaatcccaaaagaggtccacctgagaaactgttgtgccccctacccgcccccacccccagagtaggcaccagggg

SEQ ID NO: 88329 - DNA, 605 bp, Homo sapiens
  misc_feature (1)...(605): n = a,t,c or g
aacaaagaattgaacaaaatgcccaaacaaagcaacaaaagagcggagtaacgaaagcacagatttatggaagtgaaagtacactccagagtcggagtgggcttgagcaagtagctcaagagcccctgactgcagtgctctttagagttttcattaagctaaaagaatttggtaacacccctaggtgccctttagaggcctccagttggttacaccctatgaaggattggcccgtgaccaatcaagaggctgaagtggagacttctgtcttgttatcacaggagtgaggatgtggcctggatgctgcccaatcttgcctagaactggctgcacctgcttgtgccttaacccttggttaccctaaatccctgttatccagactcattgggactgctctagatcttcactatccaatacgggttactgtggcaacgccaacctttgaatccccctcctgcgcgctgagcggctcgtaaccatggagaccgaagcaggtttcccgcgtccgcctcctcacccagagactgcagccccggcgcccagaccctttgggacaagggagatccaaggcggggccccacaatggttcagcgggtnaaagaggt

SEQ ID NO: 88330 - DNA, 366 bp, Homo sapiens
  misc_feature (1)...(366): n = a,t,c or g
ttttttgaggacagatcttacaaaacatctgtggggacctatgattcttaacaaaattaaagaattaagtcggaaccaatttcccacaatgtctcatctaagaaaggactcacaggccatctttccaggagatgacgcagtggacaggagtgggctccctgaccttcaaggaagatttgagctatctgggaaaaacaagacagtatccactggatgcattggaaccccaacccaacattggggatattaaggacattattaaagcaaccgagtctatgctagacccagcacataagtctcatttccaccctgtgaccccaagtttaggattcttgtgtttcatatttgaagggttacaccaggcan

SEQ ID NO: 88331 - DNA, 335 bp, Homo sapiens
ttgagctggaagtacaccttaaaaacccgctaccctttatgttagcaccaaaaaattagctacttactgataacataacgaagcatgggtcctatatcaatccctatatgtccagaactaccaaactatgatgaattcgatcaaagatctaaatggagatcctttgagctgcaaggtaaaaaatttaataaaaataaataagtacatgaagagagattctatgttcacgaataggaagactcaatattgtttagatgtcactttttcccaacttgacctgtagattgaatgcaattcccatcaaaatccctgcaaatcattttgtggaagtcacg

SEQ ID NO: 88332 - DNA, 2954 bp, Homo sapiens
atctcactgaggaccaacctttcgacattcttcagaaatccttgcaagaggccaatatcactgaacagacattggcagaagaggcatatttggatgccagtataggttcaagccaacagtttgcacaagctcagcttcatccttcttcatcagcatcctttactcaggcttctaatgtttctaattactcaggtcagacgctgcagcctataggggtgacgcatgtgcctgttggagcatcgtttgcaagcaatacagtgggtgtacaacatggctttatgcaacatgtggggatcagtgttcccagccagcatttgtctaatagcagtcagattagtggttctggtcaaatacagttaattgggtcatttggtaatcatccttccatgatgactattaataacctagatggatctcaaatcatattaaagggcagcgggcagcaagccccatcaaatgtgagtggagggctcctggttcatagacagactcctaatggcaactccttgtttgggaactctagttccagtccagtagcacagcctgttaccgttccatttaacagcacaaattttcaaacatctttacctgtgcataacatcatcatacaaaggggtcttgcaccaaattcaaataaagtcccaattaatatacagccaaagcctatccagatgggtcagcaaaatacatacaatgtgaacaatttgggaattcagcagcaccacgtacaacaagggatctcttttgcttctgcaagctcaccccagggctcagtagttggtccacacatgtctgtgaacattgtaaaccaacagaacacaagaaagccagtcacctcacaggcagtgagcagcactgggggcagtattgttattcattcccccatgggccaacctcacgcaccccaaagtcagttccttatacctacaagcctttctgtcagttccaactcggtacaccacgtccagactataaatgggcaacttcttcaaactcaaccctctcagctcatttctggccaagtggcctcagagcatgtcatgttgaacagaaactcttccaacatgctcaggaccaaccaaccatatactggaccgatgcttaacaaccagaatactgctgtccacttagtgtctgggcagacatttgctgcctctggaagtccagtgatagccaatcatgcctctcctcagcttgtgggtggacagatgcccttgcagcaggcatccccaactgtattacacctgtcacctgggcagagcagcgtttcccaaggaagacctggcttcgccaccatgccatcggtgacaagcatgtcaggacctagtcggttccctgctgtcagctcagccagcactgcccatcctagtcttgggtctgcagttcagtctggttcatcaggatcaaactttacaggagatcagctgacccagccaaacaggactccagtaccagtcagtgtgtctcatcgtcttccagtttcttcttccaagtctaccagcaccttcagtaacacacctggaacaggaacccagcaacaattcttctgccaggctcagaaaaaatgtctgaatcagacttcccccatttctgctcccaagaccacagacggcctgaggcaagcacagatccctgggctcttgagcaccacactgccagggcaggattctggaagcaaagttatatccgcatccttaggaaccgcacaaccacagcaggaaaaagtagttggatcatctcctggccatccagctgtgcaggtggagagtcattcgggaggacaaaaaaggcctgctgcgaaacagctaacgaaaggagctttcattctccagcagttgcagagggaccaagcccacactgtgacaccagacaaaagtcacttccgatcactaagtgatgcggtacagagactgctctcctaccacgtgtgccagggctccatgcccactgaagaagacttgagaaaagtggacaatgaatttgagacagttgccactcagctcctaaaaaggacccaagctatgcttaacaaatacagatgcctgctcctagaagatgccatgcgaatcaatccccctgctgagatggtgatgatcgataggatgttcaaccaggaggaaagagcttccctgtcccgagacaagcgtttggcacttgtagaccctgagggttttcaggctgatttctgttgttccttcaaacttgataaagctgctcatgagacacagtttggccggagtgaccagcatggcagtaaagcaagcagctctctgcaaccgccagccaaggcccaaggcagagaccgagccaaaaccggtgtgacggaacccatgaatcatgaccagtttcatctagtgcctaatcacatcgtggtctctgcagaaggaaacatttctaaaaaaacagaatgccttggcagagcactgaaatttgacaaagtgggcttagtgcagtaccagagcacgtctgaagagaaggccagccggagagagcctctgaaggccagtcagtgctctcccggccctgaggggcaccggaaaacctcatccagatcggatcatggtactgagagcaaactgtcaagcatcctagcagattcgcacttggagatgacgtgtaacaattccttccaggacaaaagtctgaggaattctccaaagaatgaagttttacacacagacatcatgaaagggtcaggcgaaccccagccagatctccagctgacaaagagcttggaaaccacatttaagaacatcttggaactcaaaaaggcgggacggcagccccagagtgaccccacggttagcggctctgttgagttagatttccccaacttttctcctatggcttcacaggaaaactgcctggaaaagttcatcccggaccacagtgaaggtgttgtagaaactgactccattttagaagcagctgtaaatagtatcctagagtgttaa

SEQ ID NO: 88333 - DNA, 3181 bp, Homo sapiens
acctcattgtccccagtaaaggggttttatatataccacgaatgtaatggaatcctagccctttaccaacaatagagccaggtaccacggattccccccaaatatggaaatggtgaaaccgaaattcagggaaagacttttaggggagaaaggtcttagagaataaatgtgaactatacagtagaagaaggtagttcctcattgcccattttcttactgagttgtagtaccagattgagtccccaagtcatattcttactgatttttatgctgtagtatacaaaatttaaaactttaatgaacagccaagcacggtcactcatgcctgtaatcccagggctttgggaggcagaagggggaggatctcctgagcccaggagttcccaggctgcagtaagccctgatcatacaactgcactccagcctgggtgaaagagctagaccttgtctccaaaaaataaaaataaaaaaatcaaagctttaatgaacatccttaattagatatggcaataatatcctttggtcattgagtaaaactctttatttttatatacttaaaagtgttctttttattttaaaacatctgtataatttttagttaaaaaaaatggaacctttttcctgtgacactttcgtggcattacctccagcaacagtcgataacaggattatttttggaaaaaattcagatagactctatgatgaagtacaagaggtggtttattttcctgctgtagttcatgataacctgggagaacgtcttaagtgtacatatatagaaattgatcaagttcctgaaacatatgctgttgtcctgagtcgcccagcgtggttgtggggggcagaaatgggagccaatgagcatggagtttgcattgggaatgaagctgtatggggaagagaagaagtttgtgatgaagaagcactattaggaatggaccttgtcagacttggccttgaaagagctgatacagctgaaaaagccctcaatgtcattgttgacttactagaaaaatatggccagggtggaaattgcacagagggtagaatggtatttagctatcacaacagtttcctgatagctgataggaatgaagcctggattctggagactgcagggaagtactgggcagcagaaaaagtacaagagggagttcgtaatatttctaatcaactttccataacaaccaagattgcccgggaacacccagacatgagaaactatgctaagcggaaaggttggtgggatggtaaaaaggagtttgattttgctgcagcatattcctatcttgacacagccaagatgatgacttcatcaggcagatactgtgagggctacaagcttctaaataagcacaaaggaaatataacttttgaaacaatgatggaaattcttcgagataaaccaagtggcattaatatggagggagaattcctgaccactgcaagcatggtttttattttacctcaagactccagccttccttgcattcacttctttacagggactcctgatcctgagagatctgtttttaagcctttcatatttgtgccacatatttcacaactattggataccagttcaccaacatttgaacttgaagatctagttaaaaagaaatcacattttaagcctgacagaagacacccactctaccaaaaacatcaacaggcattggaagtagtaaataataatgaggaaaaagccaaaataatgttggacaacatgaggaaactggagaaagaactattcagagagatggaatcaatccttcaaaacaagcatcttgatgtggagaaaattgttaatctctttcctcagtgtacaaaagatgaaattcaaatttatcagtcaaatttatcagtcaaagttagttcttagtgatcatatggtcagctaatattagttcttagtgatcagtggtcagtaatcttcaaagtcaggaatctatccaccttgggtaaattatattaaacctaacttgagcagatctggattattcttggggtagtattccagtgggtatccttggactatttaaactacgtatagtgttgctgaaatagaaagaaaacagcattggaattggattcatgtatcgtgggatacaggtgttatttcaggtgatgtacttgcattattttctttagccatactaactttttgtcacaataactaagtattcaattatatataaagagtgaaacattaaaatgacgcatggatttatatttattataattatgtagtaccctcaaatcattttgtcagttacatcaagaaagcagatttttttttagtcatgaaaaatatctcaagtggtaagttgtttgtgctttaggcaaacattaaccagctctaacaagaaaaatgtctagatttacacattgtcaatacagtatattagttctgcaaatgcacttttgttaaactcaaacatgctctttgtcaagacttggctaaccagtgagcttgtagctctgattatctagcatttttagggtcattctccttaataggcttttatgttaataagatatatttttagaagagcttgtttgggagattagagaataagataaaagaaccaaaaccttaggatatactgtttctgggtctgaaatctctctcattgtttacttctgttcactcagtgaaaacagaaacaagaatgaggtagtggcaatgaaatagaattattagtatattatgaacattataacattttgaacactataatgcattatatattatgaacttttatgaactttatacatgagtaatagcttcctaaagtttataaaacattgtttaggttacataaagattaccaagtaagactcaaaattgcaaatataaacaaaagaaaaatccaactgaaaataacactaagtatttttgagtttctagaatgtccattttgggatttggttacattatcatatttactagtcactatcagcacaattaggttaataaagaagtgggtcattatattcaaagagtgctcaggaagttatgtgttcaaagttctctcataaataccatcgtctgcctgatactgctcttgtctaatagagggttgacattacaaaagaaaagatgtctgactcaagaactcagttgattctgtttggccttaagtttgggttcagtggtagggctgtcttcttaacccct

SEQ ID NO: 88334 - DNA, 602 bp, Homo sapiens
  misc_feature (1)...(602): n = a,t,c or g
ttttttttttttgagacggagtctcgctctgtcgcccaggccggactgcggactgcagtggcgcaatctcggctcactgcaagctccgcctcccgggttcacgccattctcctgcctcagcctcccgagtagctgggactacaggcgcccgccaccgcgcccggctaattttttgtatttttagtagagacggggtttcaccttgttagccaggatggtctcgatctcctgacctcatgatccacccgcctcggcctcccaaagtgctgggattacaggcgtgagccaccgcgcccggcctacatgagtttacgatataacaaacctgcacatgtacccctgaaaataaaagttaaaaaataaaaataaaaccttctccttaatgaggatagtgttgccattggcagggaaagtgttaggaagtaaaagggggttctaggtgctaaaatgttctataattcatcagggtctacatggttgtgctcagttttggttgtctgtttttttttgagacgagttcactctgttgcccagctggagtgcacggcatgatctcggctactgcaagctcacctcccgagttacgccatntcctgcttagc

SEQ ID NO: 88335 - DNA, 402 bp, Homo sapiens
aagcatgtaatgtccctgagccagaagagaagtttaatatggacaaatacacagacctggggacagtcagcaaaccagtcatttatatttcaattgaagaaatcatcagcacacactcagtaagtggggatggggagccatcttagcaatggacccatgatttaggcatctgttatcttgaaaatgcttaatctctacaggacttattgtacacatgtgctaatactcatattcttaaccctaaaaatctcgcaattatttattccatgactcttatacattaataaaactccttctcccaaacaacaaaattctatttttacataattattccctgactcctagacattaataaaacttctccccaaaaaagaaagtgtacttttggcataatccatttac

SEQ ID NO: 88336 - DNA, 392 bp, Homo sapiens
ataatttgctctctgatcgtgatttaaagaaaaagctaaaagagcatggattatctattcaaggaaataaacaacagctcattaaaaggcaccaagaatttgtacacatgtacaatgcccaatgcgatgctttgcatcctaaatcaggtaaagtaataaaacagtgagttatgcttactttctggataaagcaattttgtgtagctcagaaattataaaccatagaaaaatattgtaaataaatacatttttgatagataagacgtgcaaatgtgttccttcaaaaggtacctagagtatgctatgataagccagccttcctctcagcctgccttccaatccccagatcccttctcagaggcaccccattgccagtttctcatgtgcctatc

SEQ ID NO: 88337 - DNA, 324 bp, Homo sapiens
ggaaagtaatggaaacctttgtcacatccctggcttccagaactttatgttatctaagtgcatttgtctgcaaagttgttgggttaattgcccctttctttcttctctttttaagatattaataaatagtgtcatgaccaaaagataatccttatggacaagatagatctaaaaagccttagctaatttataatcttgcataatccatgatgacaagatgcagaaacaaaaatgcccagaataaaaacttagcaccattagcagccatttccttttaagtctttacaagtatactcccagtttcttgaaaaatttattctaaaa

SEQ ID NO: 88338 - DNA, 595 bp, Homo sapiens
ggaagaaaatccttctgtcttccttgagcatctacaggaggccttaagaaaatacactcccctgtcacctgactccctcgagggtcaatttatcctaaaagataagtttatttcccaatcagtcacagatatcaggagaaagctccaaaagaaagccctaggccctgaacaaaatctggaggcattattaaacatggcaacctcagtgttctataaaagggaccaagaggaacaggctgagaagaaaaagtgaaatcagagaaagggcacagccttagtcatggccctcagacaaacaaaccctggtggttcagagaggacagaaaatagagcaggccaatcagctggtagggcttgttatcagtgtggtttgcaaggacactttacaaaagattgtccaatgagaaacaagctgccccctcgcccatgtccactataccaaggaaatcactggaaggatggggaaccaatcgagcatgactgccaacaaattatagtccagacttctgctgctcgagaggatcttttagaagtccccttagctaatcctgaccttaacctatataccgatggaagttcatttgtggagaatggg

SEQ ID NO: 88339 - DNA, 374 bp, Homo sapiens
cccaccatttgaaatcatttgtaattattcaatatggttacaacataaatatttatttttcacaagagaagatacaaatattagtttagcttttaacttgaacctgcattgggtttctccttattcttcatcactttgaagatataattcgaaaaagcctggatgttattttattattttgtcttaaagtcagattttcaatttgcatcagaatgattacatgagtgtttgtgtgaggcagaaccaaacacacatggtttggtgtttttataacattggctgtgctttctttgccttttagattgtgatacaggttccagcccttggggacagtagtggttggccagatggttatgaagatctggagtcaggtg

SEQ ID NO: 88340 - DNA, 368 bp, Homo sapiens
ctggtttggtggagagatctgataacaaaaagttgggaaataggtaaaataataacttggggtagaggttatgcttgtgtttccccaggatgaaatcaacagccaatctgggtgccattgagacatctaaagccttactatgagccagatacccaggaagaggttttgggaggatcccaaagactccctggttgcagccatgtcaagactgatgctgaggaggaccccaactgtcacgagcaacaactgcctggggacagatcaagaagctgtcacagatggcagagaaaaacctgagaaaagcgggacaaccagtcacaatgagtaatttaatgatagctatgacagtggtgatcaccattgccatg

SEQ ID NO: 88341 - DNA, 384 bp, Homo sapiens
cggcacgagatgagtaactgctgagctgtgggcttaaggatctcagcgaactctggtaccctctcgggacacacaggagtatctggcacccttccctaaaggattctctgttcttctgcctttccctccaggtgcaatatcagctacttagaagaatggcttaaagataagaacttgcagaacagcttagcaaaggaaactttggagcccctctctcaggcagcctggttgcttcaggtcaagaagaccacagacagtgatgccaaggagatctacgaacgctgcacctcactgtctgctgtgcaggcagccactgttcccgctattgctgccactcagggcagcatgacctcgctggcacactccctgtattaccgaccttga

SEQ ID NO: 88342 - DNA, 372 bp, Homo sapiens
gtgtgccctgcctcacacagtactagagcttccacccctgaccctgcacccacactcacattcatgctgagatctaccaggcacccacactggggcagttgggcagctaggcctcctgggggctgctgacggtctcagctctgcctggtaaccattgttctggtacagaccaagtgatccaactgaggaaggctcaactacagaaggagggggagctggagaagatcaagaggaagaggcatttggattttctggatatcctcctcttggccaaagtgagtatgtgtaggagaggcctgagtctttgcccagaagtacatagcaagagacaagccctgcactttcaccacagtctttccagatggagaatgg

SEQ ID NO: 88343 - DNA, 530 bp, Homo sapiens
agcggctttctgtattctgccacaccaggggcagatgtttgctttgctcgacaacataacacttctgacaataacaaccagtgtttgctgggagccaatgggaatattttgttgcaccttaaccctcagaaaccaggggctattgataatcagccattagtaactcaagaaccagtaaaggctacatcattaacactagaaggaggacgattaaaacgaactccacagctgattcatggaagagactatgaaatggtcccagaacctgtgtggagagcactttatcactggtatggagcaaacctggccttacctagaccagttatcaagaacagcaagacagacatcccagagctggaattatttccccgctatcttctcttcctgagacagcagcctgccactcggacacagcagtctaacatctgggtgaatatgggtatgatgagcctgagaatgtttcctcagcatttaccgagaggtaacttaagaatgcagcaagaataccatgcatttccttaaaaaaaaaa

SEQ ID NO: 88344 - DNA, 421 bp, Homo sapiens
tctccttcggcacgaggttaaaggatctaattgtcagatggattgaattaaattgtcaaccccctccttttcttgttgaccagacattgatgactgttctcctaataactgttcccacgggggcacctgccaggacctggttaacggatttaagtgtgtgtgccccccacagtggactgggaaaacgtgccagttaggtaagaacatccctgtgactgtaatttttataccaaggttggctttgattgtcaaagccattacagaagacgagcgtgtggccggcagtgtgagttcacactccatcatgctaagaagtaatttattatcaagagtctagcaggcctgggagaaataacttgaatgcaaatggactagctcttttatgccctgtgggaaagtcgtgggattccttgaaccatgt

SEQ ID NO: 88345 - DNA, 339 bp, Homo sapiens
gggtaaagggaggtccttaataattttgaggccctgctgtctgaaccagttttcttatggacagctgctttgacttttagtagtagccttgaaacatctggcatgctatctgtttttattgctacttatgaccaaaacatttaaacattttgtttttaaggtgtgtttaagaagtctgatggctgggttggcttaggctgctgtgaactggctattgccttggagtgtcgacaggcatgcaagcaggtaacactgggtagtcaggctctcaaacatcatggagtgcagtttggttttagctgtgcacatgtcttgggccttgcccacctcctagctttg

SEQ ID NO: 88346 - DNA, 899 bp, Homo sapiens
ggccaaagtactttgttccccccgacaagggctagaatgtgttcacagaagaaaaagaaccacgtggactacactaaactctacagggccttgtgatttttccattccgtagacctcctggcattggagcagagcaagactttctataagccagattggtttgacatcgtggagtctgaagtcaagtgctgtaaggaagctgtgtgtgtcattgacatgtcctctttcacagagtttgagataacatccactggggatcaggcattagaagttctacagtacctcttctccaatgacctggatgtgcctgtgggccacattgtgcatactggcatgctcaacgagggtggagggtatgaaaatgactgcagcatagcacgactgaacaagcgcagtttcttcatgatctctccaaccgaccagcaggtccactgttgggcctggcttaagaaacacatgccgaaagacagcaacctgctcctggaggacgtcacctggaagtacacagccctcaatctgattggccctcgagctgtggatgtgctgtctgagttgtcctatgcccctatgactccagaccacttcccaagcctcttttgcaaggagatgagcgtgggctatgcaaatgggatccgggtgatgagcatgacgcacacaggagagccaggattcatgctctacatccccatagagtacagatggggcttcaccatgttgtccacgcttgtctccaactcctgacctcaagtggtccacacacctcagcctcccaaagtgctgggattacaggcatgagccactgtgcctggccccagggcgaccacggaacggatcagcgaggccaagtacactaccaccatctggtcattggtcttcaggtaaaaggccttgacgaactc

SEQ ID NO: 88347 - DNA, 371 bp, Homo sapiens
ctctggcaatgagagcttccacattagtaatctggtgaatgatttcctggcggtagaaaaggaagaggcatacattgcgagatggcaaaaaagcaaagccctttgaaaacgcatcttaaaaattatttttgccaactgaggagaacacttggcaagattctgacactacatcaaacttacttccaatttcttgtcttctggattggggaagtgcaaaactttactggaatgggatattatctgctttatgatcttcttaactgaagaaatgttttcgagactttctattttagaaaagattgaagccagcattaaataaattaagcaaaatatactttcactttggaaatgactaatgactagttaaatat

SEQ ID NO: 88348 - DNA, 764 bp, Homo sapiens
catatatgtgcacaaccccatacacatatgtacacacatgtgcacacacacatccatctcctaccaggaacctctcaatctcacgtaaacaatcagaaccagactaatgatttttcttccaactctaacattccttgacattctaattgttttcttctttgcattgaaagggaggcagcataccaggtgtgagtgtgatactgtggcctcctccacaggtcggtgcaggctgtgagtgacactgtggcctcctccacaggccggtgcaggctgtgagtgtgatactgtggcctcctccacaggctggtgcaggctgcaactgcccaggttccagctgtgagctaaaagtgggcgtcctcccctgctccaccagtgtgcctcggtgctttacgtttgccttatcatgctttctgcagttggcagatgaaatgaaatcggaagttcagcagactcctcttatgcatttggatcaggcttccgctcataaattcaaggaaagctattaaaattggttagccagaatacttccttccgtacttagacaactgagcacaacgggccggagctcatctggagttccgaggaggctttgaaattgtaggtgcttggaaaaagcagaggggccgacctcaggacctggtagggttgggccttttaataagtggaaaattaaccccggacattactttaagagctgtttataaaccagcactttgagaatttcgcacacacaaggaaattaacaaaagccttgggcccataag

SEQ ID NO: 88349 - DNA, 357 bp, Homo sapiens
gcctgaaggggtgaataaagtaaatgctgtatttgagaggcatattacccccggcggacatattggggctaaccggactattgacctgaaaagcggatctggaaaagggtaccaaggccctgcataaggcgctggtgaaaccacaatcatactttcccattaatatttaatggaagcggtcctgggcaagcttgacccttaaaaggtattctttaatgacaggctgaatgtcaaagggaacatcatgctgagccacaatcttcagaggagtgttatagactaacccaagctctgaacggcacactacactattaataataacggaatcattaaatactctctgtacccgcatatgct

SEQ ID NO: 88350 - DNA, 1658 bp, Homo sapiens; identical to SEQ ID NO: 63881
  misc_feature (1)...(1658): n = a,t,c or g

SEQ ID NO: 88351 - DNA, 379 bp, Homo sapiens
  misc_feature (1)...(379): n = a,t,c or g
ccttgatggatatgatttaatacaaattagcaataatatatctaaatttgtaattgtcactgatccattgcttaggatatattttaaaatatgttcactaaattctgttttcagttaagttattcatttatcttttgtttaggtcctaggccactgaaatggagtacaagagaagtggatattttttctaatttgatttttttcctgtattagtcttggaataatggatttgtatttcatacataattttaagtgcctcatatttttaataatagttgcctagacaatacaatttattgtgaaattttctattagcagttcattctaaatgtttaagaaattatacgtttttctctttttgtgaccttcaatcttaaan

SEQ ID NO: 88352 - DNA, 555 bp, Homo sapiens
cgggtgccgcgctctgcaggcaaccttccgccgcccccccgccagcacctctctgggtaagagctgggttccgacagcagctcagcttaaccctctgccctgctaacgagggaaactgcggcggctccgcgcccagcacgcccggtaggccggagagagcggcgaggccttcggtgagcgaagagttaaccgcggcggagcgacagatcgcggagctgcacgctgccgcctgcgcggctggccagctaaactatgtggacccagctactggctatgtggtgctcacacagattgcccacttgcaaagaggtgaatgttgtggctctgcgtgcagacattgtccatatggtcaagtcaatgttaaagatccatctaaaaagaagcaattcaattcatatttttatgtttgacaagaatttcatctctgttccctaactgtgcttgtattttttaaaaaataaagccccaattcagaattgctggattattagtacttgaacactagtttaatcctaaatacatatattaaaagaacatcaataaaatgaaaaagct

SEQ ID NO: 88353 - DNA, 394 bp, Homo sapiens
gaaccatgtttgagtaccaaacaatgacttatttatatgctctcactggaattattgtcacaggtggtgggattccatcagccaggtagtatcagacttgctaccacccctgtaagggtagatgaatttaaatatcaaatgactcggactggctggcatgcaacagaacagtatctcattgaacctgaaaaaattcaagagatgttccctttactcaacatgaataaggtatttatcttaagggcatttttaccatttgttgacttaagtaaaaattacgaaaaagttattaagaagttaactaaaaacagaaaaccttggtacacacattttaaatcgtgacaaaatcatatgattaattttggaatttgggtaacttacaagataggctgtt

SEQ ID NO: 88354 - DNA, 488 bp, Homo sapiens
  misc_feature (1)...(488): n = a,t,c or g
gtaagattgaactcagctctaactggactcttctgagtgttgggtaggaagtcggggggagcatggctcaatagggccacccggtctccagtgacagaagtctccggctctggggtgatttcaaagtgatctaatagtgctccaaggaaggctcttatgtcttcaaattcagcacttcccatgttccgggaggcatccagaaggaaagcagcatccatgtaagactgcacagggggtggtctggcttggtcacaaaaagcatctggcttgcacacatctgtgaaccaaaagttactctgggttactaagtagaaatagaaaagggaagatagcatgtctaatattttgacatttggaaactgcatagtctttgatgttaaaatagtgactaaatactttaatagtaacaggaagaattctagtacatggtttgatctgtccccaaaagacaaaattataccccagctgngctgggactcattactaag

SEQ ID NO: 88355 - DNA, 922 bp, Homo sapiens
accatcacagacgccgagcttcgggtaactctcacagtggaaggccgagacagtttaactaaattatctgcttccctgacgattcctggactacagccacatctcattgccgtccttctccccaacccaaagcctcctttgcgtcttcctctcatatcccccgaccttaacccacaaatatgggacatttctactccttccctggcaactgatcacatgcccattaccatcccattaaaacctaatcacccttaccccactcaacgccaatatcccatcccacagcacgctttaaaaggattaaagcctgttatcactcgcctgctacagcataggcttctaaaacctataaactcttcttacaatccccccattttacctgtccagaaaccggacaagtcttacagattagttcaggatctgcgccttatcaaccaaattgttttgcctatccaccctgtggtgcccaacccgtacactctttcatcctcaataccttccttcacaactcactattccgtgcttgatcttaaagatgcttttttcactattcccctgcatccctcatcccagcctctccttgctttcacttagactgaccctgacacccattaggctcagcaaattaccaaggctgtactgccgcaagttccaatagacagcccccattacttcagccaagctctttctcatgatctactttctttccacccctctgcttctcaccttattcaatatattgatgaccttcttctttgtagcccctcctttgaatcttctcaacaagacacacttctgcttcttcagcatttattctccaaaggatatcgggtatccccctccaaagctcaaatttcttctccatccgttacctacctcggcataattcttcataagaacacacatgctctccctgccgatc

SEQ ID NO: 88356 - DNA, 381 bp, Homo sapiens
tgtcattggcctaaggtcacagagttagtgagaggtcatactgaggttcacacccacattgcttggcaccagaagtcagttctcttaacctcttcttacataatgcaatgcagttgaattgcaaacccatgactttttcttcatgtaggtaattatcagcattgtaaccggcctcccaggctgtcacgctagcgagctctgtgcttttctggtcactctgcataaggaatgtggcaggttagtatggctgatgcctttgctttggggaaagggattctaacttgggcctgcctaggcactggaaaaccttagacatgtactggccttggtgggactggtatcagcatggtagtcagccattcatttaatatgctcttctga

SEQ ID NO: 88357 - DNA, 382 bp, Homo sapiens
gctctcggggggaccccctcacatcacctcctcagccccagagctccggcagcgcctaacacatgttgacaggtagggctgggacaggaaggtgggacgcagtcagaaataaaaagtattacaggttcactaggctctagctttccccagacctactgatatttctccacagtccccttgaggctccagccgggcctctgggccaggtgaaactgactctgtggtactacagtgaagaacgaaagctggtcagcattgttcatggttgccggtgagaccccatccctcctgtcctccagatcgcctccatcccttccctcagggtaccatatcacctacatcctcctgttggagggcccttcgacagaaaggacgtgatcct

SEQ ID NO: 88358 - DNA, 355 bp, Homo sapiens
tcatgataaaaatagaagaaggtaggaaaccagttaggagaccccccgccccctgtccttttcatgggtagagactattaaggtggccagggaggcaggttctagtacctacttatttgagctccgtttgaaggcaacagactcttggtggtgagtcttccttaactgaatgggtagtttcaggttcacactcccgccgagttcttctctgtgttctgtttaaaagctgtgtttctagaccctttctgcttgcttactattgagttgaatttaatcttctgctccttacagaatgagctagataatgtctccacccttctggaagaagcagagaagaagggtattaaatttgcta

SEQ ID NO: 88359 - DNA, 351 bp, Homo sapiens
ggacatgctctgcctctgactggttgggtcatctcagatgatttgcaaaactctgagttgatttcctcaccctggaaaggtgggagccctggccgaaggcctttccatactgggtgcagcaatagggcttctcccccgtgttgctctaccagtgaaccaggaagcacgagctgcagctgaaggtcttgccaccctatgggcacatgtgtggcttccaccctgtgtgcacgactaggcttggtccctgactgaaggccttgccacatgtgccacagacaaagggcttcttccccatgtgtaccctctggggctaggtcaggtgggagctctgcatgaaggccttgccacact

SEQ ID NO: 88360 - DNA, 387 bp, Homo sapiens
  misc_feature (1)...(387): n = a,t,c or g
cagattcttaaaaatatttttggtgaaggattaccactgtaatttttcctaacttcgaccggcactggtcccagcgcccaggccatctcccagcggtggcaacatgaagccaggcggctagggcggaggtggcggccctgatggcggcgagctggtggccaacatgctcccagtcgctggcggcggtgcctgctcctgacctgggctccactcccaccccgtgcgccaagcgcagccaacgccgcccacaaaaggatttttcaaatgtttttttcgcggtgaaagaagtttgaagactactgcantaaacaacaacagagaaaaaggaagaggaaagagnataaagatttttgcttatatcatgtgaattattaaaaagaatgaagg

SEQ ID NO: 88361 - DNA, 396 bp, Homo sapiens
cggcacgagcagctagagtctggatttgaacccatgaatctgcagtttgtgctctcagtcagatgctccccctgctcttaatccatttcctgttttccttctttcgagtcctgctgcacttagcatctttccttttctcctcagcctgtgatatctgctcccagagactcttctccttggctctccgtgcctctgccatcatgggcagctgctcctcccagggacaggagggatccatactctgcttcctgggttgcccctgctagtggttccatgtctatttcagatccatagccgggtggatgtcatcagacacgtggtgaagaatggtctactctgggatgagttgtatataggattccaaacacggctccagcgggatcctgacatatacca

SEQ ID NO: 88362 - DNA, 2052 bp, Homo sapiens
attgttgtggttgaattgtctccccaaagtccctaactgccagtacctcagaatgtgactacatttaaagacagggtctgtttggagaaaatcaagttaaaatgaggtcattagggtggaccctaatacaatatgactagtgtccttataagaagaggaaataggaccagatgcggtgcctcctgcctgtaatcccagcattttgggaggccaaggcaggcagatcacctgagtcaggagttcgagaccagcctggccaacgtggtgaaaccctgtctctactaaaaatacaaaaattagccaggcatggtggcgggcacctgtaatcccagctactcgggatgctgaggcaggagaatcacttgaacctagaaggcagaggttgcagtgagctgagatcgcgccattgcactccagcctgggcaacgagagtgaaactccatctcaagaagggcattcctaacttctgagggaacacctatcaatcatcagaaagccattaggagattattattggctgtacagaaacctaaagaggtggcagtcttacactgctggggtcatcagaagggaaaggaaagagaaatagaagggaaccaccaagcggatattgaagccaaaagagccgcaaggcaggaccctccattagaaatgcttatagaaggacctctagtatggggtaatcccctctgggaaaccaagccccagtactcagcaggagaaatagaatggggaacctcacgaggacatagtttcctcccctcaggatggctagccaccgaagaaagaaaaatacttttgcctgcagctaaccaatagaaattacttaaaacccttcaccaaaccttcgacttagccattgatagcacccatcagatggccaaattattatttactggaccaggccttttcaaaactgtcaagcagatagtcagagcttgtaaagtgtgccaaaggaataatcccctgcactgcaggccatacatttcaatccctgtatctttaacctccttgttaagtttgtctcttccagaatcaaagctgtaaaacaacacatcgttcttcaaatggagccccagatgcagtccatgactaagatctaccgcggatccctggaccagcctgctagcccatgctccgatgttaatgacatcgaaggcactcctcccgaggaaatctcaaatgcacaacccctactatgccccaattaagcaggaagcagttggagcagtcgacggccaacctccccaacagcacttgggttttcctgttgagagggggtactgagagacaggactagctggatttcctaggccggataagaatccctaagcctagctgggaaggtgactgtatccacctttaaacacagggcttgcaacttagctcacacccgaccaatcaggtagtaaagagagctcactaaaatgctaattaggcaaaaacaggaggtaaagaaatagctaatatctatcacctgagagtacagggggagggacaatgattgggatagaaacccaggcattcgagccggcaacggcaaccccctttgggtctccttccattttatgggagctctgttttcactctattaaatcttgcacagttcatccaggcagtcttcgggctgcttcaacctgtggccatggagaagatagtcatacatctcatggttctggaccccaggatagggagtcattccccgcgtagctatttcccacatggtcacgccaaatgcccacacatcacttttacttgtgtagactcggtctgcaagactttctatggcgatccatttaacaggcatcttagcaatgcggccttggcggtaataatcgccactgtaaatcttcttagagaggccgaagtccgcaacacagacagtcatgtcatctcgcaacctacagagagcaggttacgtcttcagcagcgtcagaggcaatgccgtaaattactggtctgcagtaagagcaacatgctgggcttcttgctaagatggccaggtggaagatgcagtttcgagcagctaaatctcgatgaagaaaattcctg

SEQ ID NO: 88363 - DNA, 1587 bp, Homo sapiens
atgcttaaggagtgtagtccaaaaaaggaccagaaaactccaacatccctggtggcttcggttagcggtcctccaacgagctccagcacagctgccattgctgcagctagctctagctctgcaccagcccaagaaaccatctgcctcgacgactcactagatgaagacctttctttccattcaccttcactggatcttggttctgaagctttagcggttatcaacaatgggaacaagggccctccaggtggctcaaggataagcatgccaaccacaaagcctcgtccaggactgagagaagaaaaattagcaagtatcatgagtaagctgccactagctactcccaaaaaactagattctactcagactacacattcttcaagtcttattgctggtcacacagggccagtaccaaagaaaccccaggatttagctcatactggcatctcttcaggccttattgctggttcttccattcagaaccctaaagtttctttagaacctttgccagccaggctacttcaacaaggacttcagaggtcaagccagattcacacttcttcctcttcacagacccatgtctcctcttcttcccaagcccaaattgctgcctcttctcatgctctgggaacatccgaggcccaagatgcttcttcgttaacacaagtaacaaaggtgcaccagcattcagctgtccagcagaactatgtgtctccattacaggccaccatcagtaaatcccagaccaaccccgtcgtgaagttaagtaataatccccaactctcctgttcctcctcacttattaagacttcagataagccacttatgtaccgccttcccttatctaccccctcacctggaaatggttctcaagggtcccaccccctggtttctaggacagtacctagcaccactacctccagtaactatttagccaaggctatggtgtcacagatctccacgcagggtttcaaatctcccttctcgatggctgcctccccaaaacttgccgcatctcccaagcctgccacatctcctaaacccctgccctcgcctaagccttctgcctcacccaagccctctctgtcagctaagccttcagtatcaactaaacttatttctaaatccaacccaactcccaagcctactgtatccccaagtagttccagtccaaatgcactagttgcccagggtagccactccagcactaacagcccagtccataaacagcccagtggaatgaacatcagcagacagtctcccaccttgaatttattgccctctagtcgcacttcaggccttccacctacaaaaaatcttcaggccccctcaaagctaacaaactcatcatccactggaactgttgggaagaacagcttgagtggaattgcaatgaatgtacctgccagcagaggtagcaaccttaactcaagcggagctaataggactagtctgtctgggggaacaggaagtggaacacagggtgctaccaaaccattgtctactccacatagaccatccactgcctcagggtcttcagtggtaacagccagtgtgcaggtatgtatgttctgtacgtccatgtga

SEQ ID NO: 88364 - DNA, 382 bp, Homo sapiens
aggaatactggggataatggtatttcattacaataactgtgatgaaaatgatgtaaaaccctcaaaaccctcaacaaaatactagcaagtaaaatcaagcaatgtttaaaaaggattatacattataaccaaatgggacttatttcaggaatgcaaggttgaattaacatctgaaaatcaattaatgtaatacaccattatcaacagaataaaagacaaaacaccacgatttctgtcagtctgatcatactgttataacagagtatcacgaactggaggcttataaacacataaatttattttttgcacttttacaggctaggaagtccaaggtcaaggcactggcagattcagcatctggagaggactcgctttctggaag

SEQ ID NO: 88365 - DNA, 415 bp, Homo sapiens
acgcactatgggcaattaggccctcaagccaaaaagccttgcgaaagaaacaaacaccttatagatgggaatgaataccatgaggcaagcccaatctgaccctcagatctttacttggaattttccataataccaccattaaaaatacattttcattcttggtcaaaagcaatccatgatcatttttcctggacttgcaatgtgtcaacagagtgtccactgccttttcaacctgctctttgtccagctgcttcagtgcttttggggactctggaatcgagctagaggttgcagtcacgcctgaagttgattttgttttcatctcataaagatgcgcctagaatttgatttttatttccacaagctgtgtatgagagagtgcttgctttcccatagcctttatcaataaagtata

SEQ ID NO: 88366 - DNA, 610 bp, Homo sapiens
gaattaaaccaaactggacaaatccttgtggagcaaatgggaaaagaaggccttcctactgaagaaataaaaaatgttctggagaaggtttcatcagaatggaagaatgtatctcaacatttggaagatctagaaagaaagattcagctacaggaagatataaatgcttatttcaagcagcttgatgagcttgaaaaggtcatcaagacaaaggaggagtgggtaaaacacacttccatttctgaatcttcccggcagtccttgccaagcttgaaggattcctgtcagcgggaattgacaaatcttcttggccttcaccccaaaattgaaatggctcgtgcaagctgctcggccctgatgtctcagccttctgccccagattttgtcccagcggggctttcgatagcttttctgggccgctaccaagctgtacaagaggctgtagaggatcgtcaacaacatctagagaatgaactgaagggccaacctggacatgcatatctggaaacactgaaaacactgaaagatgtgctaaatgattcagaaaataaggcccaggtgtctctgaatgtccttaatgatcttgccaaggtggagaaggccctgcaag

SEQ ID NO: 88367 - DNA, 728 bp, Homo sapiens
  misc_feature (1)...(728): n = a,t,c or g
gggaaaagaaaaggaaagagaagtagatagaaaatcaaacacagatgaaagcaaagacaattatgattataattatttcattccctaatcatgtaagatttgaattttctaattaagaaataagaacaaaattagttcatatgtcaaaaagaggattctaaaattgcactgacataaatgttattctgtgattcagttgcattcttaaattggtgtgttatttatgcaaattatggtaagaaaaataattttggatatttttgttttacaaatatatttttcactttcaccacattatttccagaagtatctttccttccacagggggttccctgtctgctcttgcttcctccagctcctcaatatatgtacctttcagggttgtttcagcagtcctgaagttgtgtgtgtgtgtaagcatgattaagagtacttttgtgggagtgtgctattgccagcctcacagatggggttatttccctggctagacttnctacttactgatagctgggctcacacttggacaatcttttcttaactgcctttagacccaaacaatgcaaagtctttgcagtggtgggaggggaacctgtggttggggcattgggggtcagntgggtaccaataattcccccgcccctggtggaggccccagaaaggcaaagggggggggaaccttcaggtaccccaaaaagaaggggggggggccccttgggggggcccccccc

SEQ ID NO: 88368 - DNA, 424 bp, Homo sapiens
agatcctggagaaaagctgggccccttccatcccagataccacccacagctccaggtggagagcagtgcccactatatgccaaggaaccagccagttgctggcgggagtgaacaagacttgagaacccttcagagacagcttcttgggctcactcctctctctggagacactgttctcagcctcgcaggagtagttcccagcatcctgttctgacttcactgggaagaggagggaggtggttccaccacagggagctgagtggttccccacaatcttctcatcaaggtagaaggaatacaggatcggaggggagcccctctgtgcctcacagaggagctgcaccatgtcccccacagcagggtcagcaggcccgtggtgcagagtgagcacaggacgggatacaggagcctgcactctgacctc

SEQ ID NO: 88369 - DNA, 593 bp, Homo sapiens
gaggtttcgagcccggaaggtccggcgcccagagctaacgggagtcccaggttaaacactttaagatgagaaaaattgatctctgtctgagctctgaagggtccgaagtgattttagctacatcaagtgatgaaaaacacccacctgaaaatatcattgatgggaatccagaaacgttttggaccaccacaggaatgtttccccaggaattcattatttgtttccacaaacatgtaaggattgaaaggcttgtaatccaaagttactttgtacagaccttgaagattgaaaaaagcacgtctaaagagccagttgattttgagcaatggattgaaaaagatttggtacacacagaggggcagcttcaaaatgaagaaattgtggcacatgatggctccgctacttacttgagattcattattgtatcagcctttgatcattttgcatctgtgcatagcgtttctgcagaaggaacagtagtctcaaatctttcctcataatgataacaaaatggctcttgcatgattttttaacaatatatttaaacaggaagttgtcactgatatactttattaaaaggatttttatcaaaa

SEQ ID NO: 88370 - DNA, 1469 bp, Homo sapiens
cctgatcttcagcctgtactcgctggtcaacgcctttcagtggatccagtacagcatcattagcaacgtcttcgagggcttctacggtgtcaccttgctgcacatcgactggctgtccatggtgtacatgctggcctacgtgcccctcatcttcccggccacctggctgctggacaccagaggcctgcggctcaccgccctgctgggctccggcctcaactgcctgggtgcctggatcaagtgcggcagtgtgcagcagcatctcttctgggtcaccatgttgggccagtgcttgtgctcggtggcccaggtgttcatcctgggcttgccctcccgcatcgcctcagtgtggtttgggcccaaagaggtgtccacagcttgtgccaccgccgtgctgggcaatcagcttggaactgcagttggctttttgctaccaccagttttagtacccaacacacagaatgacacaaatctcctggcttgtaatatcagcaccatgttttatggaacatcagctgttgccacacttttatttattttaacagcaattgccttcaaagaaaaacctcggtatccaccaagtcaggctcaagcagctcttcaagacagtccccctgaagagtactcctataagaaatcaataagaaacctgtttaaaaacattccttttgtccttctgttgatcacttatggtatcatgactggtgccttttattcagtctcaacgttattaaatcaaatgatattgacatattatgagggagaagaagtcaatgctggaaggattgggctaacgctagtagtagctggaatggtgggctctattctttgtggcttatggctggattatactaaaacatacaaacagactactctgatagtttatattttgtcttttattggaatggttatctttactttcacattggaccttagatatattatcatcgtgtttgttactggaggggtgcttggcttcttcatgactggttacctccctttgggttttgaatttgctgttgaaatcacttaccctgaatctgaaggtacttcatctggtcttcttaatgcttctgcacagatatttggaattttgttcacattggctcaaggaaagctcacatcagactatggtcctaaggcagggaacatttttctctgtgtctggatgtttataggcatcatattaacagcattaatcaagtctgatctgcgaagacacaacataaatataggaattacaaatgttgatgttaaagctataccagctgacagtcccacagaccaagaaccaaaaacggttatgttgtccaagcagtcagaatcagcaatttgaagagaaaggcaaagttactgtcctgtagtaattggggacaatgtgatcatccttggagagagatgtgagcaccaaggctgggtttgtatgtggtgggggaataaacacacttacttgaaaattaaaaaaaaaa

SEQ ID NO: 88371 - DNA, 479 bp, Homo sapiens
atatgctagacctgcgaataatttctgaaggaagacagtgtttctctggctacccctgtgaacacagctaaaaatggtatgaaaagaagtttggaactgagtatgttttgagagcaatctgttaggcgaggtcattggtttttagaaacgatgctgaatacataggagcaatccctgagaccagatattcacttcagcagggctctgtgttctcctctggctatgtgagacgagaactcataccgatcatggcttcgatatccacacatgttacactcgaaagggtcacggaagccgtggcagcccatgtgaatcgtgaacatcacatagtccaggaagaggacgcggcagtggtcacaccgatacacatccatcacctccccttccttgttgatcactttgacagagtctcttgggcagatgggcgggggctggaggagttcgcaagagcggggaaccttcttcagaaagggcattcc

SEQ ID NO: 88372 - DNA, 396 bp, Homo sapiens
cacactttttacataattgtgagttgtctcttaatgaaaagaaagtttgtacatatagcacttcactccatttaccttcttttctacaaaagaggtctagctgtaagatggggttataatttatacttctctcaggaggtcaggtttctcccccttgaagaggatattgtggccaggcagtactgcagaggaatataaatcgtttctttcttagcgtctgagggtcaaattggccccagttctccagaatatatcttcagggtgtttttgccttggggggaatgtttcccatctgaaaaaagaacacagggatgccagcacccctagtcattttccgatgagcattagtcctagagcgtcctctatgggcctaatgctttttcctttccagggggc

SEQ ID NO: 88373 - DNA, 447 bp, Homo sapiens
aaggcattgaacattcactgatagaggaaaattgtggtgttgttgtaaaatccattcaagttaccttagaatgtggccttggacatcgaactgtacctttattattggcagagtctaagttttcaggaaatattaaaaattggacttctctaatggctgctgttgctgacatgacactacaggtgcactattacaatgagatccatgctgtctgggagccactgattgagagagtggaggggaagagacaatggaatttaaggcttgatgtaaagaagaacccagttcaggataaaagtttgctgccaggagatgattttattcctgagccacaaatggcaattcatatttcttcaggaaatacaatgaatataacaatatccaaaagttgtcttaatgttttcaacaatttagcaaaaggtttttcagagggcactgcttctactt

SEQ ID NO: 88374 - DNA, 592 bp, Homo sapiens
cggacgcgtgggcggacgcgtgggtcggggtgtatctaaccaccatggagggagttgaggatgcgcctggagtgtcactggcctttccagcgcgtggggcacctttctgagtgctttacattttgagctctcccacatctgacggagatggtattctcatttacagatagattaaccgagtcggagagaggcaacatcacttgaattatgtcccatggctacaagtggagaccccaaacccagccatctggttccagagccaagctcaactacaatttgaaaccacctaatcactgtgcccttgggttttagagagacttgcatgtacataactgttgtgtcccccaaatgagatgctgatggccagagagcagttttactgcagagagtgtgtgtaggatcatgggaagaacatgggcattgaatgccttcccatctaggtgttccttacctgggtgctgttagttactgagtggcagggcatgctgcccacagagtgaccagcttcctggcctgtaggggagctctgtgccccccacctgccacatgccgtgcgcgttacagaaggcagcatgtgttcccagtgaggatc

SEQ ID NO: 88375 - DNA, 432 bp, Homo sapiens
ttcctgggtcttcccacgcgtccgcctatctaatacatactggaatttgggaacaacatattcttggcattggaacctggacagcattgatcaaacatggtagggaaagttctcattctgcattataaaaaggactgccagatatcagctgttagagatacgaaataagatggaacatttttaactgtttattttcttaaagagacttcctgccctgccagagatcttgaatagccccctagtcagtcatccagaagccattcacataattgattttcttggcttccactctgaaaagagaaccaccttttgctatacttggctgcatgtttgctttaatgtcttctgcagaactaggttcttctggtgttttaggagtattttcctattttttgaaggattcctgaccttttcttgacattggtgacttgg

SEQ ID NO: 88376 - DNA, 387 bp, Homo sapiens
  misc_feature (1)...(387): n = a,t,c or g
ctctcaggctcaggttgacaggactccacctggatgtggctgggtctctgctccaggacatggggcaggacagaggagggctcagccattgagagcatgggagaggtgaaacgaggcccagggacgaactcagggagaaatgctacctcctgaccccagtgtgccaacctggagacggccatcgctgacgccgagcagcggagggactgtgccctcaaggatgccagggccaagctggatgagctggagggcgccctgcagcaggccaaggaggagctggcacggatgctgcgcgagtaccaagagcttttgagcgtgaagctgtccctggatattgagatcgccacctaccgcaagctgctggagggcgaggagtgcatgatgtcn

SEQ ID NO: 88377 - DNA, 368 bp, Homo sapiens
aagagatggagacccacttgctgccgcaccctcttccttcctccttggctccattctgcatctcaaggggcctcacccccggacgtggcaccccactgctcatgtctaagctctacccacttcccctcaaactgctccttggccatcctgagatgcacatacggtgacgccatctgccccaagaggacagacctggtgaagaggtccatacaggaagggcccaagacccctggataacccacatatggtcgggcagagaaggaagaaccctcaggaaggcctgtacaatgaactgcagaaagataagatggcggaggcctacagtgagattgggatgaaaggcgagcgccggaggggcaaggggcacg

SEQ ID NO: 88378 - DNA, 2211 bp, Homo sapiens
ttttttttttttaagaagaaagcatagaggttgattggggtggggggcttgctagaagcttccatttaaaaaaattttcccccaaaaaacccccctgaaaacaaataaaaaaatcccaacaatggtaaaaccccaaacaaaaaacaacaaaaaagtgtcatgtacagaaaaggtcctttggggaaagggcaaggggtgggatttttctggtcactgacttgaaatacatttttgagagttttgtccttcttgttttatggaataaaaagtttggcctttttattgcatgaaactaaaattgggaaaggtagggggcgtggatggggtgggagggggttgaggggagcagggagatgccctccccaccagctcctggataatgacacctcacttcttgcataatttctggcatcttcccgcctgcaatgcctgctctctcagcgtctcggagaaggggggatcacacactcatcgtcatgcttggagaataattgtcgttctgaaaggagtggaggaagttccctcctagctcgccgtcatctcgaggggtgcctggaggattgctaatgccacttatgttgttaggagaattttttggaagtccgtctatgtcgcctgaccctaatgatccattcatgtggtgtggctccatgccacccatgccgcccatcggaccgtccgagccgggacccatcgggaagttggaccggctgcctccaggcggcactggattaatcattgtgtagatgttgtcactggaatttgttgaatctgcgggactgggcataatgggtgttcctggaggaccgccaccaccagggggtcccacataggtaccaggtgatgaggaggagtatggaattgagttagcactgttaggattgggccagggtctgccagctcccgggcccatgttaatcccgggcatggcggggccgagggagttgggtggtggtctcatgccgctgccgtaattctgtgggccgggacccatgggccccatgcctcggggagggttcattctctgcattgatcctcccatgttggggtggccttgttgtcgtgtgggatccatagaattgggcagcaatggctgtgtcccaggaactcctcccggaggctggtttcccattctgatcgggggcctggggccgcctgcgtatcgcggtgacataaaaggctgaaagaaacctggcgggatggggcctcccggcatcccatcgttggggggaatgttgccaagcacggggctcggggcagctgctgcactataatcatgaaaggcttttgcttcacttgaatgttcacaagtgtctctcctttcaggagctgcacagtaaaggtcccaaaatacacaccaccacgagtgcaaaaacccaggcggttctcccaacgtgatgtttttttcccatcgaatctccgataagaaggtctgtgcagatttctgtgctcctacgtgcagtaaatattcgtagacgtataaagctaacttttcccgagcctgcccatccgagggcaccgccgagcctttgcctttggcaaacatggtttgcagggaagagggcgccgagcctcgccgccgccgccgccgccgccgctaccgctccggctctcccgagctgcccctcgctcccggccccctccccggcgctcgctcgctctctcgctcgctggcgctctcctcgccgcgctcccctccctcccccccaggcgctggctccgcgctctttccagctgtcaaagcgtcagccccggccgcggccccatcgccctggaactccttccgcgccggctcggcctgggggtgccgccgccgccgcccgcacggccgcccgctctccgctcgctcgcgcgcccgcccggctccgcatgcgccgccctctgcgcctccagcaccgctgccgccgccgccgccgccgccgccgctggtctacttggagctcaaccgaacgtggctacccgggcgagggagcgaggcgggcggcaacgtcccgcgatggatggccgcctcggccaatcggcgcacgcgggggcgggcccgggccggctgggagggacgccctgacagcgccggccgcggcagtccccgctgcggccgcctccgcggagccgctgcctgctcctgcaggcgaactgggggcgtccgggggcgcgagcctctctttctgtcgccggggcggtctgcagtcaactgggcagctctgcttcagg

SEQ ID NO: 88379 - DNA, 379 bp, Homo sapiens
aactgaagcagctgcttgttattggccatcacttttgtaccacgttacagttcctctgagtcatgggatcagtgccttccatacaccaacgaacacttctgtttctctcagtgcagtgcccgtgtctcaaaaccagcatcgagatgcagttcctgagcatgaggctcccagcagagagagtatgttcagtgacttcctgactaatcttaacattgtttcaattggcctaggaaaaatattccaagggtacagatccatgttcatggagccagcacaatgggatgaagaagagcttggacacaaccgatagctggcacatccgtccagaacccttctgcctctcagtccctccttcacttaacttaggggaccttggatt

SEQ ID NO: 88380 - DNA, 474 bp, Homo sapiens
atggggtcatggcgtcccgaaccctcctcctgctgctcttgggggccctggccctgaccgagacctgggcgggtacccactccataaggtatttcagcaccgccgtgtcccggccgggtcgcggggagccccggtacatcgcagtgggctacgtggacgacacgcagttcgtgcggttcgacagcgacgcggcgactccgaggatgtagccgcagtcgccgtggttggagcaggagggaccggagtattgggaccggagcacacggaacatcaggcccgcgcacagactgacaagagtgaacctgcccatgccgcgccgctactaccaccagagctaggccggtgaatgaccccggcctggggcgaaggtcacgacccctcctcatcccccacggacgtcccgggtcccccccgcgagtctccggctccaagatccaccccgagaaagaaagacccgccagatcctcgacccgg

SEQ ID NO: 88381 - DNA, 416 bp, Homo sapiens
atgccattttgcaacagctcagcttggagatgccagaaaccatgtgaaaaggcaccttgggatgagggaatacaagtgtcatgtctgtggggttgcttttgtaatgaagaagcacttaaatactcatctactaggcaagcatggagttggcaccccaaaagaaaggaaatttacatgccacttatgtgatagaagtttcacagagaagtgggccctgaacaaccacatgaaactccacacgggagaaaagccgtttaaatgtacctggcccacgtgccattactcattcctcacagcctccgcaatgaaagaccactacaggacgcacacaggcgagaagtcgtttctgtgtgacctctgcggctttgccggcgggacccgccacgccctcaccaagcatcgcagacagcacacag

SEQ ID NO: 88382 - DNA, 411 bp, Homo sapiens
atggtaccctgtcagggggacggctttttgaaaatttgtgctgctttggctgcatgacgggtcttgccaactacttcggggtcatgactttcttcccagcttgtgcgtccttgggattacagctttctcggtaaagccgcgagggccgaccaatttggcagctcaaccattttgcccgagttttataggaagaagaaaataagccgaatcctgtaactcagaggagcaagatgattatgtctctaggcttggttcttgttcatgctcacagacgctggatagctgatccttctcctcacaacagtacagcagatacttctaaggcttcattatgacgtggtgaaaatgtgtccaagagaattgaaccaagtgcttccctctggcagatgtatctctctaaaatgatcaccg

SEQ ID NO: 88383 - DNA, 540 bp, Homo sapiens
tttcgtctggtggacctgcatcaggagcaagattcaaaccttaatggctttaagcctctcaaggtttgaggtcatgaccacagcacaacctagcctatgccagctgacaggggcagagggcagcagtagcagtgggatgctttcctggagagcaaacctcctctcagcagagttaggacggcagctttcacctctgcattcctcaggctgtaaatgatggggttcagcgagggcgtcacaaccccgtagaacaatgcgacagtcttatccacgttgggatccttggccttgggtttgaagtacatgaaggagattgtcccataaaaaaccaccaccactgtgcggtgggctgagcaggtggagaaggctttgcaccggcctgcagcagagggtaccctaaggatggcagacaggatgaaaaggtaagacaggcagatgagcaagaggggggccagtgtcaggacggctgtggccaccattaatgccagcgcattgagggagatgtccccacaggccagttttagcactgccaagatctca

SEQ ID NO: 88384 - DNA, 605 bp, Homo sapiens
cggaattcccgggtcgacgggaggcaggaggggacctgcagaggggacaaccacaggaaatgcatggggccctccctcagcacgggtggttgagcctgtgggggagaaagtcattttgttactgcctctgctcctctttcatctctgtcccatggtgcccctgtctttctctgctctctccctgttggttcttgccctgtcttcccaccgcaccccttttctgtgtgtttccctggctggcggcaccgggtgccaggtgtggtgaccgtgaggtcaggtgtcatcattgaccgggaggcattctcgccacccatcctggagctgctgctgctggctaaggacatcgggctgctcaacagcacggcccacctgctcatcaccatcctggatgacaatgacaaccggcccacctttagccctgccaccctcactgtccatctgctggagaactgcccgcctggattctcagtccttcaagtcacagccacagatgaggacagtggcctcaatggggagctggtctaccgaatagaagctggggctcaggaccgcttcctcattcatctggtcaccggggtcatccgtgttggtaatgccaccatcag

SEQ ID NO: 88385 - DNA, 1767 bp, Homo sapiens
aatttgaaagaggtgagtatgtactctgacttcagctctcaggttttaaaaattatattagtgggaccagttatgacaagaataatcattatagtacttttcagattttataacctggagcagattattttaagttgattagtaggttctgttacagtttttcttttgttcgtgcacttatagtcttcatttaattcctcatagaatcccagtcacctttatatatcatattattggaagagattcatcttcataatctccagttttttcacagtgcctcacagagttaatcatgccttttggagctagaaggactttagaacttatctagttatgctcctttatattataagtaagggaatagaatcaataagacagtttctgcccaaagtcatgttaccagttggtgacagagctggaaatacgtagagatctatacccttaaatctctccactcacatgctgatatactttctactacaatatgctatagctttatggaactcagggtgatgatcagacgtgtcattagaacatgagtcctctgcttctgattcaggcatacttttgggattcttccatctttaaaggaaaaaggaagccattcatctatatttagtaacccagtaatatctcacttagtttagggttagatctttagttaattcaaccttatagatcatacttatgaaggtgataactgacacgtgttccctgaattttaatttgataggcaatacatctacccactccattattttttaaaacttcatttaatagtttaaacaagattggttttgttttcaatttttattcactcttcatagaatcacaattacctttatatatcatatgttattggaagagattcctcagtaatctccaatctctcatagtgcctcacagggttggtcaatggcttttggaactggaaggaccttagaacttatctgttatgctcctgatagccaatagcagatagaagcttgcaatcaagagggtaggacatgtgttcttcaatggatatcaaaggaagaggttgcaaaccaaagccatttggcaagccctgtagcctgggccatttaagacaggggcggtctcagccaaattgcacccatttaactatcccaaagagccacagtgcctacaacccaggccctaagttgatgaagaaaaagtcaaggaaggaggtgatacaattggaaatattcccatcaaatggttaatcttatttagaaaatgggcatattagaaaaagtccttccaagatgattttggataataaaagttgtatttgtggaaattggtattatctctgttttatgcacttacatttatcccttacattttgtttttagtgaccctacatgacattaaatttaaagtaaaacattgtttaatgttaccttttggcttgagaatgtctttcagctccagaattattgttactcatattttaatcagtaagtcatttaagctatgacagagtaggaattgagaaattatttcatatgctacagtattgaaatgtggatgctgccttgttttataagaagatgatcaaggtttgtgtgcccattacctttcctctgcctgaaagacgtgtctcaagaaaaataaattctattttagatgcaggtactgcattttattctaagaattgatatcaattcaaaacatagaaaactgtaaaagataaatcgaggagatggctgattcataatgggtaataaaaataaatagcgactttcgagctgaaaaaaaaaa

SEQ ID NO: 88386 - DNA, 1372 bp, Homo sapiens
acttattaagtgcctgacaacggagatgtaacgaaattgcctgtctgctccactctggttgaagaaaccagtctgactgtctctgaggctatggagcagtccatcaagaatgaaagccctctgccaggcacgttggctcacacctgtaataccagcactttgggaggccgaggcaggtggatcacttgaggtcgggagttcgacaccagcatggccaacatggtgaaaccctgtctctacagaaaataatactttgcaaggcctcagaaactctgctatccacaggcaggtcttacagtcatggctggctgcctctctctgagaactgggactcctgaacttggtgaaatacctcagccattgatcatgttaaattatcggtggcactcatttaaaatccgagtctgctccagatggactctctctttctgccctgactatgagagagagagatcgtgagagacagagaccatgagaaagaccgtgagagagagacacagagctagagagagagaccgtgtcctgacctgctggacagtggagatgcttgtgggctgtgagcaagggatgcaaaggctgccgggaatcccatttttccagcatcatctgccaaggcacatcagttcctgggtgtcttgatgggttctggcagcattactgtcattgaaggaaaacattttagccatattaaaggttaatgcagcaatctccacataggctgcctggaagggaagcaggacaaggttaggttttccttgtgatggacaggaggcaggcggccctcccacagccctgcctggcaatacagatgtgtccccaaaaggcactgggggccagctggagtgctatgccgaggcggactgacccgggccgtgggttcactctgctggcagcggtttcccgccagctccttgcagagttggcagatggcccagccccacagcaggagccgggaatggcagaacgagacacaacaatttgatatccacttgccagatgagccgggtgtcatcagtcgcctggctctatgcccaacctctttttgcataaacacttatggattcagccaagaggaaaagcactctgattatgaattgagcagaaggaaacaaagttctgcagataaacaccaatgaaacaaaaaaccacgaataagaaaaatgacagaaaaggagaaccttcccagaatcctcctgccagtgaacggtcaccagagcaagagcatggagtccctgggttttgaactgtgagataaggaagatgatgaaaacctccctagcagccagacttagatttttggctggactattggcttgggatagatgaaaatcattccttgtatcccctgatcttaaagtcaagactgaaccag

SEQ ID NO: 88387 - DNA, 1983 bp, Homo sapiens
tttcgtagaaaacccaagcactcagtgacaaggaaaaggaattctccaaaaagctccaatcattgcagtctgaactccagtttaaagatgcagagatgaatgaattaaggacaaagctccagaccagtgaacgagcaaataaactggctgctccctctgtttcccatgtcagtcctaggaaaaacccttctgtggttataaagccagaagcatgttctccacaatttggaaaaacatcttttcctacaaaggagtcttttagtgctaacatgtcccttccccacccctgccagacggagtcaggatacaagcctctggtgggcagagaggatagtaagccccacagtctgagaggtgactccataaaacaagaagaggcccagaaaagctttgttgacagctggagacagagatcaaacactcaaggttccattttgataaacctgctcctgaagcagcctttgatcccagggtcatccctaagcctttgccacctcctgagtagtagttctgagtctcctgctggcacccccctgcagccaccagggtttggcagtaccttggctggaatgtcaggcctcaggaccacaggttcttatgatgggtcattttccctctcagccctgagagaagcacagaacctggcattcactggactgaatctggttgcccggaatgagtgctcacgtgatggagacccagcagagggaggcagaagggccttcccactctgccagcttcctggagccgtgcatttcctcccccttgtacagttcttcatcggcttacactgccaggccctgcaggacttggcagctgctaagagaagcggagcacctggggactcaccgacacattcctcctgcgtgagctctggggtagagaccaaccctgaggactcagtgtgcatcctggaaggcttctctgtgactgcacttagcattcttcagcacctggtgtgccacagcggagcagtcgtctccctattactgtcaggagtgggggcagattctgctgctggggaaggaaacaggagcctggttcacaggcttagtgatggagatatgacctcagccctaaggggggttgctgatgaccaaggacagcacccactgttgaagatgcttcttcacctgttggctttctcttctgcagcaacaggtcaccttcaagccagtgtcctgacccagtgccttaaggttttggtgaaattagccgaaaacacttcctgtgatttcttgcccaggttccagtgtgtgttccaagtgctgccaaagtgcctcagcccagagacacccctgcctagcgtgctgctggctgttgagctcctctccctgctggcggaccacgaccagctggcacctcagctctgttcccactcaggctgcctcctgctgctgctgtacatgtacatcacatcacggcctgacagagtggccttggagacacaatggctccagctggaacaagaggtggtgtggctcctggctaagcttggtgtgcagagccccttgcccccagtcactggctccaactgccagtgtaatgtggaggtggtcagagcgctcacggtgatgttgcacagacagtggctgacagtgcggagggcagggggacccccaaggaccgaccagcagaggcggacagtgcgctgtctgcgggacacggtgctgctgctgcacggcctatcgcagaaggacaagctcttcatgatgcactgcgtggaggtcctgcatcagtttgaccaggtgatgccgggggtcagcatgctcatccgagggcttcctgatgtgacggactgtgaagaggcagccctggatgacctctgtgccgcgggaaaccgatgtggaagaccccgaggtggagtgtggctgaggccctgagtgtccagccacatggtggcaccagccccaatcctttccttaccacatcaactgattaaagcagtgaccagcaggggctgcccagagaactggaaaaaaa

SEQ ID NO: 88388 - DNA, 11178 bp, Homo sapiens
gcacgagactgcgctcgcctccctcctcacgcgggcgggattttcttgccttgtgaaaaaccgtctcggcggctgcccccgcctcctctgctggcatgtgaaatggcggtcggcgagtggtttgcgtccgtgacatcatcatcatggcaacaagagctgcagcctgggaccgaggagcccgtgtgattcccggcggtggcgcagtggcggcagcaccagcaccgacgaaagcttcgagggcttctctccttgcggccccttgccgggtgctcctgaggaggcggcggcagcagcgcctacaccgccccgcccgccgttcctcgaggtgcctctgtgtgaggggagggggccgtgccgagaaggggagggggcgccgccgccgctgcggagggagccgccgccgctgctgctgccgctgccgggtcgccagtgaagggaggcagtggcggcggcggcgaacatgttttcagtaaggatagtgactgcagactaatacatggccagcccgctgcaggggctggatacctgccaatcccccctcacccaggcccctgtcaagaaggtgccggtggtgcgagtcttcggagcgaccccggcagaataaaacccaagacaagccacataaaagcaacctaaaaattaaactgtcatcatattatttgttttaaaactatggaataatatatctgaggaagatttctctcaaaattgtttttctcaatttcaagtcagaagacatgtcttcatctacatggcatctttccttacctctatgtgccatacgatggttatggacagcagccagaaagctatctttctcagatggcattcagtatcgacagagcacttaatgtggctttaggcaatccatcttccactgctcagcatgtgttcaaagtgtcattagtatcaggaatgcctttttatggttatcatgagaaggaaagacactttatgaagatctatctttacaatcctacaatggtgaaaaggatatgtgaacttttgcaaagcggagccataatgaataaattttaccagcctcatgaagcgcatattccctacctcctacagctcttcattgactacaatctttatggcatgaatttaataaatctggctgctgtcaagttccgaaaagcaagaaggaaaagtaatacattgcatgcaactggatcctgcaagaatcatttatcaggaaattctcttgctgatactttatttcggtgggaacaagatgaaataccaagctctttaatattggaaggtgttgaaccacacagtacatgtgaattacaagtggatgctgtagctgctgatatcttaaatcgtctggacattgaagctcaaattggtggaaaccctggtctacaggccatatgggaagatgaaaagcaacggcgaagaaacagaaatgaaacttctcaaatgagccaacctgagtcacaagatcacaggtttgtgccagcaacagaaagtgaaaaaaaatttcagaagagacttcaggaaattctcaaacagaatgatttctctgtaacattatcaggatctgtggactacagcgatggatcccaggagttctctgctgagttaacattgcactctgaggttctgtctcctgaaatgcttcagtgtacaccagccaatatggtagaagttcacaaagacaaagagtcaagcaaaggtcacactagacacaaagtggaagaagctcttattaatgaagaagcaattttgaaccttatggaaaatagtcagacttttcagcctttgacccaaagactgagtgagtcacctgttttcatggacagtagtcctgatgaggctctggtacatcttcttgctggtttggaaagtgatggatatcggggggaaagaaataggatgccatcaccatgtcgctcctttggaaataataaatatccacaaaatagtgatgatgaagaaaatgaaccacagattgaaaaagaggaaatggagcttagtttggtgatgtcccagagatgggacagcaatattgaagaacattgtgccaaaaagagatcactgtgcagaaatacccacagaagttcaactgaagatgatgactcatcttcaggagaagaaatggaatggagtgataacagtttgcttctagccagtctttctatacctcagttagatggaactgcagatgaaaatagtgacaatccattgaacaatgaaaattctagaacccactcttctgtaattgcaacaagcaagctttcagttaaaccctccatctttcacaaagatgctgctacattagaaccctcatcttctgctaagattacctttcagtgtaaacacacaagtgccctttcttcccatgttttgaacaaggaagatttaattgaagacctttcacagacaaacaaaaatacagaaaaaggtctagataactcagtcacttcttttacaaacgaaagcacttattctatgaaataccctggatctttaagcagtactgttcattcagaaaattctcataaagagaatagtaagaaagagatcctcccagtatcttcctgtgaaagtagtatttttgattatgaagaagatattccatctgttacaagacaagtaccaagtagaaaatatacaaacattagaaaaatcgaaaaggattccccttttatacatatgcaccgtcaccctaacgagaatacattgggcaaaaattctttcaacttttctgacttaaatcattcaaaaaataaagtatcctctgaaggaaatgaaaaaggaaacagcacagctctgagtagtttattcccttcatcatttactgaaaattgtgaattactgtcatgctcaggggagaatagaactatggtgcattctcttaatagcactgctgatgaaagtggactaaataaacttaaaattaggtatgaagaatttcaagaacataaaacagaaaagccaagcctcagccagcaagcagcacactatatgttttttcccagtgttgttctttctaactgtcttactagaccacagaaactatctcctgtcacatataaattacaacctggcaataaaccatcccggttaaaattgaataaaaggaaacttgcaggtcatcaggagacttctaccaaaagtagtgagactggatccacaaaagataattttatacaaaataatccttgtaatagtaatcctgagaaggataatgcattggctagtgatttaactaaaaccactcgtggagcttttgaaaataaaacacccacagatggttttatagactgtcactttggagatggaacgttagaaactgagcagtcctttggactatatggaaataaatacacacttagagccaaacgcaaggtaaattatgagactgaagacagtgagtcaagttttgtaactcacaactcaaaaattagtctacctcatcccatggaaattggtgaaagtttagatggaactctcaaatcccgaaaacgaagaaaaatgtctaaaaagctgccccctgtcatcataaagtatattattattaatagatttagagggagaaaaaatatgcttgtgaagctaggaaaaatagactctaaagaaaaacaagtaatattaacagaagaaaaaatggaactatataaaaagcttgcacctttgaaggacttttggccaaaagttcccgactcccctgcaaccaaatatcccatttatccactaacaccaaagaaaagtcacagaagaaagtcaaaacataaatctgctaagaaaaaaactggtaaacaacaaaggacaaataatgaaaatattaaaagaactttgtctttcaggaaaaaacggtcacatgctattctttctcctccctcaccatcttacaatgctgaaaccgaagattgtgacttgaattatagtgatgttatgtctaaactaggttttctttctgagagaagcacaagtcccataaattcttctccacctcgctgctggtctcccacagatccaagagctgaagaaatcatggctgctgcagaaaaagaggcaatgctttttaagggtcctaatgtatgtaagaagactgttaattctcgtataggaaaaactagtcgcgcaagagcacagattaagaaatcaaaagcaaagcttgctaatccctctatagttactaagaaaaggaacaaacgaaatcagacaaataaactagtagatgatggaaaaaagaaaccaagagcaaaacaaaaaacaaatgagaaaggtacatcgagaaagcatataacacttaaggatgaaaaaataaaatctcagtctggtgctgaggttaagtttgtactgaaacaccagaatgtgtctgaatttgcaagtagttctggaggctctcaactactttttaaacagaaagatatgccactaatgggctctgctgtagatcatcccctttctgcttccctacccactggaattaatgcacaacagaagttatctggctgcttttcttctttcttagaaagcaagaagtctgtagatttgcagacattccccagttcacgagatgatttgcatccatcagttgtttgtaattctataggacctggagtctcaaaaattaatgttcaaaggcctcataatcaaagtgctatgtttactctaaaggaatcaacgttaattcaaaaaaatatatttgacctttccaatcatttatctcaggtagcacagaatacacagatatcttctggtatgtcctcaaagatagaagataatgcaaataatatacaaagaaactatttgtcatcaatcggaaagttaagtgaatatcgcaattccctagaatcaaagctggaccaagcatatacccctaattttttgcattgcaaagacagtcagcagcagattgtgtgcatagcggaacagtcaaagcacagtgaaacttgttctccgggaaatacagcttcagaggaaagccaaatgcctaataattgctttgtaacttccttgagaagtccaatcaaacaaatagcatgggagcaaaagcaaaggggctttattttagatatgtcaaattttaaacctgaaagagtaaaaccgaggtcattatcagaagcaatttcacaaaccaaagcactttctcagtgtaaaaatcgaaatgtgtcaacaccttcagcatttggtgaaggacagtctggactggcagttctaaaagaattgttacaaaaaagacagcaggaagcacaaaatgcaaatactacacaagacccattatccaataaacatcaaccaaataaaaatatttctggttcccttgagcataacaaagcaaataaacggacacgatcggtaacgtccccaagaaaacctcgaactcccagaagtacaaaacaaaaagaaaaaatccccaaacttctcaaagtagactctttaaatttacaaaactctagccagttggataactctgtatcagatgatagtcccatctttttttcagatccaggctttgaaagttgttactcacttgaagatagtttatctcctgaacataattataattttgatattaacacaataggtcagactggattttgtagcttttattctggaagtcagtttgtcccagctgatcagaatttgcctcagaagttcctaagtgatgctgttcaggatctttttccaggacaagctatagaaaaaaatgagtttttaagtcatgacaaccagaaatgtgatgaagacaagcatcataccacagactcagcctcatggattagatctggtactttaagtcctgaaatttttgagaagtcaaccatagatagcaatgagaatcgtcgccacaaccagtggaaaaatagctttcatcctctaacaactcggtctaactcaataatggattctttctgtgttcagcaggcagaagactgtctaagtgaaaaatctagattgaataggagttcagtaagcaaagaagtgtttcttagcctcccacagccaaacaattcagactggattcaaggtcacaccagaaaagaaatgggacagtctcttgactcagccaatacctcttttactgcaatactctcctcccctgatggtgaacttgtagacgtggcctgtgaagatttagaactgtatgtttcaagaaacaatgatatgttgacaccaactcctgatagttcaccaagatctactagctctccttcacaatctaaaaatggcagcttcacccctcgaactgctaacattctgaaaccacttatgtcccccccaagtagggaagaaattatggcaactttgttggatcatgacctgtctgagactatttaccaggaaccattttgcagtaatccttctgatgtaccagaaaagcccagggagattggtggacggctcctcatggtagaaactcgacttgcaaatgatctggctgagtttgagggagacttttccttggaaggacttcgtctttggaaaacagcattctcagcaatgactcagaatccaaggccagggtcaccccttcgcagtggccaaggagttgtcaataaagggtcaagtaatagccctaagatggttgaagataaaaaaattgtgattatgccttgcaaatgtgccccaagtcgacaactggttcaagtgtggcttcaagccaaagaagaatacgaacgttccaagaaactgcctaaaaccaagccaactggagttgtaaaatctgctgagaactttagctcttcagttaacccagatgacaaacctgtagtgcctccaaaaatggatgtaagtccatgtatactccccactacagcacataccaaggaggatgttgataattctcagattgctttacaagcaccaaccacgggatgtagtcaaactgcaagtgaaagtcagatgctgccaccagttgcctctgcaagtgatcccgaaaaagatgaagatgatgatgataactattacattagttatagctcccctgattctccagtaattcccccttggcaacaaccaatatccccagattccaaagcattaaatggagatgatagaccctcatcaccagtagaggagctgccttcattggcttttgagaacttcttaaagccaataaaagatggtatacaaaaaagcccctgcagtgagcctcaagagcctctagtgatatctccaattaatactagggcaagaactgggaaatgtgaatcactttgctttcatagtacaccaatcatacagagaaaacttctggaaaggcttcctgaagcacctggccttagcccattatcaacagaaccaaaaacacagaagttgagtaataagaaaggaagtaatactgacactcttagaagagtactgttaacacaagcaaagaatcaatttgcagcagtaaataccccacagaaagaaacttctcagattgatggaccatctttaaacaatacttacggtttcaaagtcagcatacaaaacttacaggaggcaaaagctttacatgagatacaaaatcttaccctaatcagtgtggagttgcatgctcgaactagacgagacttagaaccggatcctgaatttgacccaatctgtgctctgttctactgcatctcatctgacactccactgccagatacagaaaaaacagaactcacaggtgtaatagtgattgataaagacaagacagttttcagtcaagatatcagatatcagactccattacttattagatctggaattacaggactcgaagtcacctatgctgctgatgagaaggcactttttcatgaaattgcaaatataataaagaggtatgatcctgatattctgctaggatatgagattcagatgcattcctggggttacctcttacaaagggctgccgctttaagtattgacttatgtcggatgatctctcgggtgccagatgacaaaattgagaacagatttgcagctgaaagagatgagtatggatcatatacaatgagtgagataaatattgttggccgaattacactaaatctttggagaatcatgagaaatgaggtggctctaactaactacacctttgaaaatgtgagctttcatgttcttcatcagcgttttcccctctttacctttcgagtcttgtcagactggtttgataacaagacagatctatacagatggaaaatggttgatcattatgttagccgtgtccgtggaaatctccaaatgttagaacagctggacctgattgggaaaaccagtgagatggctagactttttggcattcagtttttacatgtactgacaaggggttcacagtaccgtgtggaatcaatgatgttgcgtattgctaaaccaatgaactatattcctgtgacacctagtgttcagcaaagatcccagatgagagccccacagtgtgttcctctaattatggagcctgaatcccgcttctatagcaactctgttctcgttttggatttccaatcactttatccttctattgtgattgcatataactactgcttttccacctgccttggccatgtggagaacttgggaaagtatgatgagttcaaatttggctgtacctctctgagagtacctccagatttactttaccaagttaggcatgatatcacagtgtcccccaatggagtagcttttgtcaagccttcagtaagaaaaggtgtactaccaagaatgcttgaagaaattttgaagactagatttatggtgaagcagtcaatgaaggcttacaagcaagacagagccctgtcacgaatgcttgatgcgcgtcagttgggacttaagctgatagcaaatgtcacatttggctatacatctgctaatttttctgggagaatgccatgcattgaggttggcgatagtattgttcacaaagccagagagaccttggaacgagctattaaactggtgaatgataccaagaaatggggggctagggttgtatatggcgatactgacagtatgtttgtgctactgaaaggagccactaaggagcagtcttttaagattggtcaggaaattgccgaagctgtaactgctaccaatcctaaaccagtgaaattgaagtttgaaaaggtatatttgccctgtgttttacaaacaaaaaagaggtatgtgggttacatgtatgaaacactggatcagaaggacccagtatttgatgcaaaaggaatagaaacagtcagaagagattcctgccctgctgtttctaagatacttgagcgttctctaaagctgctatttgaaacgagagatataagtctaattaaacagtatgttcagcgacaatgtatgaagcttctggaaggaaaggccagcatacaagactttatctttgccaaggaatacagaggaagtttttcttataaaccaggagcttgtgtgccagcccttgaacttacaaggaaaatgctgacttatgaccggcgctctgagcctcaggttggggagcgagtgccatacgtcatcatttatgggacccccggagtaccacttatccagcttgtaaggcgcccagtggaagtcctgcaggacccaactctgagactgaatgctacttactatattaccaagcaaatccttccacccttggcaagaatcttctcacttattggtattgatgtcttcagctgggtatcatgaattaccaaggggatttattgcggcactattcacaatagcaaagacttggaaccaacccaaatgtccatcaatgatagactggattaagaaaatgtggcacatatacaccatggaatactatgcagccataaaaaaggatgagttcatgtcctttgcagggacatggatgaagctggaaaccatcattctcagcaaactatcacaaggacagaaaaccaaacaccgcctgttctcactcatagatccataaagctaccagcccctcgcgaagtgaacctgaagggcggaaaggcactatttcacaatattttactaccttacactgtcctgtgtgtgatgacctaactcagcatggcatctgtagtaaatgtcggagccaacctcagcatgttgcagtcatcctcaaccaagaaatccgggagttggaacgtcaacaggagcaacttgtaaagatatgcaagaactgtacaggttgctttgatcgacacatcccatgtgtttctctgaactgcccagtacttttcaaactctcccgagtaaatagagaattgtccaaggcaccatatctccggcagttattagaccagttttaaattgtcaatatcacagtattacaggtgctatttttttcagtgcttaccactaaactgttgtgcatggtgctttttaactttcaacgagtcaaggatgttcactgtctgttatctgaagactatgaagacttctatgctaaccgaattaaaatgtacttgttgatctctgaatagctcacttcttacaatgtacaaattcctcattctgtcaccttttaaacattgttttataatgcaggtgttggatttgctccagtatgtgtaccatcttgtaaattcatttgagtagatcatgtttacttcccagtggaaggagcactgaaaacctcttaaagaaaaagcatttgtgtgttttccttgaactgtctgtatcaagacgtgttacttcgagatatccattcactttataattttgactgcaaaatattttgtaaatacacttttttacttttcaaacgagcaaaataatgtgcaatgatttttatacaaatgattttcaagttgtttggtatatttcctctaggttttgcttgactcaaagtagatcgttattttgatcaaactgtgcaaacagtagtaccacgtgtagcattttgaaacattatttttttttaaaaaatgctgtcttgctttagctattaatggggcattgtgaggaactgtgcaaagacatttttgttacaaacctgtgggcctgttgcaatactttaaaaataaaaaattttattccatttgcttgttttgtatagacatttctattgcttctaaatatacttaaaatattttctttccttatgtactgtacagttaatcttatttgccatcatcttgaacacaaaatgtgtatttagaatatttgtataactgtgtaaaataaaaaaggaattatgtggtcagtgcattgttttttaaactggaaatcattttgttttaaaagttaataatggaaaccatattaaaattg

SEQ ID NO: 88389 - DNA, 677 bp, Homo sapiens
ttttttttttgagacggagtcttactccatcacccaggctggagtgcagtggcccaatctcagctcactgaaaactttgcctcctgggttcaagtgattctcctgcctcagcctcccaagtagctgggattacaggtgcctgccaccatgcccagctaatttttgtatttttagtagaaatggggttttaccgtgttggccaggctggtctcgaactcctgacctcagttgatccgcctgcctcagcctcccaaagtgctgggcttacaggcctgagccaccacgctcagctcagcttcaccctgtcggagaagaactggctgatggaggtgggcaggagcgtgaggaaggccaaggggtgggcgaaggagatggaaaggacagcggagatgtaggccacgccggccaccatggagtagaggcaggccagggaggtgtagaggcagaacaggacgaagttgcgcatgttcctgctgccgatgcagttgccggtgaagaaacagtgatggtcgtgcctcagggtgactctggcgcacactcggcagaagtgggtgctaggtgaggggcatggagtcttcctggccgaggccccctggcaggcccccaggtcgtctggggagttctggatgacaaggacgtaattgcccagggcgttggccctcgtgccgaattcatgg

SEQ ID NO: 88390 - DNA, 443 bp, Homo sapiens
gaggaattcggcacgaggtccatttggagtaatgaaccacaggaaagaaaaaacaccccatgtttagttcacctactgtctttccatatctctgcctgtatacacgacaaaggcctgttctttttgtgtggcaccaacacatacctttgtctccctaccaactggactggaacctgtaccctagtttatctatctccctccattggacttgttcctcctgatcgacctttgcccatcccacccatccaatatgttagaaaaggaagggccatccatgtcattcccttaatagccaccttgggtataacctctggacttggattgagagcaagcagattagccacttccataacatactttaaggctgtttcaacagaactacagaactcattagaagacacagccccaagccttataaaagtccaagaccttggccaggcacg

SEQ ID NO: 88391 - DNA, 443 bp, Homo sapiens
tacgctgagcgaattcggcacgaggaacggatgggtagggtggtgggagaggacactgaggatgtggcctgtagactgagtgcagccagaagtgtatggcggggggcggagggggggtgccgaggaagtttttagtgagatgggggagggacctacatgtaaggaaggcaggcagtgaccatcactcaccaatcagcttcaaagtcagaacacaatgtggcattgtccacttgatatcgtacttgccggtggcagtgtaatagtatccagccagaaggtaggcctaggagaggcagaagtatttattctagcatcactactatttcttctccttgctctgaaattcaatggtctctttcctttttcctttctcctcatcccatcattaaaagccttaataaattcctacaaatggaggtgctgaaaacctgtaatgggaagag

SEQ ID NO: 88392 - DNA, 498 bp, Homo sapiens
actgtcgttttatctcaaatgtccctacgggggcccggctcatccgagagatggaccagatcttttctgatgtggagatgacaacgttagagaaagtcggcagggagacctgggtaatcacttcgtaaatacttaaccagatacttagctgccatcctaggtactgtgggagaggtggagagatgaagccacagcagcccctgcctcctggcttagcatctaacctgaagacaaaagatgtttgtatttgagcccacctctgattagtcccaagcaagggccatggccataagagtcatcagcctggaggagcaaaaaagcccatcccatgaggacagagaaagctgctttgaggggctgggatttgagctaggttcagaacatgggccagggtttggctaggtgaaactgatgtgtcatgtgaagcagaaactgttttggatgtgtggggactcttgagccagagctcagtaaagtggagagtcaagaaatgagtat

SEQ ID NO: 88393 - DNA, 432 bp, Homo sapiens
  misc_feature (1)...(432): n = a,t,c or g
ggcgatttctttcctaaactatgtggtggtctacgtcctcactgacttatcaacatgctaccatcatgcacttcctatctctattcctcttctttaaatttggttccaaatggctcacaccattattctgagctattacctgcctacgcagtcctagaaagtaagtgattcaggaaacattccccaaaagtaaagtttctcaggtaagatcagaagactcccatgagtcactgctgctcaggatcacatctggctccttgaagagtgattcatcagaccttacatagatcttgtcataaaaatgaaagaggcctcgggggaaggtcttgggctggtggcttctgttggagtcctgggctgtggggtgaaagccgtggctgtagagcttcatgcggagttacttagctttgctctcctgtggacaggccatgn

SEQ ID NO: 88394 - DNA, 761 bp, Homo sapiens
tccagcgtggcggaattcgtggccatttgattggtggccacttctgatggcggccaacatgactgaaccatttgggatggaaaagcacctttactctcagccacctgttaactaatgctggaggtctgtgaggaacagaagtgtgaagaaaaggttttccctctggccacgatttacctggactgtttcttcgccaggatcccaacttcaaagtcccatctgcaactcctgggtgctgtctgcatgttcctggcctccaggctcaaagagtccagcccactgactgccaaaaagctgtgcatttataccgacaactccatcaagcctcaggagctgctggagtgggaactggtggtgttgggaaagttgaagtggaacctggcagctgtcacgcctcatgacttcatttagtacatcttgcacaagctgcccgagcagggggagaagctgtctccaatctgcaagcaagtccagaccttcaatgctctgtatgcaatgtacccgccatcaatggttgcaactggaagtgtaggagcagctatctgtggacttcagcaacatgaggaagtgagctcactcccttgcaatgccctgactgagctgctggcaaagatcaccaacacagatgtggattgtctcaaaagccaaccgggagcatattgaggtggtcttcctcaacagcctgcagcagtgccatcaggaccagcaggacagatccaagtcagaggatgaactgggccaagccagcacccctatagact

SEQ ID NO: 88395 - DNA, 441 bp, Homo sapiens
  misc_feature (1)...(441): n = a,t,c or g
taaccatgggattgccgcgaatncttaaggactctgcccacatcccacatttgccgtgcatccctgagttccaaagcagcctctctaggctctagagcccctaaatctccaaagacagcagctcctccgcgagctagctgcccctgaccgaggctcacagcttgcctaggggagggcagggcaaaagtccctgctattctcttcctttcctggctcaggctttgatccaaatagctcccttcttccaagacactactccccaggcctcctcttcctgataataatagtggctaacaagttttactagattttaggcaactcaaggagctagctgttattttgttcattctacaagtgaggaaggaagcacagacagtggttaagttacatgtccagagacacacagagggcctagtgcagtagctcatgcctggaatctca

SEQ ID NO: 88396 - DNA, 440 bp, Homo sapiens
atagctcgacacgatccaggcaaggagggagggaagccccttttcttctccctggccttactgagagttgaaacctcacttccaggggccccacccaatccatcctgtgctcatgggtcccttggtgggcaagggggtgggggaccgctgctgggtttaacagggtctgcaaacttccccatgatgcccttaaaaggtgtcctgccatcccttaagcatctggcaagcctcctagcatctccctgttttcttgtactgggcggggtctggcctgtggggcagaaacagaggctctgagcaggcggggggagtgggggagggaggggacggatacagggttgagtgtcttcctttcttcttgccagaccagtgagaatttggctttaaatttttaacctaaatagaggtatattcattctctctccctctagatgcaaagg

SEQ ID NO: 88397 - DNA, 528 bp, Homo sapiens
acatcattactccaagcttggcaccaggaagactttgagctgctttttaaaaaaatcttcacataactttttatagtaacttgatgcccctctgtttcagggttaatcaagtctgatctgcgaagacacaacataaatataggaattacaaatgttgatgttaaagctgtaagtaatatttttatgattatactgttgagaagtatgtatagaataaatgtgaaaccatatttttttatttagctatttttctcccgagtcaactgttgatctgttataataggatatgccagatgctatacatttttaatcttctgattgtttttatagataccagctgacagtcccacagaccaagaaccaaaaacggttatgttgtccaagcagtcagaatcagcaatttgaagagaaaggcaaagttactgtcctgtagtaattggggacaatgtgatcatccttggagagagatgtgagcaccaaggctgggtttgtatgtggtgggggaataaacacacttacttgaaaatt

SEQ ID NO: 88398 - DNA, 788 bp, Homo sapiens
ttttttctgtttcgtaaaactcatttattcaacaaagcagtacaagcctccccttcaatcaggacctgcctgcaggggtgggctacttcagtgtcttcagccaatgggagctagagggtttaatactttagtccacttcccttcatctctggccccatcgacaacatggggaaggggagtgagggcctggtagaagggtactaaggccccttatttcgttcgctggtagaactggaagactgctttctcctgctcataggtctcgatggagccgggtcgtagtcgtcggatttcagcaatggcatctcctgcagccaagccccgctccttcaccaggtaacaggccagcatggtgccagtgcggccaaagcccagagcacagtgcactcccacagcctctccccgtgcgttggcctcgtccacgatctgcacgaagcggtcgatctggtcgggggccggcgggcagaagtcggggatgcgcaggcggtgcagggtgaggccggggcagctgtcgctgtgagggggcccgcgctccgtcagggacaccaggtgccgcacgcccaggtccaacaggaactggtagtgggcggggagccgcggcagcgccagtcccgccagccggcccggaagcacccaggagaagttggggggctgcacgcccatcgctgggaaagggcacaggacagcgggtcatgggggccgaggctggccagccccgctccgcccacgcgtcccctcgcccgctccgagcgaagtaactcaccctcgtgccaagcttggcgtagtca

SEQ ID NO: 88399 - DNA, 404 bp, Homo sapiens
aatttaatgaaagaaatgcaaaacctaaactctgaaaaccataaaacatgggaagaatataaagatactaaataaattatgtcgtatttttatggataggcacttaatgttattaaaatggcagtgctccccaaattaatgtacagattcagtgccacccttgtcaaaatcccccaacatttaactgattcctaatagcttaaaatcactttgaaaaatccatatatttataaccttttcttccctctatgatttctggtcagcttgggttttgtttttcattccatttacttcatcctcgaaaagatctatatttattctcgtttatggacattgagaaaagaaaataactttcatgtgagaaatgcaagtccttttaaataatcaggcccagagagatattc

SEQ ID NO: 88400 - DNA, 353 bp, Homo sapiens
cgcaaaatcaaatgctagcaaggacacagagaaactggatcactgccacactactggtgggaacgcaaaatggtacagccgctctagataaaactaactatgcaaataccatacaacctagcaatgacactcttgtgccagtgaaattattgttggcaagaaagaaaaaggtagacttatgaactactggtagaaatgtttcgaaagccagaggctgctctttgactcagcaacccaactcctggaaacctataccagaaatataaaatcctcagtatattaaaaaaaaaatgatgcttaagaatgtctattgcttcattgtccatcatagtaaaaatcagaaacaaagtcag

SEQ ID NO: 88401 - DNA, 1019 bp, Homo sapiens
cacaggtctcagaaaactaccattttattacttttagcattagatacgtttacaataaagaattatgttaatagagcctaggagttccaattgctagttgagaatcacctcaagaaaaatagaaaatttgtagaaataattattaaattttaaaaatctaagccttttagacttttcaaaataaaaatttaagtatgctgccttcacagtgaatttaatgtgataagattttcattcaaatgacattatttctatttaatgttttaatacagttatgcatgaaatcaaattccaacttcttaaaaaatgtggagtttttttggatcatttgatcatttcctataaaccatgtattccggtctctatattactgagagtgatgttagattcttggtctactgttgaagataccaaacacatgcaccatttgaatgtgttcttgaactaagtcctaaaacaaagtgaagcagtgtgtttttgtagagctcaggtctaggtgctgccaggtggggtagtgccactcctccagaaggccctggtccttgtgaggcccaacagatgtcatattctttgtttatattcaattcggcattgcccttccggctgggggacacccaccaaatggagataactctgtttgggtaatgggtccagaagactacagtcatatttataaagtattaaaataatacacatttgaacctctaacagagcaaaccaccttgcaggacactggaacttcccgccttcccaaatgcccatgaaagcaagtcccaagaaagagtgccttcctcctaaatttgccctttttcccaacgttcaggtttgaacaattccaggctcaggaaaatactttggatttctatgcagccaaaatggagacaacatcaacaagtcaccagaaggaatgatgtaattcaaaatttccacaggcttcaccacttttctagtaatgacaccaggagcttttaaacgaatggtttccaaaacacaccatttaattagaaggagattctcca

SEQ ID NO: 88402 - DNA, 352 bp, Homo sapiens
  misc_feature (1)...(352): n = a,t,c or g
ttggagaatagctgaaacttaagcatgacccttttctctattagtctttctgtccagtggttgccaaatgcatcttctgaggtcttcagctcgatgctgtgtggggaactcatgccccagttcctgagaaatgacaagtcagtgctggttctcccttcttccttttaagtgagcagcctctggcagatctttctggaagtgtagaaggttttcctcaggtttggactgagatgtggggatggtaagaacttctttcagtaggtagattttcatgtgaataagtgaaagggtgagggggatccacataattcctaaatattcaggaaagtggaaacaatggggtatgggtttn

SEQ ID NO: 88403 - DNA, 385 bp, Homo sapiens
tgaagacatttcaataaatcactccagaaatgacttttaaatgattttgtgaaagaattacatgtgaataactttttttttccagaaaaatggctttgaacagttttgtatcaaatttgttaatgaaaaactgcagcagatttttattgaactgacattaaaggcagaacaggtaagcagcccctcttccttcatcctattctatttataatttattttgtttaagagggtatagatttctgtcttttgttaatagatttcggttccagtcttatattaggaaatgcatctaataaagtcaggcagaaaaaccatatgccattgtggcattttaatctatgaaatataaataccgcctgcagcatttgccttcttctttaagcaa

SEQ ID NO: 88404 - DNA, 370 bp, Homo sapiens
ctagactgcttatctatatttgaatatgaacaccacatgccatttaaacttattgtaaagagctgaatggcatgtggtgttcatattgatgtcttagtgatttggtaaggcaataacttacatgatcgtactagctttgagacagacaagttcaggaagaccagatactatatgagctggcatttggctgtttgcaagtagaggttacagtggcacagcagatatttgcccaatactatagcaaatgccaaatttgcatgtaacctactatttcgcctctaatgagtccaaaagattatttaaaacaattctttttaaaattgccttatgaatatgattttcttttggctttatatttttgaacacatta

SEQ ID NO: 88405 - DNA, 382 bp, Homo sapiens
agcatgtccagtttaggatttacaaaaacaagtcgattatactttctttcagaagtattttttttaaagactaactaaatgctgcagaaaattattagtagaatgcaggcttctttaattctgctcttatttcagtaagtctttttaagtgggttgttgggttctaattattattgaaagctgtttttaaatgtgctggctccacgggcaggaaggcacggacgagctggtgagtttctgccacctactgacaagtgatggtaacagcacatgcttctttttttaagcatccggggaccttttttgctgtcagcttacccacgcaacgtttatcagtcaggtgaaagtagaagcgttcatttaagactctcaacttactggg

SEQ ID NO: 88406 - DNA, 383 bp, Homo sapiens
tagatggtaagatcgtaggtttccagcccacatgagaaacaccgttatttttttcattcctgccccaaccatgggccatgggtcagtgctagcaaataaattacttattaaggaattatttttctttttggcctaggtgatgtcagtcctttgaaaaggattattgaggactcttgaggcattcttggaggtgattattcctttattcagttgtgaaccagtttttggtgtcagtggtttgagagcagactgtagatatggttacattttcattgcaaaactaatgtggaatattctggatgaactggcttactactttaacaaatcattctaattaaacatcatgggaagaagtttgatacaattatggcagattttagagg

SEQ ID NO: 88407 - DNA, 440 bp, Homo sapiens
gccatagaaatcttttgccaccttttctacttttgctatttttgctgttattaagattcaagatttttagttcttcagaatccactcccgttttttggtgagtaaacccacggcacctctgccaattcatcacccctcagagatgccaccccagccccatttaagaatatcccaagaaggaggctgctgtgcaggcaggcggtgggaggctgcagagtgccaagccacacagtgcgccctgtgctgcctggcctgctagctacacagtcaggatggcaacagcgatccccggaaaccacaaggcgagatgtctgctcatgccttccctgtgcagacgtgcggggaggaagatcagaagaaaaccccacaagttcctatcaatttcacagaactttccaagtgctcttagagttgaaagataatgtctggggaaagagaag

SEQ ID NO: 88408 - DNA, 393 bp, Homo sapiens
gggagcgtaatcactctcatcactccagataggaatgctgagcatacattgaatacataaattaatatacatatgatatgcaaatgctcccagagagtcctgaaggccgcccatctgagaagcaggggtcacagacatgctatgcttttacccaagctgtttcctctgcctgaatcactcgccctgctcttctctacttggctcgctcctcctgtctctcaacactcccctaaagtttccctcctctgagacctcttccctgactccatccaggcctggcgtccggctctgctctgctcattctccaaggagagtggcacagagaggcaggctgcagaggaaatacagaatcaaccatgcagcactgcagagagtagagggtggctgaggctt

SEQ ID NO: 88409 - DNA, 500 bp, Homo sapiens
acgccagtgtggccgctgattgcgctgtcgaatatcgctcagggctccgccgtgataggcattatcatttccagccgcaagcacaatgaacgcgagatcccaggggaggtcttccccagaactggggttgggaagggaaagagtctgggctaaccactccattagctgcagccctaccgccagcacctgggggcagggagttacagtcaaactcttaaaaaacaaatagccgaaagtgcagtgaggttaagcatcccctgaggactggacgagcagacctgcctgctttgcagaagacggggaggggaaggagagcagggccatctcctgcccagccccgagcctccctgatagtcctcccacccacccagctccggatgatgctcccactcacaagattgctgctttttccatagaccggtaggaactccaggccttttctccagctgtccctgaattctccttgtttccttccttcctaacttcctccatccaaggct

SEQ ID NO: 88410 - DNA, 425 bp, Homo sapiens
actgtccgtccctgtacatcgatcagactgggataaccctggcggtacccatcttattccatttgccacagaaacccgaccgggtgagcttcagcggcgttaccgcccatcaccacgacgaggttggcgttcttgatgtcgacccagtggttggtcatcgcaccgcgaccaaatgttggagcaagacttgctaccgttggtccgtgtcagacacgcgcctggttgtcgaccgcgagcatacccagcgcgcgggagaatttttgcgttaaatagccggtttcgttactcgacgcggaagcacacagcatcccggtggagagccagcggttaacagtcacgccttcggcgttttgcgcaatgtagttagcatcgcggtcttctttcatcagtttggcgatgcgatcaaacgcctcttcccaactgat

SEQ ID NO: 88411 - DNA, 605 bp, Homo sapiens
actagtgattttcccgggtcgacgatttcgtgtctgaccaaggccctcactacccgacccttagagccaatccttatcccgaagttacggatctattttgccgacttcccttatctacattattctatcaactagaggctgttcaccttggagacctgctgcggttatcagtacgacctggcatgaaaactattccttcctgtggattttcacgggccgtcacaagcgcaccggagccagcaaaggtgctggccccttccagccataagaccccatctccggataaaccaattccggggtgataagctgttaagaagaaaagataactcctcccagggctcgcgccgacgtctccacattcagttacgttaccgtgaagaatccatatccaggttccggaatcttaaccggattccctttcgatggtggcctgcataaaatcaggcctttgaaacggagcttccccatctcttaggatcgactaacccacgtccaactgctgttgacgtggaacctttccccacttcagtcttcaaagttctcatttgaatatttgctactaccaccaagatctgcactagaggccgttctaccccaccttccgg

SEQ ID NO: 88412 - DNA, 204 bp, Homo sapiens
  misc_feature (1)...(204): n = a,t,c or g
tttcgtcagagtcatggccacccatagagcctgcaccaccacacccagaagaacgaggattagtatattcatgagccgtatcagagtcacggccacccatagagcctgcaccaccatgcccagaagaatgaggattagtatattcatgagcagtatcagagtcacggccacccatagagcctgcaccaccacgcncaatgtatt

SEQ ID NO: 88413 - DNA, 408 bp, Homo sapiens
aatacagctttggctttgttctttccatgaaatcttagattgaattatgcccgccatgcaggtcaaacaattctgcagtcaagaaaacctgagatttggagctgggcccctgtaaatgcacagtgatgtttccgtggcaagcttagaccgtctgggggcctgttcatgtctgtggctgtggccatgacggcccagtacttcttggtcagctcttacctttttatctgtttcctgccaacagatgttgcctttatcaccaccgtgaccttcctgtggaaagtgtctgcgatcaccgaggacatctgcctcccgctgtatgttctcaagtacctgaggcgcaagctctctcctcccagctactgcatgctggcctcctaaggggctgtttacccccagcgggcttgcccg

SEQ ID NO: 88414 - DNA, 796 bp, Homo sapiens
cctccctaggccttatcaccccaccaatgtcaccaggcccacggctctgaccacggccagcaatgaaagcaacgctccgcggcccaagtgcagaagctagctcagtaccgtgtgcggcaggttgtaacagaaggccaggagccagcccagggaagccaggagggaggacaccagcaggaagttgaggtccaccaccaaggtcagcacgtccagcgacaggcccaacccattcactaccaggtacactgcctccatgatagggctatggaagttagtccaaaacaaagtctggctcctcggttggggggttgtcaaggttgtcaatattttagggggtctgggattaatttgggaggaaaatgagcagtctccaacccagggggtaccaagaatctgaggaagaagtgggtaagacggaagtggagtcttggtagagggaaaggtggccaggtgccagtccaagagtccaggttttgaagatgggctgtttgggagggaagaggccaaacatctctaaagcgaaggcgagcccaggccgtaggagcgacctcagctttggatgcctggtgtggcgaaccacggccgggcaacgggtcagaccgggaggagacgaggaacggatggaatgggatcggatcggatcgggtcgcgtcgggtcgggccggggccgggtggggtcgatgtaagctgggcgcaggctctcagtccagctacgcaggtgcccctgtccccgcccggcccccgtcttcccgctagcggcgctttgcacccaaaaggggagtgggagaggacgaaa

SEQ ID NO: 88415 - DNA, 739 bp, Homo sapiens
ttttttttttttgagatggagtctcgctctgtcacccaggctggagtgcagtggagtgatctcagctctcttcaacctccgcctcccaggttcaagtgattatcctaccttagcctcccgagtagctgggattacaggtatgcgccaccacacccagctaatttctgtatctttagtaaagatatggtttctccatgttggctaggctggtcatgaactcctgatctcaggtgatccgcctgcctcggccccccaaagtgctgggattacaggcgtgaaccaccactccaatcttgtttcttgtaaaaagtactgtgtaactagagcacaaaattgtccttgtgcctggctcagggcctggcagacccttgttcattcctacttgggaagcaaacggatgcctgagggatggggggttagggaacagagtggccttagagaccctaggaattcactctgctcggtcctcttcttatcgtccccaggtctggccagcatgacccagaacttagagccacttctgaagaagcagggctgggactgggcgtgagtcctgggaatgggggagggaggcaagggcaggctggggaccctcccagggtcccccagggcaggctcgttgacctggggttctcctaggcttcctgtggccaagctgtctattcgcgtgggactggcagtgcgcggcttctgtgctgggtcgccttttctcactttcccaggcctgggggtcggcccg

SEQ ID NO: 88416 - DNA, 142 bp, Homo sapiens
ttttttttttagggggggcttttaaaacccccctggggatttttgggaaaaaaccttttttttggggggggcaaatttggggcccacccccccaaaaaaatttaagcctttgggggaaaaaaaaatttttgaggggggtggg

SEQ ID NO: 88417 - DNA, 1242 bp, Homo sapiens
ggcttactcactatagggctcgagcggccgcccgggcaggtccgcatcatggccagcaaccaggaaatgctacagcacaaggatgcgcgggttaagcttgtgacagagctgctgagtggcattcgggtcatcaagttctgcgggtgggagcaggcactgggagcccgagtagaggcctgccgggctcgagagctggggcgactccgggtcatcaaatacctggatgcggcctgtgtatacctgtgggctgccctaccggttgtcatctccatcgttatcttcatcacctatgtcctcatggggcaccagctcactgccaccaaggtgttcacggccctggcactggtgcgaatgctcattcttcctctcaacaacttcccttgggtgatcaatggtctcctggaggccaaagtgtccttggaccggatccagcttttcctcgaccttccaaaccacaacccccaggcctactacagcccagatccccctgcagagccatctacagtattggagctgcatggagccttgttctcctgggacccagttggaaccagcctggagaccttcatcagtcatctcgaagtgaaaaagggtatgctggtgggcatcgtggggaaggtcggctgtgggaagagctccctgctggctgccatcgctggagagctccacagatgggaacaagtacaatgtggtggccatactctccactgagctcctgaacagatgctgcgtgggcatgtggcagtgcgggggctgtccaagggctttggcctggccacccaggaaccctggatccagtttgccaccatccgagacaacatcctctttgggaagacatttgatgcacagctgtacaaggaggtgctagaagcctgcgccctcaatgatgacctcagtatcctgcctgctggagaccagacagaggtgggggagaagggtgtcacccttagcggaggacagcgtgcccggattgcccttgctcgtgctgtctaccaggaaaaggagctctatctcctcgatgaccctctggccgctgtggatgcagatgtggccaaccacctgctgcacaggtgcatcctgggcatgctgagctacaccacacggctgctctgcacccaccgcactgagtacctggagagggctgacgcggtgctgctgatggaggccgggcgcctcatccgggctggacctccctctgagattctgccactggtacaagctgtccccaagtcgacgcggccg

SEQ ID NO: 88418 - DNA, 508 bp, Homo sapiens
gacttcccgttcgacgacttcgcgccggtcttggatgaagcggcggccgtggtgagagcgtggggaagggtggggtgagggggcgaggccgcagctagggcggcgaaactctcctcccctcggccccaccgcgtgggacggcgtgaacgtggtgtcggagggatgtcagccttctctgaggcggcgctggagaagaagctgtcggagttgagcaactcgcagcagagcgtgcagaccttgtccctgtggctcattcaccaccgtaaacactcgcggcccatcgtcaccgtgtgggagcgggagctgcggaaagccaaaccaaacaggaagcttacttttctctacctagccaatgatgtcatacagaacagcaagaggaaggggccagagtttacaaaagattttgcaccagttatagtggaggcttttaagcatgtttcaagtgaaactgatgaaagttgtaagaagcaccttggaagagtgttatctatttgggaagaaaggtctg

SEQ ID NO: 88419 - DNA, 299 bp, Homo sapiens
atccgagcactatacacataagctcggacgcctgcgggcatcgcaatccgcaattaccggctcgacgatttactacgaaaccagcgacgacttatagttcaatgccgaccgctatctattcgccgaaaacccggaggcgcatctcgatacagccaccagcggcagtaaatgaaattcctgtccgacaggcgctgcaatgcgcctgtttgtctcgtcggtaagcgaaaagtataaagtgtaaagcctgctgtgcctaagggctaattctgcacagaattcatcacactggcgaatcgctc

SEQ ID NO: 88420 - DNA, 368 bp, Homo sapiens
ctcaaggtatgcaacatatggcgcgtatgacatgcatcccatacttggtctcaccggcatcctcaacatacaagctgaataatcaggagtctcaggacagctcagccagcccatcaccaaggtgtccaacaagtcgatcaaggacatgatggacaagagtaacaagggcagggaggcctggggtgtcctatgccagctctcatatctgacctctatgacagacatgcaagccccacacgacaggcccaacaggccgttcctctggcaggtcagcaaggacagcatacacatcctggtaaaagtggtcaaagcagtcgcagcaatgccaggtaatcatcatcatcatcatcattaacctaggtctagac

SEQ ID NO: 88421 - DNA, 1619 bp, Homo sapiens
tgctggaattcgccctttcccgggtcgacgattttcgtgttttttgctgtcagaaggaagcctgcctctttgcatgcaggtggcctgtggagaggagaaacacagggcaccaactatgaagactctcagggcgcgatttaagaagacagagctgcggctcagccccactgaccttggctcctgcccgccctgcggcccctgccccatcccgaagccggcagccagaggcaggcgccagagtcaagactggggcaagagtgacgagaggctgctacaagccgtggaaaacaacgatgcacctcgggtggccgccctcatcgcccgcaaggggctggtgcccacgaagctagaccccgagggcaagtccgcgttccacctggcggccatgcggggtgcggccagctgtctggaggtgatgatagctcatggcagcaatgtcatgagcgcggacggggcaggttacaatgccctccacctggccgccaaatacgggcacccacagtgcttgaagcaactactgcaggcttcctgcgtggtggacgtcgtggacagcagcgggtggactgccctacaccatgcagcggctggtggctgtctctcctgctcagaggtgctctgctcctttaaggcacatctaaacccccaagatcggtcaggcgcaacacccctcattatagcagctcagatgtgtcacacagacctgtgccgtctcctactgcagcaaggggctgccgcgaacgatcaggacctgcaaggcaggacggccctgatgctggcctgtgagggggccagccccgaaacagtggaggtcctgctgcagggcggagcccagccgggcatcaccgatgcgctggggcaggacgcggctcactatggcgccctggcgggggacaaactcatcctgcaccttctgcaagaggcggcccagcgcccctccccacccagcgccctcacagaggatgattcaggcgaggcgtcatctcagaactctatgtccagccatggaaagcagggggcccccaagaagcggaaggcgcctccacctcccgccagcattcccatgccggatgatcgagatgcctatgaggagatcgtgaggctgcggcaggagaggggccgcctcctgcagaagatccggggcctggaacagcacaaggaacggaggcagcaggagtccccggaggccagctccctgcacatcctggagagacaggtgcaagagctacagcagttgctggtggagagacaagaggagaaggagagcctgggacgggaggtggagagtttgcagagccggctgtccctgctggaagaccgagcgggagaatactagctatgacgtaaccaccctgcaggatggaggagggtgagctgcctgaccttccaggggccgaggtgctgctgtccagacaactcagtccgtcggcccagggaacacctgggcctcgctgcagggaacaggtggctgttgcttcaccagtaccagaaccagtgaacttgatgcgagaaggttccagaatcctgggagaacttttgagaaggcacgaggaccacaggatggcaaggtgggaaggcttttggccagaaggttcattcccttctttggcccctcttatgga

SEQ ID NO: 88422 - DNA, 441 bp, Homo sapiens
tgcttatgtgcccctgagctgccgaatcattgagcaggtgctagagcggcgaagctggcagggccttgatgaggtggtacggctgctcaactgcagtgactttgcattcacagatatgactaaggaagacaaggcttccagtgagtccctgcgcctcatcttggtggtgttcttgggtggttggacattctctgagatctcagcccttcggttcctgggcagagagaaaggctacaggttcattttcctgacgacagcagtcacaaacagggcttggcttatggaggccctgaatgaagggaaagcctgaaggttttcccggcccgtggtgacatttttcctgagacacatttcttaatgagaagccagcgtttggcacccaactggtattacccagtgtgcaccaactatctggttagaacccggagcctggaacgcgtt

SEQ ID NO: 88423 - DNA, 614 bp, Homo sapiens
atggcggcggtggtagctgctacggcgctgaagggccggggggcgagaaatgcccgcgtcctccgggggattctcgcaggagccacagctaacaaggcttctcataacaggacccgggccctgcaaagccacagctccccagagggcaaggaggaacctgaacccctatccccggagctggaatacattcccagaaagaggggcaagaaccccatgaaagctgtgggactggcctgggccatcggcttcccttgtggtatcctcctcttcatcctcaccaagcgggaagtggacaaggaccgtgtgaagcagatgaaggctcggcagaacatgcggttgtccaacacgggcgagtatgagagccagaggttcagggcttcctcccagagtgccccgtcccctgatgttgggtctggggtgcagacctgaggagcgctgcgaccctcctaggctattgactgttaagtcctcaggtttggcccagattccagttcgtgcctctgaggtccaccagagggcgcatgaagcccaggctgttgccaaaccctaccctgccccacaccaaggagccagccaaaggcaaataaagttattgagtgtttagtaaaaaaaaa

SEQ ID NO: 88424 - DNA, 676 bp, Homo sapiens; identical to SEQ ID NO: 60351

SEQ ID NO: 88425 - DNA, 342 bp, Homo sapiens
tcaacttggaaatgttaccactatccaagaaagagctgagcttaacataataagaatattgtaaatagacagctattacctacactgttaagtaaccaatgccaaggacaagtaagtatggcagaagagcttgatcagaagctcatgctttccatttcaaaatagtccagcactttgggagagggggtgggtggtgggacctctgcaatttatggatcagtagtttcatgctgaagcacttgaagttttttggtatgcggatccaggaaagccatttttctatatggctttctcttttaagtatcagtggtttaagtatcagttaggtactcaacccaaacg

SEQ ID NO: 88426 - DNA, 379 bp, Homo sapiens
  misc_feature (1)...(379): n = a,t,c or g
ggtgtttgcgaacatacttccaattcttctcaaatcagcaggtaaaaccccacgtttctcctaaagttgcaccttcatggatgccatgttagtatgttaaaggccaagactaatggaagaactggaagccaattctccagctttagttatagagctggccataaaggtcacagtactttctcaaagttcttagtggtaagatttgctttgatatattgacttaaataaagaaagatttaaaaaatattcattcaacaaacctttataggttaattagtagatttatagatttcactctgttggatggatggatggcaccatgggcaggaaacatattcagttctaggaatatgaaagtgagtaagatctggtacctgcn

SEQ ID NO: 88427 - DNA, 373 bp, Homo sapiens
aaaacctgttctgactatatcatgggagttggagtatgaataaaatggttactgtaagtgaaaatgctctgtaaatacaaaagcactctgcaaatatcagagactattagtattatgaagttattaaaataaaaaaacacattagctgagctaacagccttgaaacacaatgagcaactcctgggggaaaagacacacagctgaccagacacacagcccagagtaagtctttgggaggggtggaagtgggaaagctgctaaacatggtgcaaaaggcttctagccccagggaaggaaatgacagaaatcttgctttgacaagtttttttcagagctggctttgctaggaaactaagggctaaaatgaattttt

SEQ ID NO: 88428 - DNA, 4764 bp, Homo sapiens; identical to SEQ ID NO: 63487

SEQ ID NO: 88429 - DNA, 369 bp, Homo sapiens
cttttcttctcaactgctaaaagccaatgctatgaacattacaggtatccatttgcctaagttaataataatcaatatatactaagtatttactatgggacagtcactatactgatttacaaaggttttcactatttcttagaagaaattctaagtatgtaaacaaataagaaaattaatgttaactttattttgctttcaagaaaatctgtatttgtgggatgaagttagacctttaaaatgaacagaattactgagggctctagaaccaggctctccaggatcaaaccccagtaccacttcttaccagctgcgttgctctggaaccagtgcttagcctctctgtaaaatgaggatgataacgtggga

SEQ ID NO: 88430 - DNA, 346 bp, Homo sapiens; identical to SEQ ID NO: 35923

SEQ ID NO: 88431 - DNA, 349 bp, Homo sapiens
cctcagtaatttctcttaaacatgtgacatacatacatgagaccactttattacatctctagaacacccacaaatcacacaattttatgttttaactgaaagggaccttaaaatatctttcctttactagatgaatcagattaattatttcgcaataactgtaattgctatctttttctttattaacgattgttattccgtattaacttttcataacggtctttactcaatcgctagactgtctcttgtctatagaatctttctcctgaatctatcttatatcctttgatctcctgttaggaacagtatgactttgcttattcccgaactttaaatcatatctttatcg

SEQ ID NO: 88432 - DNA, 446 bp, Homo sapiens
  misc_feature (1)...(446): n = a,t,c or g
gattgancnccnatcgatacccgtccggaattgccgcgtagatccacgcgtacgctggataatgaaatgataacagagctcaaagcactttttatttggctatgaagagaattcaatactgcttcgtgctgggtaaaggaatggcatgctatgacactgaggtattaaatacaagtgggttggatagttatttgggaggggttgctaacaattgaattactattttaatgtcataacatggtagcactcaagattacctttcacatctaatcataccatttacatggaagtgggaaaatgcttctgaagtggccaaatgctattcactgaatggataatgataacattagcaattgctctggaggaagaaataatcagatacactgtcaggctctggggaaaggtaacgaccattcacttggagaaagggctaataacagtattta

SEQ ID NO: 88433 - DNA, 3235 bp, Homo sapiens
  misc_feature (1)...(3235): n = a,t,c or g
cctgtctctcttcgggtctcgggcccttgggcgcagcggggcgcgcgccatggcgaaggcgaagaaggtcggggcgcgaaggaaggcctccggggcgccggcgggagcgcgagggggcccggcgaaggccaactccaatccgttcgaggtgaaagttaacaggcagaagttccagatcctgggccggaagacgcgccacgacgtgggactgcccggggtgtctcgcgcacgggccctcaggaagcgtacacagactttactaaaagagtacaaagaaagggataaatccaatgtattcagagataaacgcttcggagaatacaacagcaacatgagccccgaggagaagatgatgaagaggtttgctctggaacagcagcgacatcatgagaaaaaaagcatctacaatctaaatgaagatgaagaattgactcattatggccagtctttggcagacatcgagaagcataatgacattgtggacagtgacagcgatgctgaggatcgaggaacgttgtctggtgagctgactgctgcccactttggaggaggcggtgggctccttcacaagaagactcaacaggaaggcgaggagcgggagaaaccgaagtcccggaaagagctgattgaagagctcattgccaagtcaaaacaagagaagagggagagacaagctcaacgagaagatgccctcgagctcacggagaagctagaccaagactggaaagaaattcagactctcctgtcccacaaaactcccaagtcagagaacagagacaaaaaggaaaaacccaagcccgatgcatatgacatgatggttcgcgagcttggctttgaaatgaaggcgcagccctctaacaggatgaagacggaggcagaattggcaaaggaagagcaggagcacctcaggaagctggaggctgagagacttcgaagaatgcttggaaaggatgaggatgaaaatgttaagaaaccaaaacatatgtcagcagatgatctgaatgatggcttcgtgctagataaagatgacaggcgtttgctttcctacaaagatggaaagatgaatgtcgaggaagatgtccaggaagagcaaagcaaggaagccagtgaccctgagagcaacgaggaagaaggtgacagttcaggcggggaggacacagaggagagcgacagcccagatagccacttggacctggaatccaacgtggagagtgaggaagaaaacgagaagccagcaaaagagcagaggcagactcctgggaaagggttgataagcggcaaggaaagagctggaaaagctaccagagacgagctgccctacacgttcgcagcccctgaatcctatgaggaactgagatctctgttgttaggaagatcgatggaagagcagcttttggtggtggagagaattcagaagtgcaaccacccgagtctcgcagaaggaaacaaagcaaaattagaaaaactgtttggctttcttttggaatacgttggcgatttggctacagatgacccaccagacctcacagtcattgataagttggttgtgcacttatatcatctttgccagatgtttcctgaatctgcaagtgacgctatcaaatttgttctccgagatgcgatgcatgagatggaagaaatgattgagaccaaaggccgggcggcattgccagggttggatgtgctcatttatttgaaaatcactgggctgctatttccaacttccgacttctggcacccagtggtgacccctgccctcgtgtgcctcagtcagctgctcaccaagtgccccatcctgtccctccaggacgtggtgaagggcctgttcgtgtgctgcctgttcctggagtatgtggctttgtcccagaggtttatacctgagcttattaattttcttcttgggattctttacatagcaactccaaacaaagcaagccaaggttccactctggtgcaccctttcagagcgcttgggaagaactcggaactgctcgtggtgtctgctagagaggatgtggccacgtggcagcagagcagcctctccctccgctgggcgagtagactgagggccccaacttcgacagaggccaatcacatccgactgtcctgcctggctgtgggcctggccctgctgaagcgctgcgtgctcatgtacgggtccctgccatccttccacgccatcatggggcctctccgagccctcctcacggatcacctggcggactgcagccacccgcaggagctccaggagctgtgtcagagcacactgaccgaaatggaaagccagaagcagctctgccggccgctgacctgtgagaagagcaagcctgtcccactgaagcttttcacaccccggctggtcaaagtcctcgagtttggaagaaaacaaggcagtagtaaggaggaacaggaaaggaagaggctgatccacaaacacaagcgtgaatttaaaggggccgttcgagaaatccgcaaggacaatcagttcctggcgaggatgcaactctcagaaatcatggaacgggatgcggaaagaaagcggaaagtaaagcagctttttaacagcctggctacacaggaaggcgaatggaaggctctgaagaggaaaaagttcaaaaaataaattacattttataaataaggcaaggaactggacattacctcacatctgcaattccaaccctctggtctcgaattcccgacctcaggtgatcccacctgccttggcccccccaattaaaaggtgtgagcccacagcaccccagcccaaaaaagtaattttttttagagtaataatgctataatgttggtgtgattccaacctccagctccccccacccgctgcctgcggttttgtttctgttaaaacgtcacctgatgaaatagaatgaatcctgaaatgcacctctgggatcgggaatggtctgtgtgttatcagctgcgactggttcactgcgtctggacaagcctcatggggactggggattctggccagtgtaatttctgtcaaccacggacgtttgcgtccttcagtggatgcttctgggtgctggggttctccattcaggacactgcactctcggaggtgggaggagactgggttgcgtctgtgccgacctgggatgcagtttcaggtcagaatcagaagatgtgcaagttacgcatgacacagctttttaaagtgcgnnttccgacgcncgtcaatgggtctcagttnnnnncccctnggaactct

SEQ ID NO: 88434 - DNA, 841 bp, Homo sapiens
cccttccagaagtttcttgagagcaggagccatatggattcgtctctgcatgcccagcctgagacatcagtgcctaggactcaggaggcatacccagcacatgcttgtagaagaaagaaagaaacagggaaggtgttttttgctatttatcgcatatttaatttcatctttattatatttttcctgattgtaacaggatgatgtcttaggtgtgaaaaattagaagtggaagtgttagagctcttctagaatttgtctagcaggttctctggtttttactgaaaccaaactcccatgagaaaacaacctacaattgggaaaatacataacttagaaagaaagggaaagtctttagtgtgatagaaattcctcccatatctgtttcctgtgcttattctaatgcattgaaatataaagtagatcctctgaatactttgtttcatttttaccaatatagaatcatatcatgttcttactgacttgctccccactaaatacattttagatatcttctgtatctaatcatagggatctacctcattctttttgttttggttcattttggccattgttttttactgattgaacaaggacacctctctctttttaaagacacatgtaggattttaattgtgtgggttgtaggccagctttatttagcccacacaattaaaatactacaatgtggcttttaaaagtcggcgccgcccgcaaattccagaactattgaatcggagataactgaaaaaaccccgcaggttcactttaaactgtgcctcggtgcaccaatctcaaaattcttttatttaatacatcgggtttgccttctttttatgcaaca

SEQ ID NO: 88435 - DNA, 326 bp, Homo sapiens
cagtgatcaggattgatagaggttggaatgttcctggacatttgttcatttctttgtctattgaacttctggcctcaagcagtcctctcacattggcctcccacagcactggaattacaggcatgagccaccgtgctcttctcatgttttcggaggcactttatcagtatgtttaagacattttcacctgtggccaaattgacaagtttacaatttcactttaactgaagagtgggcagtttatcagttattttagaagttccatttagttttctattttaaatatagtaagttttttcccttaacattttttgcattgggatatt

SEQ ID NO: 88436 - DNA, 346 bp, Homo sapiens; identical to SEQ ID NO: 39994

SEQ ID NO: 88437 - DNA, 333 bp, Homo sapiens; identical to SEQ ID NO: 40334

SEQ ID NO: 88438 - DNA, 702 bp, Homo sapiens
atttacagatagccttggatgccagttactggactttcattaatcacgtcttcatctgggggagcattgccatttatttctccattttatttacaatgcacagtaatggcatctttggcatcttcccaaaccagtttccatttgttggtaatgcacgacattccctgacccagaagtgcatctggcttgtaattctcttaacaacagtggcttcagttatgccagtggtggcattcagatttttgaaggtggatttatacccaaccctgagtgatcagatccgccggtggcagaaggctcaaaagaaggcaaggcctccaagtagccgaaggcctcggacccgcaggtcaagctcaagaaggtctggatatgcttttgctcaccaagaaggctatggagagcttatcacatctggaaaaaatatgcgagctaaaaatccacccccaacatcagggctggaaaagacacattataatagcactagctggattgaaaatttatgtaagaaaaccacagacaccgtgagcagctttagccaggataaaacagtgaaactgtgagtcaatatgaatttaaaccacgtagttatcttttcacttcaggtggagctgaaattctgctggctccagagtttgagatttgaggcaagaggtggggcaggcagattgcctcacttaacttaaatctgcggcagacaactgc

SEQ ID NO: 88439 - DNA, 356 bp, Homo sapiens
ggcacgagatcttttatgttacaagtaacaaaagcaacaactcgcacttaccaagtcaaggccttgataggctcatataaacagaggctcagaggttgggtaggtttcagaatttcctcaatccatcagctccagctccattcaccagagtgttctggaccttgtcctattcagtgcatggacagtgtatggaaagcgtatgtcctattcagtttgctcttgctgcaggccggcctctctgttggtagcaaggtgactgaggccccacatctgcataccagccagtccaggaaaggaaagaccatctggtggtatgccacggtagtggtgaaagggtgtgattcctttcctcacag

SEQ ID NO: 88440 - DNA, 304 bp, Homo sapiens
ttttttttttttgtatttttagtagagacggggtttcaccatgttggtcaggctggtctcgaactcctgacctcaggtgatccacccacttgggcctcccaaagtgctgggattacaggcgtgagccactgctcctggcctgttatatatgtcttaagtacccttctgcatgcagtcagaaatgttcttttcaagaggacatttcctttaaaaagttcaagtttcttatcttacgataaagagatatttcctatacttattgtcctaaaattctatttggtcactcttacctcttttgtgaaag

SEQ ID NO: 88441 - DNA, 360 bp, Homo sapiens
ggcacgagcaaaggccaaattactttgaggtagggcttagctggacctgggttttcctatgctcttttcatgctgtgttggagggtgtgtccactgccacatctgtgtaacccgtctgggtcacgggatgaccgacagcataccatcttacaatctttcatgactacatttaagcggattcatacggcaatatgactgctgatatgtgacctggccctgtatgccctacacaggtacaggggatcactccggtaatcaatggtgccatgcctctgagctcccctcccagcaataaccgccctcctggaggccagccgaggagcctggctacattgctcctctgactgtgttgaaacccag

SEQ ID NO: 88442 - DNA, 448 bp, Homo sapiens
gtctcgacatttccgtgtcgacccacgcgcccgagcctttaattgtagctcactcttaaggaaacaccatataccccatttaggagacaaacaatataaatgtgatgtatgtggcaagctctttaatcacaagcaataccttacatgccatcgtagatgtcacactggagagaaaccttacaagtgtaatgagtgtggaaagtccttcagtcaggtatcatcccttacatgccatcgtagacttcacactgcagtaaaatctcacaagtgtaatgagtgtggcaagatctttggtcaaaattcagcccttgtaattcataaggcaattcatactggagaaaaaccttacaagtgtaatgaatgtgacaaagcttttaatcagcaatcaaaccttgcacgtcatcgtagaattcatactggagagaaaccttacaaatgtgaagaatgt

SEQ ID NO: 88443 - DNA, 722 bp, Homo sapiens
gatggtctcacatgacaggtagtccttcttgatctttccaaaaagacatgtttcattccatgcattacctacttattaattcacatatgtacgcaacaaatatttttgctgggcacctactatgtgccaggcactaaatcacatgttaggaaaacagtaaagaataagacacggtacctgacctcagggaacttacagggccccattccctgaaattccattcatcattttcaaaatatgtatttggctgtaatctgggaatagctgtctctgctcacctgcccccatccttctctgcaagctacgagaagcaaagtaaaggcttcatcttcttacccttctctttcccctccagtgtacagcagaacagtcaaacactccactgaatcttaaaatgcagagtctgcaccccactgtgcatatgacctaaaagtccgcttctgccagtttaagcgattttaacacagtactttcaaatgtaattattaaaagaaaatgattaaaatataattgcttcgataaccctaacattgggtggtccacttaggagaggctgttattttcttttgggatttgttctacaaagccattaatttgcgttaccccaggtttcccccagtcattaagttgtacgtcagcggccagaaaattgtattcgccctcaatatacgggtatatgcgttccggcgccccctgtcccgcaccttgccgacttgtcggtc

SEQ ID NO: 88444 - DNA, 359 bp, Homo sapiens
ggcacgagcggcacgagctgggggtgtggagaagggatattggccatagcagtcatgagttaggctgtaaaacataagttaaacgcagagtgtcctatattgaattacaccctaaaatgtgctatattttcgggtctaattcaagtaacaagtgctataatcacctttccataggctaacagaatgaaggctgtgtcaaatctatgcttttatttctcccaaatgcgttccagtcctggtactcaataaatagtcatcacaatggtgctgatgatggaggcggaaggacacctgtgctccatagtaaactttcctttctaaccctactgctattgatagggtgggaataatggtcctcg

SEQ ID NO: 88445 - DNA, 802 bp, Homo sapiens
  misc_feature (1)...(802): n = a,t,c or g
tttttttgaagatcaacattttatgtaaagtcatcttttaaggagggcgcagctcccaccgtggccctctctgggactgttgctccaacccaaggaaatgtgagtaggggccgagtaacagacccagaaggggcagcctgaaagcaatggggtcttcaaaaacaaataaagaacgtgggcaaggttgggctggggtgtgggcaagaaataanacgccagctcatccgaaactggcctaagagtcaaggtgctgaactccctggctccatcgaagcacaacgtcctcacttttgccaggggcttcagcgcactgtaagtctcattctgcagacatcttcatgcggggacaccgaggaccttcaacgtccaagtcctggggcccagccaagggttttttcctgtggtgctcttagggccctcctcttgttattccaccagctgcctaggagggccttgcttccgccaggactggaggaatggaggagagcctgctggtggaggcctctgccccagagatgcaagcaggaaccgctttccacatcctagctgctcgcagagggggcctcagaatagaccagttatggtgactgattgagggggtgctgggagaaggaggggcagggcaggggtgctcaccttccgattgcggtttctcatcagacattggtggcttttgaaggaacagtagtttgggtactgaatatagtctgtgtcacaaatcttggtagggaaatccccatcctggaagctaaggaactcagtctggagccacccagagactcggacatcttcacagcctttc

SEQ ID NO: 88446 - DNA, 360 bp, Homo sapiens
  misc_feature (1)...(360): n = a,t,c or g
ggcacgagcacataccaagccttgtccggcctcagggcctttgctgttactatgctttcagcttgggacactttcttctcatatcctcatggctccctctgctgtcatctcctgatctctgcttaaatgtcaacccagtggcactccctctccatccctctgcatcttcttaccctgttttcttgttctttacatcaccacctgacatatcatgttttctgggttttatttatagtatgtctccacaactagatcagaagctctgcaggggtaggggttattgntattnttattcctcagcgatatacctatgccctatgactgcgctctgcccccagaggccgcctactgtcccgtccg

SEQ ID NO: 88447 - DNA, 5007 bp, Homo sapiens
gagaactctcttcagaggtcgaagacgacgagaagatgacaggatctcaagacctcatccttcaacagctgaatcaaaggctccaacaccaaagtttgacttattagcctcaaattttccacctttacctggaagttcatcaagaatgccaggtgaactcgttttggagaataggatgtctgatgttgttaaaggtgtctacaaagaaaaggataatgaagagttgacaattagttgcccagtgcctgcagatgagcagacagaatgcacttctgcccagcaactcaatatgagtaccagttctccatgtgctgctgagcttactgcattaagcacaactcagcaagaaaaggatctaatagaagattcctctgttcagaaggatggtctcaatcagacaactataccagtttctcctccaagtactacaaagccatcgagggcaagtactgcttcaccatgtaataataacataaatgcagctacagctgtggctctacaggaaccccgaaagttaagttatgctgaagtgtgccagaagccccctaaagagccatcttcagttcttgtgcagccactacgggaacttcgctccaatgtggtgtctcccaccaaaaatgaagacaatggagctcctgagaactccgttgagaaaccacatgagaagccagaagcaagggctagtaaggattattctggcttccgaggcaatataatccccaggggagcagcaggaaaaatcagggaacagagacgccagtttagccatagggctatacctcagggagtgactcgacgtaatggcaaagagcaatatgtgccacccagatcaccaaagtaaaaaacaacaaaactattcaaaaacttcactctcttcccattaaacttgaactgtggctatattgaactgttttggaggggagggggtagccaggaaggaaacaagagaaagtacgtccatttcattatggattttggagttgtgagtgataggatcccaaaattcatctctaatgtggtttttaaatgctggaggattccaatcaatataaatatatatatatatatacacacacatatataaaaagtataatttttctatttttgtttttggttttaatttgcagagatttgctgccaggaatcaattttgagggttcagatttagcttggaagaaaaaaaagaaacatacatccttcagtataggagatgagggaatgagagaaaatattttttgaagaagcatttctgtaaaattagaaattactttttttaatctatttaaagtttggcttgaagaatgccatctctgactatatggccttgtattgcaaagcagatcagtggctggggtgcctgttgtgggtgtgagtgtgtacaagagcgattgaagccaaatctgttgtcatgttagtaaatgatttgaaaactgaatgtaatacttgagtagatttttttttctagtttgaaatttagtctgtctttttgaccttactaatatttcatttaacaagttgtaaaactctgattgtacttagagatgtgactaccaatcagtttgatactcaaggaaagggggttattcaagaaattgaaaatttcatcttggacctcagtgcatcggtcaaatggatttcagaggtttaaacttccctgtgattccccctgaatacccccaaaatgagaaacaaaattttttttcttactccatttgttactctctgttctttgactgcccacccacagaaaagcaaaataaccaactacctactcaattgtgtgtttgtaattgctttgagcagtctagtcaaatcatataaattgttctaaatttcagaattgaacattgaagtattaactcttctgttcacacatttagaattttagctcccaagatggtagggcagactgaccgtacagtaatttatttgtcgttagtgttaaagattaagcatagtaactgactcttaagtgttaaataatgtagaagtaaaaaaattttttttaaaggcttaatttgggaggggggacttatttctgtttacagtgtattaccttccttccctcctcttctccccccacacccaacaaaatacagtttggaattcactgaaacagtaccagcaagtcatgagattttttagtaaagatgagaaagatggttgaagaaaattagtgcataatttctcagtgaataaagttgtagctctcatatactaaatagacaagtttacatgctgttatttagaaaatgactaaaatattaaaaaccgtgttgtgttaatctgttttaagtcataccatgttcagagttctatgtaaggtgggttttatttttcttttaagggatagtttgtaatagtaagaactgtcccatatgttagtaaattacatatgtacaaattggaaactgtgaaattgtggaacactgggaaagcacccattgtgacataggagtaaacatcttagtaatatattaaagtgaatgtaaatggtggttaaaattacattactgtgaaattcatcttccaactctaagttaagctttggagatacatgttagtggttaactgttaagagctttgaaaacactgcacatatctgtacaagccagaattactatttctttgacttattattagcttggcagttgcttttgatttgattgttttaatgacaatgggtatactaccctatattactcaggttgaaactatttcatttctacacactatttttaaaaattgcctactaggtgaaacataacaataaaactacctgtgctgaaatttgggggaagtttaggtcctttaaaaaaacatattaatcattgactacatctatgataaaagtgcttattttggtttactaagataatgcagttggtggaaatgataaacgttttaagtgttaacatcctttgaatgcgttggatttcagagaataaacattttgtaaaaatcacttggtaaggattataaacttaattactgcacttaaaatgaaacattactttttttaaacaatgtgtcacaaatgtaggtctgtattacttgtatgcttgtgtgacttactgttagtccagctctaaaaatttaaaggttgtaattgaaatacaagaaaagagccttcttttagaagaaagcaagtatatttttgcttttacttcaaatgttatttaaagtagaaatttaatttgtagatataacctttaaaaattttctcattaagacaatgtttttaatttaatttgcctcattacatctaatagttcccatttgatggcatgtatagggaagagtgagagagtgtgtgtgtgtgtatgtgtgtgtaatatttatatatattcacagtatgtatttagcatttattttattacagcagatttaaagtttgtatctaaataatgcctatgagttgtgtgaagctcttggctttttttccaacgttactttgtaactaatgagggtggatgttcattgtagtttatttatttggttctttagatggaggaattttaaaaaatcaaatgttcctccttcaccttaatgaacttgcaattccctgatctggtggaggctaaaagtaggtataaatgatattgaatgttgggtatagtgatactctgccatagttcttactgcatgaagagaacaagagtcacacaagttcaccactttgcacttcatagagaaggtacatagagacattgcaaaacctgtctccatttgctatcctgataattaaggttttcataatacctagggcctgtctctgagtaattttaattttgccaaatacactgacatttaaaatagtgatccatctaaatttttttcagctgggttttgaggaatataagagctttcaatgataaaggtttgttgtagttgtcttatgtgctgaatttgcagatgatcagatgctgtgcagaattctgatttatttttgtttcctaaaattaagatagcttgaatattatttcacattcctttttcttttttaaataaacaggtttgctttggaaaggcttaatgatggaatgttagcatcttcactagggtaaagaagaacaaaaagaatgttgctggaacgtaaaatagtatttaaaagttaatgaacacttctctagttttcttagttatggccttaataattagtctcttggcttaaatgtccactggttttactttgacacagttgaacaacactggggttaagtctctggtatttaggctggcaatatatatattaaccatattttaaaagtaccaattttgtttttacagaaaagataaaactcaaaagagaacagtgtattccttctgaggggcttttataaattattaactataatatatgatggattttttcctaattttttatatttccttacaattttgggggccattaatttaactttaggcttttgggcatatgctagtctgagcttccgaaaagatacatatatgtttcccttttcattagctgaatgaggatattttaagaagttgaaagagaatttattttcaagttgtgagtaaatcctcctttgaaattcacctgattattagataacttaaagtttatttttaaaagctgacaactttttatgaatcttcgagttgacagttcctaaaagcgtaactcagatattaatgggctgtgtattaaatggttttattttcagttttgcagcacagaacactgttgaaatatccatatcaacttgatttttttaacctaattcaggtgtcctttgcatctcttaaatgttgggggtgggggtcagagccagttatccggcttctgttttgtcgattgcttagatttgttcctgttgtcaaaactgttacccccaaaattggtgtgacacatgctcatgcataaaatgttaaaatgagtacatccttgtatttgtatttgttttcaacatcgccaaggtgctatgggaaattaacaaaattagaaaaaaaataaaattattaaaaagcaaaaaaaaaaaa

SEQ ID NO: 88448 - DNA, 2922 bp, Homo sapiens
atgcatgaagctggaaaccatcattgccagcaaagtaacacaagaaaagaaaaccaaacaccagatgttctcactcataagtgggagggctttgaccagcttcgacttgaaggattgctttgtgatgtgaccctgatgccaggtgacacagatgatgctttccctgtgcatagagtcatgatggcatctgctagtgattacttcaaggctatgttcacaggtggaatgaaagaacaagatttaatgtgcattaaacttcatggtgtgagcaaagtcggtctaaggaaaattattgatttcatttatactgcaaagctttctcttaatatggacaaccttcaagacacgctggaagctgccagtttcctacagattctgccagttttggacttctgtaaagtgtttctcatatctggggtcactttagacaactgtgttgaagttggacggattgccaacacctacaatctaaccgaagtggataaatacgttaacagtttcgtcttgaagaattttcctgcattgctgagcacaggggagttcttgaaactcccttttgagcgtcttgccttcgtgctttccagtaatagccttaagcactgtactgaacttgagctctttaaggctacctgtcgttggcttcgcctggaagagcctcggatggactttgctgcaaaattaatgaagaacatacgatttccactgatgacaccacaggagctcattaattacgtgcaaacggtggatttcatgagaactgacaatacttgtgtgaatttgcttttggaagccagcaattaccaaatgatgccatatatgcagccagttatgcagtcagacaggactgccattaggtctgacaccactcacttggttacactaggaggagtgctgaggcagcagctggttgtcagtaaggaattgcgcatgtatgatgaaaaggcccatgagtggaaatcgttagcccccatggatgccccaaggtaccagcatggcatcgccgtcattggaaattttctctatgtggttggcggacagagtaattatgatacaaaaggaaaaacggcagttgatacagtcttcagatttgatcctcgatacaataaatggatgcaagttgcatctttaaatgaaaagcgcaccttcttccacctaagtgccctcaaaggatatctgtatgcagttggtgggcgaaatgcagcaggtgaactgcccacagtagaatgttacaatccaagaacaaatgaatggacctatgttgccaaaatgagtgagccccactatggccatgctggaactgtgtatggaggagtgatgtatatttcaggaggaattactcatgatactttccaaaaggagctcatgtgctttgaccctgatactgacaaatggatccagaaggcgccaatgaccactgtcagaggtctgcattgcatgtgtacagtgggagaaaggctctatgtcattggtggcaatcacttcagaggaacaagtgattatgatgatgtcctaagctgtgaatactattcacctatccttgaccagtggaccccaattgctgccatgttaagagggcagagtgatgttggggtcgctgtcttcgaaaataaaatctatgtggttggggggtattcttggaataatcgttgtatggtagagatagtgcagaaatatgatccagataaagatgaatggcataaggtttttgatctgccagaatcccttggtggcattcgtgcttgcacactcacagtttttccaccagaagaaaccacaccatcaccttctagagagtcccctctttctgcaccttaagatcatctctacaactaagatgctgtagttctatctttgcaatgtgtcataaattctcttctttttcccccttaagtagtatatatgttaggattaccctctggtaattgatacagatattggaaaaaagacaacattgatgttatttgtgctctttgtttggcctagaatgtttataaagtggtaacacaaccattctggaaatgtatcccatagaagctgatgtttaacatatgaaaaaaaaagtattgtctataaaatgtttcttcagtactttttaaatgctgtgtattgggtgtaaggtatttgtcatcttacattagtaaacccaataagccaagttgaaggtggattatagtaaatgtacaactgtgctcactaggcttcaagtaaaaagttttcctttcatctttgactgtaagatgtcaaagggaggcagcctgcttgaacaggaaacaatacacaaaaggttgccaactcgcatgagcttacctccctcttttcataaagtatttttgacatatctgtcaacccacttgactgtgtgggtgcattgagaacacaaagtttcctagacacacaggagaagtagctttaaattcacttaatattaatttaaaaagcagcatgaaccctctacttataaacaagggtttggtgtttttaaagtgtgtatacatacatacacatacacacatgcacatatgtcaaatataatttttttaaaaattgagtggcacatcaaagaaatgtgaaattaaaaagaattcttccaaaaagcagcttccattaaaatgggaattcagtatgcacatactgaatgcatatatgtagaaccatacagaatttaggtggataagggctagaaattttgagcaacaaaatttgtcacttgaccagattttatcttcaaaaactgtattctactccttctcctttgctgttgaggtaacttgcatattatatgtattctgtatactcagttcataaggttatttagcacaaagtatagcagcttcacctggagagctgcttttgctcagtaaattcaacttccatgttttatctttttttgttcaataaaaacatttaatgtcaaaaaaaaaa

SEQ ID NO: 88449 - DNA, 231 bp, Homo sapiens
tgaattgtcatacgactcactgtacggcgaattgggtacacttacctggtaccccacccgggtggaaaatcgatgggcccgcggccgctctagaagtactctcgagttttttttttttttttttgaagttttcatataaaccacagaatatagtttaattcaaattaaacatgaaacctagaataatgtcgggtccttatcaagtagcaattacattgtttaaaaaaaaaa

SEQ ID NO: 88450 - DNA, 473 bp, Homo sapiens
ttttttttatagagacagggtatcactatgttgcccaggctgatctcaaactcctgggctcaacggattctcccacctcttcctctcaaagtgctaggattacaggcatgaaccaccatgcccggcctgaactatcttaaacatcccagggggtttcctcaaaatccaggtttccagctgctcatggaaagaaatgaagctctcacaaccttcaacctcagtttgcccccccagtcccctcatttataggagtcttcaacctacatcacccaaaaatcccaccgcaccccccgaaccgccttcaagcatagccacccaagaaccaggcccgactgctcagaggagaagggatgccccatccctgaaatgtcagaacccctccccagacattgctgcactctcccgttgggcctcagttctgtcgggctgggaagctggtggctggcttgccttctggaggaggtaggatgaaa

SEQ ID NO: 88451 - DNA, 361 bp, Homo sapiens
  misc_feature (1)...(361): n = a,t,c or g
cttacatgaataaacactattcctgaagtctgacctttacatgctacttgaagattccacctgccatgttttcttgtctttttgcatatgcatggggtattgtcttcctccagcattactgggtttttcctatatgttatttgtagtaaatttcttttactagggtgataggttctgtctcctctagcaaaattagtgatttatttaaaacaggtgtcattgggcttgtacatagaaccactctattggaagttgaattattgtgaactaaagttataaaacaatttttaaggagcttcagacagagtatttgtagttgtacttgagaacaaattctgaacaagtaagtagtgtaatgtan

SEQ ID NO: 88452 - DNA, 278 bp, Homo sapiens
gcgcggcggcggtcagcactgtatgtgaaggcatatctgtgtaactgaagtaagttgcatgagctgtgcttaatgattatgcatgctctattttcttttctctgtttcatttgaaagttttggttaggaccttttaagactggatgccctgaaccttttttgaagcatagattctttagcagtctgaagctcgtggatacctcagaataatattgttaaattcacaaaattaatacccataagattcaaaaaaaccaaagatctcaaaatgttggatg

SEQ ID NO: 88453 - DNA, 575 bp, Homo sapiens
ggcacgaggggaagacttcacagaaaagatgacttgtaggcatagacttggaggccatgaagaagtgacccatgaggctgcacaggagaatggtgtttcaggcagagagaatggcaaggaggctgttgtggatggagaatagtaaggggagagtagtaggaatttttcagaaacacgagctacattgcacagggccttgtaggctgctgtaaaattggcctttattctgaatgagatgggaaaccattggaagttttcaggcagagtgaagtgacgttgcttccatttcaaaaagatgactttttcagctattctgagaagaagacagtagggagtagcaggaaaccagtgagaggcacctacaataatctgcaagatgatggtacatcaccaccatccaactacggtggctgcactggagacattgagaaatgggtggatttttaattcattttgaaggtagagccggaagtatttgctaacagattggatatcaaattaaagttatcaaggcattgagtctgaataatttggaggatgtaattaccatacgtgaggtttgggagtgctgtgaa

SEQ ID NO: 88454 - DNA, 673 bp, Homo sapiens
ctagaacattccacagcagctccataatcccctccagaacattctgcaacagccccatgatcccctctagaacattccacaatagcctcacaggtcccctgtagaacattccaccacagccccatgatccccttgctcctcagagcatgtggccgccagccccaggagcccagcctcttgagatgctcccagggtggacccacacattgtctccactccgaagcagttgctattggtccaagaggatgctcgggtagtcttcggtggctgcaggagagcgatgctgcgcctctgcccctctcctgccacctggctgcccacagagctctccagggcagaagtcgcggtgggctcagtgggtgccctgagcggggtctctcagactgacgtcaggccttggtgggctgcactctcacctggaggctccggggaagcatctgcctccaggaccattcaggctgttgacaagtcaactcctcatggctgtaggactgaggttcccaagtccttgtccctggtcctgtggtccctccaccttcaaaccagcaatggtgcattgagcaaattgtggtcaaatatacatcacatcaaatttaccatcttaaccattgttaagtgtatggtttgtggcattaaatacattcacattgttgtgcaaccatcaaaaaaaaaa

SEQ ID NO: 88455 - DNA, 1004 bp, Homo sapiens
ggcacgagactaaaatagaacagtttgaaagtgaattttaagaattgttttagaaatttcagaaaccaaagtagtagtattttttgttactaaggagaacatacccctttctgcatattgccagcttagtattcttaaacttcacaaacagtaggagtaaaaaacattttcttctttctttcagctggtttaccatgcattgcaattgttagcatatacagcccttggtattttaattatgagactaaaactcttcttgacaccacacatgtgtgttatggcatcactgatctgctcaagacaggtaacatgttatgttggagtatagccactgtgataattttagcctttattattgagtggccctaaaataatgaattacaaagtcttttaagtgattatagctaaagctcttcatggttttgtacttatctttcttagagggtaagggccaaagctgaacatgttctatctttctagagattgaggataatggctggtggcctacatctgcccacttgattactctcctgaggacatgtaccggttccctggtccatgtcctacttctcggtatatgctatattaggccggtggaaggaagcaatctcaggttggctctctgtggactacgtatgcagtactatgattcgtgggccctcattttgtccgtaacttgcactttcggtatgtctacggatccatcacgctctcccgggtacttgttaggtgccggtatgtcctcaccagtttcctcgctgactactgtgcacaacgccggatgtattatatcgtagccattagcgtggagcatcggtactagacttccacgttggcgcttatgggcgccagggtaggcgtgatcttacgagatgatatcacctgtgcaatatttcacagagagcaagtatgcagtaggtagaatatggattagataatcatgaggcaggacctcttggccctatggacgactatagctccgatgcggaacgccgcagcgtact

SEQ ID NO: 88456 - DNA, 476 bp, Homo sapiens
ggcacgaggtgttgtgcctgctgaggatggccggaggctcgccgacgaccttggtttcgagttctttgaagccagtgccaaggagaacatcaacgtgaagcaggtcttcgagcgcctggtggatgtcatctgcgagaagatgaacgagtccctggaacccagctccagctcaggcagcaacgggaaaggcccggccgtgggggatgctccagccccccagcccagcagctgcagctgctagagatggcccccaaccccccacccacccctctcctgcctcggcagggactgtgatcgaggcgtgagccacagtggttatctccaagctcagggcaatcccttccctcctgtcaactgctccccgactcctgcatggctcattccttcacaatgtcgccgtggctgccaggttcctcaggcagccccggtgggaggctgcggaccatggggactcagctctgcatggcaggcagagg

SEQ ID NO: 88457 - DNA, 1536 bp, Homo sapiens
gacgcccacgcgtccggacggcttcgacagtgaccgaggcctgcaggaaggctatgaaaacagtcgctgttacaatgagatggcgctgatccgcgtggtgcagtccatgacccagctggtgcggcggccccccgaggtctttgagcaggagatcaggcaacactttagcactggtggctggcggctggtgaaccgtatcgagtcctggctggaaacccatgccctgctggagaaggcccaggcactgcccaacggggtgcccaaggccagcagctcgccagagcccccagctgtagccgagctgtcagactccggccaacaagaacctgaggatggagggccagccccaggagaggcctcccagggctcagactcagagggcggtgcccagggcctggcctcagctagcagggaccacacagaccagacttcggagaccgcaccagacgcatcggtgccacccagtgtgaaaccaaagaagcggagaaagagctaccggagcttcttacctgagaagagtggctaccctgacatcggcttccccctcttcccactttccaagggtttcatcaagagcatccggggtgtcctgacgcagttccgggctgccctgctagaggcaggcatgccggagtgcacagaggacaagtagctgccaggcacagaggaaagagcatcaccgtgggagaggccagccgccgcctgctcactcccccccggaatcacccctcttcccatgcccctctgtccccactgcaaacccactgccctcttctccccaaggtgagtttgatgctgaagtgcaagaagtgtgttgagatgctgccgtttctattttgaagcgagctttcaacaggcgggtcccctgtggcaaagaaaatcggaaccctgttgccgattttccatttgtcaccccagcagaatgtccggcacttgctcccttgctgccccttctcaggtcagaggcgggtgttccagggcctgccgcggggctctctgggccggttccctgcagacccgcaggagagcacatgtgccttgcatgaagtgtgggttgcgccaacaattcccctggtccctttcaacctgtttagttcaactcaagcctccctgtgtcccagaccctcctgctgccaccaccacccaggtcctccctagtcctccagcgtcaacactatcccttgggagttgtagctgctgtcactgactcccggctatacatggcctgtcgaccacgttatagccctcaggcctgttgaacttgctctctaagagaggttgggaccaggctaggttccgggtgacgcccaggagaggtggtggccttcacacatgcacatggagttgaggaccagggagctgcagggaaagcaacagctataggtgccttgctcttctgtcggaggctgctgggggcaagagcagctgcacaaggccagggcaagtgctagggcccctcccccatcacatggtcacactgggacaggcgtgcagctcactgaactccaagcgagccagccctctcttggactagaa

SEQ ID NO: 88458 - DNA, 1090 bp, Homo sapiens
ccggcacgaggaagaaacacgaaaagattatgattacatgctggatcatccagaagagtactacagccattactaccactactatagcaggcgcttggcccctaaggtggatgttagagtagtgattttggtcagcgtgtgtgctatttcggtgtttcagtttttcagctggtggaatagctacaataaggcaatcagctacctagccacagtgcccaagtaccgtatccaagctacagagattgccaagcagcagggactgctcaaaaaagccaaagaaaaaggcaaaaacaaaaagtccaaagaagaaattcgtgacgaggaggagaacatcataaagaacattataaaaagtaaaatagatataaaggggggctatcagaaaccccaaatctgtgatcttctcctgtttcaaattatcttagctccttttcacctatgctcatatatagtttggtattgtcggtggatctataattttaacatcaaaggcaaagaatatggagaggaagagagattatacattatacgtaaatctatgaagatgtcaaagtctcaatttgatagtctagaagatcatcagaaagaaacttttcttaaacgagagctctggatcaaggagaattatgaggtctacaagcaagaacaagaggaagaattaaagaaaaagttggcaaatgaccccagatggaagagatacaggagatggatgaagaatgaagggcctgggcggttaacatttgtggatgactgaagattgatggaatgctactatgccaaaccttaattgtgatattattttcataactgaattattttagaaatgtatcaattgactgctgctcagcagtaactaaaattcctcaagtatttgattaaacagaataatgtcaaaatttaaaccttcccttaaaactttatacataagacatttatgattgttcaatttttataatctatttgtggattttgttaaaagatttcacatgaagatttattagttgccatttaaaatttttatatgtttagttaaaagatttgacatgaaaatctattagataccatttaaaaattttaaaaaaaaaaaaaa

SEQ ID NO: 88459 - DNA, 634 bp, Homo sapiens
cccacgcgtccggaacttcagtggtgctgatctttctcgtttggaccttcgatacattaacttcaaaatggccaatttaagccgctgtaatcttgcacatgcaaatctttgctgtgcaaatcttgaacgagctgatctctctggatcagtgcttgactgtgcgaatctccagggagtcaagatgctctgttctaatgcagaaggagcatccctgaaactgtgtaattttgaggatccttctggtcttaaagccaatttagaaggtgctaatctgaaaggtgtggatatggaaggaagtcagatgacaggaattaacctgagagtggctaccttaaaaaatgcaaagttgaagatctgtaacctcagaggagcaactgtggcaggtactgatttagagaattgtgatctgtctgggtgtgatcttcaaaaagccaccctgagagggtccaacgtgaagggagctatatttgaagagatgctgccaccactacacatgtcacaaagtgtcagatgagaattttaggggctggaggaagatgtaaaccaccaaaatgttttccttatcacttttctttctacaaccgctcagttgtctagaagaaataacactgtaaggaaatttaaaaaaaaaaaa

SEQ ID NO: 88460 - DNA, 1110 bp, Homo sapiens; identical to SEQ ID NO: 73112

SEQ ID NO: 88461 - DNA, 1306 bp, Homo sapiens
atcattacgcctagcttggcacgaggccgtaggactggttccggcgggctggtgaggaatggagccggtaggctgctgcggcgagtgccgcggctcctccgtagacccgcggagcaccttcgtgttgagtaacctggcggaggtggtggagcgtgtgctcaccttcctgcccgccaaggcgttgctgcgggtggcctgcgtgtgccgcttatggagggagtgtgtgcgcagagtattgcggacccatcggagcgtaacctggatctccgcaggcctggcggaggccggccacctggaggggcattgcttggttcgcgtggtagcagaggagcttgagaatgttcgcatcttaccacatacagttctttacatggctgattcagaaactttcattagtctggaagagtgtcgtggccataagagagcaaggaaaagaactagtatggaaacagcacttgcccttgagaagctattccccaaacaatgccaagtccttgggattgtgaccccaggaattgtagtgactccaatgggatcaggtagcaatcgacctcaggaaatagaaattggagaatctggttttgctttattattccctcaaattgaaggaataaaaatacaaccctttcattttattaaggatccaaagaatttaacattagaaagacatcaactcactgaagtaggtcttttagataaccctgaacttcgtgtggtccttgtctttggttataattgctgtaaggtgggagccagtaattatctgcagcaagtagtcagcactttcagtgatatgaatatcatcttggctggaggccaggtggacaacctgtcatcactgacttctgaaaagaaccctctggatattgatgcctcgggtgtggttggactgtcatttagtggacaccgaatccagagtgccactgtgctcctcaacgaggacgtcagtgatgagaagactgctgaggctgcgatgcagcgcctcaaagcggccaacattccagagcataacaccattggcttcatgtttgcatgcgttggcaggggctttcagtattacagagccaaggggaatgttgaggctgatgcatttagaaagttttttcctagtgttcccttattcggcttctttggaaatggagaaattggatgtgatcggatagtcactgggaactttatattgaggaaatgtaatgaggtaaaagatgatgatctgtttcatagctatacaacaataatggcactcatacatctggggtcatctaaataataattaaagtggctttcataatatgtaaaaaaaaaa

SEQ ID NO: 88462 - DNA, 7853 bp, Homo sapiens; identical to SEQ ID NO: 63764

SEQ ID NO: 88463 - DNA, 811 bp, Homo sapiens
  misc_feature (1)...(811): n = a,t,c or g
ggcacgagagcagtgacttcaagggcctgttgaagccaccaattctggggcaaacaatccttacccagtggatgatgttccctctgaaaattgataaccttgtgaagtggtggtttcccctccagttgccaaaatggccatatcctcaagctccttctggccccacattctactccaaaacatttccaattttaggctcagttggggacacatttctatatctacctggatggaccaagggccaagtctggatcaatgggtttaacttgggccggtactggacaaagcaggggccacaacagaccctctacgtgccaagattcctgctgtttcctaggggagccctcaacaaaattacattgctggaactagaagatgtacctctccagccccaagtccaatttttggataagcctatcctcaatagcactagtactttgcacaggacacatatcaattccctttcagctgatacactgagtgcctctgaaccaatggagttaagtgggcactgaaaggtaggccgggcatggtggctcatgcctgtaatcccagcactttgggaggctgagacgggtggattacctgaggtcaggacttcaagaccagcctggccaacatggtgaaaccccgtctccactaaaaatacaaaaattagccgggcgtgatggtgggcacctctaatcccagctacttgggaggctgagggcaggagaattgcttgaatccaggaggcagaggttgcagtgagtggaggttgtaccactgcactccagcctggctgacagtgagacactaanaggngtcgatg

SEQ ID NO: 88464 - DNA, 553 bp, Homo sapiens
aggcttatcagacctcatatacccatccattacccaatctggggaagtgatgacaaatccaggagaggatccactgtggatctggtggctgaagatctggtaaaatgatgccatgggcaaggccgccatgggctcctgcagcaagtggaccatgtactcatctcaaggctatagaggctctgtagcctgcagggccacattaacaacattcacagaagaggctcctggtgactccattccaaagccaggatactttagcttcttgaacttttatgtcataaggtcagaaatttaccaaaggatgcttttccttacttagtgaatcttatggctccttttagaaagcgtgggaacaaccaaggtcagaatatgatgtttgagtgtaaccaaattctcctactgcccctggagcttaaagcatctgggccacatgggaatgtgcactcttaagctagtgctaagaaggaagattgatggtgagagtttgcccccacgtagacagcccccagtcttgcattgtgccaataaacagtctctaggagagggggctgaa

SEQ ID NO: 88465 - DNA, 6031 bp, Homo sapiens
gggagagaaaggagggatgaagccgcctgcccactggacgggagggctgcagccagagcttcagggtagccctgctggatgggacagcactgagggctggacctggggggatggagaacatgggctgggggcagcagccatgcctacctggggggcccgccccgcgtccccagatcgctttgcggtgtctgcggaggctgagaacaaggttcgggaacagcagccccatgtggagcgcatcttcagcgtgggggtgagcgtccttccgaaggactgtccggacaacccccacatctggctgcagctggagggccccaaggaaaacgccagcagagccaaggagtacctgaagggcctctgcagcccagaactgcaggatgaaatccactacccgcccaaactgcactgcatctttctgggagcccagggcttcttccttgactgcctggcctggagcacgtcagcccatctggtgcccagggcgccaggctcactgatgatcagtggcctgactgaagcctttgtcatggctcagagccgggtagaagagctggcagagcggctgagctgggacttcacgccaggaccatcttccggagcctctcagtgtactggagtgctgagagacttctctgccctgctgcagtccccgggggatgcccatagagaggctctgttgcagttgcccctggctgtccaggaggagctgctgagtctggtgcaggaggcgtctagtgggcaggggccaggagcactggcttcttgggaggggcggagctcagccttgctgggtgctcagtgccaaggagtgagagctccccctagtgacggcagggagtccctggacactggatctatgggacccggagattgcaggggagcaaggggagacacttacgctgtggagaaggagggagggacacagggtggtcccagggagatggatttggggtggaaggagttgcctggggaagaggcgtgggagagagaagtggccctcaggccacagtcagtgggtggaggggcaagggagtcagcacccctgaaagggaaggccctggggaaggaggagatagctctgggaggaggagggttctgtgtccaccgtgagcctcccggtgcccatggctcctgtcacagggcagctcagtcccgaggagcctccctcctccagcggctccacaatgggaatgcctctcctccgagggtgcccagccctccacctgcaccggaacccccatggcactgtggagaccggggtgactgcggagaccggggagacgtgggggacaggggagacaagcagcagggcatggcacggggtcgggggcctcaatggaaacgaggcgcccgagggggcaacttggtgactggcacacagcgtttcaaggaggccctgcaggatcctttcaccctgtgccttgccaatgtgcctggccagccagacctccgccatattgtcattgacggcagcaacgtggccatggtgcatggcctccagcactacttctccagccggggcattgccattgctgtgcagtacttctgggaccgtggtcaccgtgacataactgtctttgtgcctcagtggcgcttcagtaaggatgccaaagtcagagagagtcacttcctgcaaaagctgtattccctcagcctgctctccctcacaccctcacgagtcatggatggcaagaggatctcctcctatgatgacaggttcatggtgaagctggctgaagagacagatgggataattgtctccaatgaccagttccgggacctggcggaggagtctgagaagtggatggcaatcatcagagaacgcctgctgccctttacctttgtgggaaacctcttcatggtacctgatgacccactggggcgaaacggccccaccctggatgaatttctgaagaagccagccaggacacaggggtcttctaaggctcagcatccttccaggggctttgcagaacatggtaaacagcagcaggggagagaagaggaaaaaggtagtggtggcattcggaagacccgggaaacagagcggctccggcggcagctgctggaggtgttttggggtcaggatcacaaagtggacttcatcctgcagcgggagccatactgccgggacatcaaccaactgtctgaggccctgctcagtcttaacttttgagcctcacctgcttgagtggctgccgccctgtcagctccagccgcctccagctcagccctttctgtgagagtccctctgctgctcactctgatccagaggcaccctgagttggtgctttggatcagggaagccactttgggacaggtccataaagtgaactgatcttaccgagtcaggacctcagccagctctcaagaggttctgctcagccttaacttctcaactttgccttagcacagggtttctgtagggagtgggggctgctagaggggattagttccggagactgagactgttggctccacctccaagctgagctagggtggagggcagggtgggcaggaagtgacaggaagttaagctgttcctctccctggctgctgctctggatggccagagaacaagatgctcccttgctgagctcctgggagcgtggaaggagatgctaggccctggcacagtgttatgtggactgggccacgatagggtggagtgagctagtgaagaaggcagagggagacttggcttctggtctcagctatgcctgttttgtgaccttgattgagttgcttgggctttacttctgcctacaaatcaggggtaaaaatacctgttgggaggagaaatgagaacatagaggaaagcctcttggaggaaaggtgcttggaccaagtctcaggtgtgtctgcctgtggctgcacaggctctctaaccgaaacctcactttcagagagatgtgggtcctttgtctccaggatccacaccctagattttaacactgcattctcactataacatgccctataatggctgcatcccttttgagcaacctccaaaatctacatttacacagtaggtaaattagggatgactgcattatcaaaatactctcagggttcctataaatggcagctctcctgttgtattcaggtgttgtttacagactaacaaatgtgttggcaaatccctggttagatgcacttcctggtgttgagatgaacacgtcgatttttcaccaatcgatgaagccatgctctgcaatgacaatattaatgtgatccgaccctaacattttctctatggaagacgtatgttgcataaagcaaggcacacttctgctttatgtgtgtgtgtatggggatgggaggacttaacggaagttgaaccagttggttctagatgaaccaattatctggaaaatgaaagaaccagagttggaaggcacttgactggccaccagaccaactctgctgttactgacatgctttcttcaccctgattcctagaggtcattgccctggatctgcttgaagtcctcctgtgccagggaatttactatctccagggtagcacattccctgtgtagacggtattaatcagtactccttactttagtgcagcctaaagtatgcttttctgttacatccacctttgaggctggtcatacctccaggaacaatacagagccagtcaacttcctggaatccaagaccagataaagaagtaggacaggtgcccctgggttctgttctgtgtgggcctgtggggagtctctagacaagatcttttccaggccctgacttctgcctccctctgagtggcacagggagttgaatactgcatggcgagtgtaatgatgatggggagggtccttgtgtcctcaccccttcctttttggtgatttacaccactgtaccatactgacccaggctgggggcaggtgtgttggagacaggctggtcaaagaggtgacaatgattaagagataacccagtggtccctgagaagagattggttagtatggcctgaactggtggctgggggaactgtgtctggtcaagttatggcagatgtcacagctttaggtaggtaaaaagggtcctagatgaaaaccttggagtttttttttttcctgatagggttgtttatacttcttgattggtttcttgccattttcactttcagtgatggtgggtgtgcagtagaccaaaagtgtcttctgcccttttgtgctaagggccctggttgactgagtggccccagtcagatgagaggcaagtcctaagcttcttatagacagggatgttgactttgttctgctgcagcctgataaactgggaccactgtgtggttagtaatgcacttgccatttggtgacacagactgaaggctatcctacacctgggccttacctcttcctctactggcatcctaatggcactctgacagcatccagggtgactacagggcccattggaaatggatcatcattctctcttctagtgtctatctttatcataacctgatgtcccaaacttgtgacaagttcttttggcaactgaaggaccaagaagggaaacggtgatgagagagactgcccattataactttcaaaaccccgtctttggggaagaatcatctagggtgacattccttgaagtaaatcccaggagaatctaggccaaagagatgagccaaggttagtgagacaatttatttttattgcctaaactgcagagcattctctacacagcgtaaaggagaagtggggcagctgcaggacatgtagagaaaccaaaccgggaaatcttacaaggagttgaaaagattaatgtcccaacctgatgagattacggccttgagacaataaggtggagcaacagaacaatgggaaagaggactgggagaggaatctaagaaccagatggcttcagctctctagaggagctgagcctattcacagtgcctaacctggaagcctgtgaggaacaggcctcaggcccttgccatgacctacttaggctacaatttcctttaaggcagcccctagctctgggaaggaatactggtagccagtggccagtgttcgccgtgggatcaccttctggccctccagcagcatgatggcacgctgtcgcccaaagacagcttgcaccacagcgctggggagagggatgaaggctcggcggcccagggcagcaccgaaggtctgggcaaactcagcattagtggcggaggatggagccactccattcaggaccccgtgcacgtggtttgcttcaagggcatgggtcaggattcctgccaggtccccgatgtgtatccaggggaagaattggtggcctgagccgatggggccccccaggcccaggcgaaagggcagcagcatgtggcccatggcaccacccccacggcccagcacaacccctagagcaggaaagagggaaggtacaggggtcttctcagccttgaaggagcccactgctcctcctggtttctgtttccccttcctcactctccccatgctgacttggctctgtaacagaagtgagcagtatggctgtctttaagacctcacaccttctcatctgcaggttggctagaagtggtggcatcctctcactctgtaattgtaatctcagctctcctaatcccatcacttccccagcccagagaagacattccaaccctgtctgatacccaggcccgtttctcacctgagcgcaccaccacctggcgtgtagaatctccaggaagcctggctgcagcttcccatttggttacgaggttggagaaaaagtcaaagtcccctcctgggctgtcttcatcatactccgcagtcagactgggctggtagtaagctacacctgtgactaagacccaggccttggggggttgtggggctttggtgatggctttagccagcaattgggtggtctctaggcggctgccgattacctctttttggaaggtttcattccatcttcggagagggttgaggatgttctctccggccaggttgacggcggcatcgcagctaggcagccccgatgcagcgagctcatcctgtcggag

SEQ ID NO: 88466 - DNA, 825 bp, Homo sapiens
agaccagcgtggtggaattcgcagaaggctctgggaaaggtgacaccactcctgaccctggtgactctgtcatgtgagccagggctgctggtggccccggtaatccagcagtccccattcctgggctatgctggcgggccagagctggcccaggggaagttgctaaaggatgtcttccggcctggggatgttttcttcaacactggggacctgctggtctgcgatgaccaaggttttctccgcttccatgatcgtactggagacaccttcaggtggaagggggagaatgtggccacaaccgaggtggcagaggtcttcgaggccctagattttcttcaggaggtgaacgtctatggagtcactgtgccagggcatgaaggcagggctggaatggcagccctagttctgcgtcccccccacgctttggaccttatgcagctctacacccacgtgtctgagaacttgccaccttatgcccggccccgattcctcaggctccaggagtctttggccaccacagagaccttcaaacagcagaaagttcggatggcaaatgagggcttcgaccccagcaccctgtctgacccactgtacgttctggaccaggctgtaggtgcctacctgcccctcacaactgcccggtacagcgccctcctggcaggaaaccttcgaatctgagaacttccacacctgaggcacctgagagaggaactctgtggggtgggggccgttgcaggtgtactgggctgtcagggatcttttctataccagaactgcggtcactattttgtaataaatgtggctggagctgatccagctgtctaa

SEQ ID NO: 88467 - DNA, 353 bp, Homo sapiens
ggcacgagctgatgtactccactgttctgtgcagctattacaattcagccctgacgacagcagtggttggagccatcaagaatgtatccgttggctacattgggatattaatcggtggagactacattttctctttgttaaactatgtatggataaatatttgcttggtaggttgcttgagatattcctttttaatactgatcattcaattaattcctcttcctgtgttagaattatttatccgtattcttttactatatctttcattattttttcaactttatattatctataatatctgtatttattattcatttatttctttcttcttatttatcacgttattgtaattc

SEQ ID NO: 88468 - DNA, 331 bp, Homo sapiens
agcagctgtactggagccacccgctaaaattcgtccagggttctagctcttgtcgcgtctgtgcaaaccggcacggtctgatccggaaatatggccttaatatgtgccgccagtgtttccgtcagtacgcgaaggatatcggattcattaagttggactaaatgctcttgcttcagaggattatccggggcatctactcgatgaaaaaccatgataattctttgtatataagataaacatttgaaaataccagcacagaaccgagaagcgggcggaggttctaggggatccttagggggcccaacttttaatccggaagctgaccttataa

SEQ ID NO: 88469 - DNA, 331 bp, Homo sapiens
taaagatgcaagccggtgaaacacgggtttttattaggcaaaatccaaatgctcaaggcccttcataatatcccccagtttagtagttggacttagggaacaaaggaacctttaataaaaattggacagcaagaaagcgagcttagtgatacttgtgggccagggcattacccacaccacccaccactttctgataggcagcctgcactggtggggtgaattctttgccaaagtgatgggccagcacacaaaccagcacgttgcccaggagcctgaagttctcaggatccacgtgcagcttgtcacagtgcagctcactcagtgtggcaaa

SEQ ID NO: 88470 - DNA, 330 bp, Homo sapiens
gggcatagtactatgggattactaattcagtttggaccagagaagtacttcaaagaagaatggtaaaaatatttccctatctgccaattaaaagtgatttgtggaatctctttataaatcattgtgtgctttacatcaacactatttttcccatttttattggcttctatttcttatttttcccattcttatgttttataagctgatgttagctttaactggtggttaataaatataatatcattttgtgaggaaattagtagacagacaatgcctgaaagtttttccatggaagaaaacaccatggacttggcaaatacaaggggaagt

SEQ ID NO: 88471 - DNA, 2596 bp, Homo sapiens
attgccaatggcgtatttattttaaccaggttatggggaaaaaatgcaagaattattaccagaatttgcatcaattttctggagaagctaacaataaaacattaaatatacacatttatttgtatgtttatttgaagaatctttggtagcaactgtttgtttcttccacattataggactttctaaaataaatgtcaaaaatcgtttactaatcagcatacgaaagataaagtatgataatattcttttgatttccctgtaaaacatccttgataataacttgtactattcatgcacttaaaaacagtatctgtttaacttatatacatacaaaatgagactaataccagaaaaaaaattagacagtaatgagaatcaataacaaaacataccaatgacaactgttcttaagtaatttattttaaaattataagatttacagtgccttgattatgcaaaatagcataatggaaattaaaccaaatcaataaaccaaagagaaagaaaacttaattttctctagtatccatacttaaaccatctttgtaagtatctgatgtcccaaccatgtcttatgtagaaagtataatcgtttcaaatgtttcacttgcaggtttaatttctcattttcaatttttatgaactgtaatgcaatttcaaatcctattatacctagtgtttatactgcaacagcagcaaatctcacatgtgtaatcaaatgtggaactggggcacagcttctagctgtagacagaaattatacactgcattcagtccaggagagtacattacattaaccagagcgtagagtttagtacacttattgcagggttggtatttctttccctctgatctgaatcagctgagctgctgagcagacatattactgctgtggatagtaagactgctgtgggggctgagggaaggggtatgaaggctgctggggtcccgggtatggagcctgtccaggactctggtgatacactggtggatatggcatattatactggccatacgcataaggattatagcccatgggcatgggcatttggcaatacccaggatatcctggataggtgggatagggtggtccctgcgcctgtggaggaggagctgagccaggcgtttgtgatggagctggcgcagcagtcccagcccccactggagatggagcagtagcagaaggagctcgatttgctggaagcacaggtggtggaggcctggctgggggctggggcttagtaggcggcatggttcttggcgctggagttggaggagttggtgcatgtcctcctgctggtgaggactgatacgcaggtgtaggaattgaaggagcactaggttctctggcaatgctttgttgcaagtcctttaagagttcatctctttctgtcttccgtgcaaaaactatatcactgcatttgttctggaacctgaccaggatttcagtcaactcattgtaaaactttgtgccttccttcaaattagctacaagttcaacaaagttgtcatatgcagtagctaaattcttcaaaacttcttctcttaagttagcttcattattagattgtttcatttttgaaaattcctgatgtgagacctgaatatttttaagaagtccctcctgtttctttagagattcttggactttagttgtaagacctccatagactcgatctagttcagtaacagaaagagcttcttcatttatcacaccatcttgagccagggctgtcaaaaacttgcttgtcatgtcaaaattcacagatttcaagtcattctccagaccctctctttccttctttacttcatcaagatttgacaataaggattttaagacatttacaacctcactgccctgcatggtctttgctggattagcagaagggatggcagcattcagctcaggctctggcttacacaaaagcacgatggtgtcacgatgagactggtaacattctttcacttgtccatctgcctgcacagctttatctaaaactgttctgaagttggttccctctgctcttaaaggcttatacagttcattggatggtgtcctttgccaacgttccttaaattttgctcttaaatcattatcggttgcttcttcttcatccaacaaccttaatgactcatctaggatttctctatttcgttgcagtaattcaggcagttctttaatcaactgatcaacagtctggatgcctccctgttcaatcacagatctggatttagtcaatatagactgaggtacagtgtctccagacacatcttcaattgctgctggaagattaagggaagctagcaccccatttgccaaagtggtggcttctctcatctgagcaattgatctgttaatcaaatcggctttcctctgattataggcagccaaagactgctgtactgacacgggaaccatcttctcaaacagatcagtaaatttctgactgatgggtacattgaccggggtagatttcacaagtgtggctttgccaataggatctagatctttaaggtctggaactcgatcatgataaatgaagtcattatccttctttgctgcagcaagggcacgattgatcctgtcagaaaaatc

SEQ ID NO: 88472 - DNA, 1501 bp, Homo sapiens
tgcacacagagactctgaatattgtgtttgtaacctacttcagaatattgaagaaggcccagaggtcacctctcctgccagcagttctagaaggtcttgccaagtttgctcaccttataaatgtggaattttttgatgatctgttagtagttcttcatactctcattgagtctggtgacctaagctatcaagaaagtcttcactgtgtccagactgcttttcatattctttctggacaaggtgatgttctgaatattgatccattgaaattctacacacatctctacaaaacactgttcaaattacatgcaggtgctaccaatgaaggtgttgagattgtactccagtgccttgatgtcatgctaactaagcgcagaaagcaagtttctcagcagcgagctcttgccttcatcaaacgcctttgtacccttgctcttcatgttcttccaaattcaagtattggcattttagcaactaccagaatattaatgcatactttccccaaaacagatctactgcttgacagtgaatctcagggaagtggagttttccttcctgaactggatgagcctgagtactgcaatgctcagaacactgctctgtgggaactgcatactctgcggaggcattatcatcccatagtgcagagatttgcagcccacctgatcgctggagcaccttctgaaggctctggagcactcaaaccagagttgagtcgaagatctgctactgaactttttgaggcatatagcatggcagaaatgacattcaatcctcctgttgaatcttcaaaccccaaaataaagggtaaatttttacaaggggattcatttttgaatgaagatttaaatcagctaatcaaaagatactccagtgaagttgctactgaatcgcctctggatttcacgaaatatttgaaaacatcactacactagtagaggaatgaagtcagtggactttcttgtatatttgtgtgtgcagatgtacataaagatgagttgttaacttaggatcttttctttttatacaaggaaagcttcctaagaatgtctaggaagaagaggaagaatgaccctttgcatggcacagggttctgcccctattctgaatatgtcattccatcaaggagatcaaaagcctttttttctccccagtatttggaaattactttcttgatgatgctgccttttaaaagcttcacgtacattatagttttttaaaaaaatctttggactgcatcttactgaagtgcagttgctatattaaaattagggcatagagcacagaaaaatcaagaccatgagaagacattttaccatttagctactttttataactaaatactctttaaatatttttatttcaatactgtggatggaaatgagaagcattctaaatttgagttaatatatttttatgaagatatttgagaaaagaaaaaaatagcttgtattcaggttccattggcttttgctgggatgatccacctaaaggaattacc

SEQ ID NO: 88473 - DNA, 403 bp, Homo sapiens
cacgatggcaaccagtacagcgcctgcacggagccctggacgcggcttaacgtccgggacaagcttgacaaggtgggtgtcttcctggactatgaccaaggcttgctcatcttctacaatgctgatgacatgtcctggctctacaccttccgcgagaagttccctggcaagctctgctcttacttcagccctggccagagccacgccaatggcaagaacgttcagccgctgcggatcaacaccgtccgcatctagtccaggcagaaggagaccacaacctcctgggaccactgccacctgcaagagccctgcccaggagatagaagacctggactccagcccaccgtggccactggagacctcaggccagttgtttaccctccagcctccagtctgtaaaatg

SEQ ID NO: 88474 - DNA, 391 bp, Homo sapiens
tgctgggcatttttcagattggacctgtggcaggtgttatggcttacctgttcaccatcatcaacagcctgcagggggccttgatcttcctcatccactgtctgctcaacggccaggtacgagaagaatacatgaggtggatcactgggaagacgaagcccatctcccagtcccagactctcaagatcttgctgaccttctggccctttatactccatactgctatgagtcctttcttcattgtatagagatttgtgtataatacattattgtcctttattccaaatagcattgtcttctatatcttttagtagtattctaatgttttctgtcgtctctcgtgcttgaagttgatagtcttcttcatgtctggcctaaagggctactagcg

SEQ ID NO: 88475 - DNA, 431 bp, Homo sapiens
tcgggacagatactctgcgggcaaaaggggtggatttaatacctttagagactgggaaaattatgacagaggttactctagcctgcttaaaagagattgtggggcaaaggctcagaatggtgtttacagtgctgctgattacaccaatgggagctttggaaaaaaacatgtgccttatgttaaacaaaccttttttttgaaaataaatccctcgtgtataaataaaatcggttgtgtaataaaaaaactgctttgtttttaacatatccttttgtattaaacttctacttctcattaaataatccaatgcttgtttacttactactaccatttgtttttcaaatcgtctcgtttttactataaaattttattactttattattctcagttatgttttatacttatttcttttctgattcgttatagtcgac

SEQ ID NO: 88476 - DNA, 407 bp, Homo sapiens
  misc_feature (1)...(407): n = a,t,c or g
cggatggcaaatgagggcttcgaccccagcaccctgtctgacccactgtacgttctggaccaggctgtaggtgcctacctgcccctcacaactgcccggtacagcgccctcctggcaggaaaccttcgaatctgagaacttccacacctgaggcacctgagagaggaactctgtggggtgggggccgntgcnngtgtactgggctgtcagggatcttttttccccgatattgctggaactatattgggataactgctacctaactctcatcatctatgcctaacctataactaggtcgatatgtctctcactttatcgatcataggtccttctctatatagctcatgtggttcacatttatatatcttgctgtgtcgctctgtatgtctctctagcgagatatgatc

SEQ ID NO: 88477 - DNA, 1711 bp, Homo sapiens
  misc_feature (1)...(1711): n = a,t,c or g
agcaaagatgccgtcagctagtactgaaagccgaagagactggggcaggggaatggcttgtgttggtcgtacgagagaatgtactattgtcccttctaatcattatggacccattcctggtattcctgttggatcaacttggagatttagagttcaggtgagcgaagagngtgttcacagaccccatgttggtggaattcatggtcgaagtaatgatggggcttattctcttgtactggctggtggatttgcggatgaagtcgaccgaggtgatgagttcacatacactggaagcggtggtaaaaatcttgctggtaacaaaagaattggtgcaccttcagctgatcaaacattaacaaacatgaacagggcattggccctaaactgtgatgctccattggatgataaaattggagcagagtctcggaattggagagctggtaagccagtcagagtgatacgcagttttaaagggaggaagatcagcaaatatgctcctgaagaaggcaacagatatgatggcatttataaggtggtgaaatactggccagagatttcatcaagccatggattcttggtttggcgctatcttttaagaagagatgatgttgaacctgctccttggacctctgaaggaatagaacggtcaaggagattatgtctacgtttacagtatccagcaggttacccttcagataaagaagggaagaagcctaaaggacagtcaaagaagcagcccagtggaaccacaaaaaggccaatttcagatgatgactgtccaagtgcctccaaagtgtacaaagcatcagattcagcagaagcaattgaggcttttcaactaactcctcaacagcaacatctcatcagagaagattgtcaaaaccagaagctgtgggatgaagtgctttcacatcttgtggaaggaccaaattttctgaaaaaattggaacaatcttttatgtgcgtttgctgtcaggagctagtttaccagcctgtgacaactgagtgcttccacaatgtctgtaaagattgcctacagcgctcctttaaggcacaggttttctcctgccctgcttgccggcatgatcttggccagaattacatcatgattcccaatgagattctgcagactctacttgaccttttcttccctggctacagcaaaggacgatgatctgcctgctttcactgtgttgttcatggtggctttttggacaataaagaatctaaaatgggtggggagggtggaagaaatggtggactgtatctctcacgttctgaagcagctaatcctctttcccacatagccatcatcttgtgtgtgtagtaagaggcccatttctcaactgtcttttaaatatctaaaggtagttcctgtaacaactagttttaatgagtaaaaagtcaaagcctcagctctagttgatatccaagttatgatttattttgcaactacctcaggacagaaaagatttatggggattttaaaaatcattgaataactagttaaatgaaattttagctacacactgcctcccaaatattagttgtgcctggttcttgtaatttgattttacagaaaaggaaatgacacttgagatccttggaatgaacacagcttctaaagtgtgcatatacttttttaacgtctcttcttccattacaatgtgcgttttgcaaggacaggttcattttttttagcccactttgt

SEQ ID NO: 88478 - DNA, 1033 bp, Homo sapiens
aagaatgtggcaaaggctttagtatattctcaacccttactaaacataagataattcatactggagagaaaccctacaaatgcaatgaatgtggtaaagcctttaactggtcctcaactcttactaaacataagagaattcatactggagagaaaccctacaaatgtgaagaatgtggcaaagcttttaaccagtcctcaacccttactagacataagatagttcatactggagagaaaccctacaaatgtgaagaatgtggtaaagcctttaaacggtccacaactcttactaaacataagagaatttatactaaagagaaaccatacaaatgtgaagaatgtggaaaagcctttagtgtattctcaacccttactaaacataagataattcatactggagcaaaaccttacaaatgtgaagaatgtggcagtgcctttagggcattctcaacccttactgaacataagagagttcatactggagagaaaccttacaaatgcaatgaatgtggtaaagcctttaactggtcctcaactcttactaaacataagagaattcatactggagagaagccctacaaatgtgaagaatgtggcaaagcttttaaccggtcctcaaaccttactcgacataagaaaattcatactggagagaaaccatacaaacctaaaagatgtgacagtgcttttgacaacaccccaaacttttctagacataaaagaaatcatatgggtgagaaatcctagaaatgtgaagaatgtgacaaagcctttaagcggttgtcacacttgattgtatataagataattcatactggagaaaactcccagaagtgtgacaaatgtgacaaaacatttaattaattctcataccttattgcacaggaaagcatttatacttgagaaaaattgtataaagaatggaaaagtcattaatatctgctcatatcttaacatcagcgagttggtatttaataaaagcattatcaatgaaattactgtcaaaagatctttcagacaatataagcctg

SEQ ID NO: 88479 - DNA, 579 bp, Homo sapiens
cccacgcgtccgctctggcttctcccgccagcggatgtgaccctggaccccgagacagctcatcctaacctagtcctgtcagaggatcgtaagagcgtcaagttcgtggagacaagactccgggatctccctgacacaccaaggcgtttcaccttctacccttgcgtcctggctactgagggtttcacctcaggtcgacactactgggaggtggaggtgggcgacaagacccactgggcagtgggtgtatgccgggactccgtgagccgaaagggcgagttgactccactccctgagactggctactggcgggtgcggctatggaatggggacaaatatgcagccaccaccacaccttttacccctttgcacatcaaggtgaaacccaagcgggtaggcatattcctagactatgaggccggcacactgtctttctacaatgtcacagaccgctctcatatctacaccttcactgatacttttactgagaaactttggcccctcttctacccaggcatccgggctggacggaagaatgctgcaccacttaccatcaggcccccaacagattgggagtga

SEQ ID NO: 88480 - DNA, 1781 bp, Homo sapiens
gcgcggtgtgtaggcggcagcaatgttccgttgagagacgcggctttcggcaagaactggattcgtggcgccacaagctcattcactgtgtaggtcccgtttccctctgtgcggcggccggcgggaccataagggcttaactcatatatttaacccccctccaaaaaggtttcgttggaaggaattatgcaaatcctgctttctggtgtccattcagcggcaatttcatgcgggtttgaaagtattcttgaagggctgtttggacctgcattattaaaagatctcagtttatttaaagactgtgaacctgaaagcatttctgattggacttttgatgaaaactgtttattctgttgcttgagaagagataaaagaaagatttgggccaggcttagtcatctattggtatggatttatccaggagctggactgcaaccgggaaaggggcatcctgctcaaagcctgtttccccacgaacattgtcaccttatgccacagcatagcttgaccctgaagatcctggaagagaagctgggaggaaaaggtgaatccggaagcaattttactttcctgcactgtaagatcctggcaacatctgccctgaacttcagctgaactcttgctgcccgtagtcacaccactacctctttagacaaacatatcaagagtttctgttttccttcatcccttgctgatgtgaacagccaagaactacagacacaacccactcattatcagcatttctgtctctgtcaaacaattagtttatagatagtcataatctttctttcttccggatggtttatccttgtatgctgaacaaaagaaaaaatgtgaagactgaaaggtgtgatttttcaattctcctcccagttaccgaatcaccctcttatttttttttccctaagcctccgttcactgtctctccctctccctttctcttcatgtgcactcacagagacccagcattgcattaccatcgtggaataatctagcgcaaacctaggaaagctgaagccacaaagtccaaagccacctttgtactcacctgcagagctccagaagaccttgatggcagcctgcctatgctgggggtttgctatattcaatctttacggcttcctgacttctgtgacagtaagccaagtgcaaaaatacacttgatgagaatttcctcttttaataatgttatttgaacaccacatattttagatttatcttatttgaaagtattagttccattgtgcctggaaaccacactcctttagattgggggccgagaggcgacaacccaacattgaggagagtttatttttaaacatggctagttgtcagtatgtacgtgagctagtatttttatgagtcgagttttttaaaggcacattctgtatactgcttagtatatgcattttataccatgtaattataaaacactcgagtaagttcagcattagaaatgtttagctttgtatgaactgagtgtgccagaaataaacctggagcaatttttaaataagcaaaataaaggagatttttctatttgttcactttaatttattcacttttgtgtacttttatgtactgcaaatcagatttcagtctaaagcgaaacatcagtaagttaataataaacctatctttcgggaagttgaatattaatctgtacccaaaacgtatttagtaaaatatttgcccccgccaccctgccatgctgacataacaacttttataatgttgaatagatgatatgggaaatactaataacaacaatgtaatttttg

SEQ ID NO: 88481 - DNA, 435 bp, Homo sapiens
aagagctgcccttatgtgtagatccaggcatgtggcaaagatttcatggacacaactggggagcgttctccatcaccactgaccgggaaagtcaatcagctggaattaattcttcgacaactccagaccgaccttcggatggaaaaacaagacaaggccgatctccaagcagaagtgcatcacctgagacaggaccacatgagactgcaggaggaggcccagaccgttacagctcatctgtggatattcacagaatggtgggtcacctccatcgactaaataatcttagccaatccgcgccttatcatgggaccactgggagatgtcccttgtctctttttagacacaaacattgtggtttccttttctctttaaataaaatctcatatcttttttgtgtgctttatgggcaccctaatacctttttattaaaca

SEQ ID NO: 88482 - DNA, 4287 bp, Homo sapiens; identical to SEQ ID NO: 63645

SEQ ID NO: 88483 - DNA, 590 bp, Homo sapiens
cgggagtcctggcccatgtgtattaccagaggctgagtgatgaactgaagcagcacttgaaccggactctggctgagaactacgggcagcccggagccacgcagatcaccgcctcagtggaccgactccagcaggatttcaagtgctgcggaagcaacagctcagccgactggcagcacagcacgtacatcctgttgcgggaggccgagggccgccaggtgcccgacagctgctgcaagacagtggtggtgcgctgcggccagcgggcccacccctccaacatctataaggtggagggaggctgcctcaccaagctggagcagttcctggccgaccacctgctgcttatgggggcagtgggcatcggggtggcctgcctgcaggtgagttgcagtgcggggactggtgggggtagaagggctctgaacccctctcccattgacacaggtcttcagtaaccacctgggctgaaataactgacccttgcacacccgcaccctaccctgctctcttcttctctccccttccctctgcaaccaaggctgaatcccacggtcagtctctcccccagagaacatgaaggaaaatag

SEQ ID NO: 88484 - DNA, 430 bp, Homo sapiens
ggcacgagcgtgactctcactcccagatgaagatctccttcaacgacaaaagcctgcagaccacatttgagtacccttccgagagctccctaaagcaggaggaagaggtggaccaccaggaggaggaggaggaggaggaggaggaacaggaagaggaggacctttgatcccgttcacaggacaatggtgtagccctattcctgtccggggcctccactgggagcaccgggagaccctacagctggttgatgcccaaagtgtaatgaggcactggcagctacaccccgacaccatttgtggccgtcagaatatgacctgagccagagctgcatgagggcgcgatgaatgcagagccctccccagaaatgccgtgctcacacccgacacgcacaatgacgtctcctacttccgcagcgagccctggctctat

SEQ ID NO: 88485 - DNA, 1389 bp, Homo sapiens
aacttcccggaacttgcacagtcactatcatgaggcccccatgacccggaagcactatcaggtcaccggctatggcataaatggaacaggggactcaaatgatttctggcggattgaggtcgtaaacaggaaatttggaaaccggatcaaagtgctgagaagtcgaattcgcttcatccatttggtcacaggttgtgtcctgggctcctcgggaaaggttctgcccaagtggggctgggagcagttggaagttacttgcaccccatacctgaaagaaaccctcaactccatctggaatgtggaggaccatatcaatcccaagttgccaaacatcagcctggatgtgctacagcccagttttcctgagatcttgctggaatcccacatggtcatgatccgggggaacagtggcctcaaacccaaggacaatgagttcacgtccaaaccctggcactggcctatcaactatcagggcctacgcttctcaggggtcaatgacacagatttccgagtctatctgcttggcaacccggtggtttggtggctgaatctgttgagcatcgccctctacctcctctcagggagcatcattgctgtagccatgcagagaggggcacggctgccagcggaggttgcagggttgtcccaggtcctgctgcgaggaggcggccaggtcctgctcggctggacactccattacttcccgtttttcctgatgggccgggtcctctacttccaccactacttcccagccatgctcttctcaagcatgttgacaggcattctgtgggacaccctcctgcggctctgtgcctggggcttggcctcatggcccctggcgaggggcatacatgtggcgggaatcctgagcctgctcctgggaactgcctacagcttctacctcttccaccctctggcttacgggatggttggtcccctggcccaggacccccaaagtccaatggcaggactaaggtggctggactcatgggacttttgaggccactgcaaagattccagcctgggtccaggaacttcccaggagagccagctgggaagcagtactggaccatctggccatgaggaagctgcctaaggagcccgaagaattctgctgctcaccaggacccagctctgggagtgcagctggaatggaacccagcattggagagagccgggagagagccgcagctccgtccacagcaccacggagaggacagcgcctcttgggctgctccctcgtgcacagcgcaggggaggatgggtgccagagggtgggagtgggtgcgcgtgtgtgtatgtgagggcatgttgtccatatccctgtggaatacagaccgtgtaactggacagctgagtgtcataaactctaaaatagtaaaaaaaaaa

SEQ ID NO: 88486 - DNA, 550 bp, Homo sapiens
ctttcatcatttgtgaaaggcagaacaacgacatgaagacacaaggctgtttagattttctgtatttcaagaagaatcatactcaaacacaagtggggtgacagaacactcagcgatatgtaattagttacgaaggttaacgctaaggcattgctttgtttacagtttttatcctgagtcacatcagatgtttcaactacatgtcctcttggtattccagatattttgctgtgatgggttcttcaagctgaattcctccactgcccattaatgcaaatgctggatacagtgtatgtgaacagtccacttggcgttcataaaggcatttcatctgatccatatcatagaaatttactttgcctttatcacagtcaaggaaaatcccaatacttgttggcatagggagaactctattttcaggttcattagaagaagtaggtgacttgggtataaaaaatttctgcatgcctatagtaactaaggtaaatggttgtgaagaatcaaaacaggcatcctcactttcactgtcatgcccactgtcttgctcata

SEQ ID NO: 88487 - DNA, 957 bp, Homo sapiens; identical to SEQ ID NO: 64769

SEQ ID NO: 88488 - DNA, 839 bp, Homo sapiens
tttttttttgaagaagagaggaaggaaaaaagttttaatgtgaagaaagaagcttgttgtcccatagaagccaaccactgctgtttcttcgtatggcctttcccggggtccgaagcgtctcagccctagcccaggccaacgtccagtgacatcatcactacaaatcccaggatggaggcccaggatgccagtttcccattaccactgatctgggcttcggggatgatgtcgtccatgaccacgtagaccatggcaccggcagcaaaggccatagcgtagggcaggatgggctcaaccagcaccacggcaaaggcaccaaagaccccggccaggggctccaccatgccgctcagctgcccataccagaaagctctccaggtggagaagcctgcccctcgcaagggaaggctgacagccaggccctcggggaaattctggatcccgattccaatggccaaattcctggcactctcaaaggtagcagatgccgtcttttctatagccccaaatccaactccaacagcgagaccctctggaacgttgtgtatagtgatggccaagatgagcagtgcgatcctcctccagctgctgccgccgggctgtgccagattccctcgagaaggcacagggacagcaggcccctatggaaggccagtggctgccgcagtccttagctgatatgcctctccattagcaatgtagtaggacaccgcagggtttcatctgtagtcgttcgctaggagacccgcagggcagcagtgctgtcgcgttaagccgtcatacgcatgagtgtcgtacggcttacgcttcgcgctctagagtgcccattcacagattcc

SEQ ID NO: 88489 - DNA, 426 bp, Homo sapiens
cgtgttctcacagctattaaccacactctgaaagaaaacctcaggaaattctacaagggcaagaaggacaagcccctggacctgcggcctaagaagacacgtgccatgcgccgccggctcaacatgcacgaggagaacctgaagaccaagaagcagcatcggaaggagcggctgtacccgctgcggaagtacgcggccaaggcctgaggggcgcatggtcaataaagcacagctggctgagaaagaaaagatatgatgcaatgatctaaaaccctggggggcgtttttaatataaccgtaggggggccgactgttattgggttaagcaaactattaattttcttctttattaggcgacaattaatacgttgtaggtgacttctggaaaggactattaatttgagtgggataaaacatggagacaag

SEQ ID NO: 88490 - DNA, 415 bp, Homo sapiens
  misc_feature (1)...(415): n = a,t,c or g
cgcggacgcgtggggacgcttttagtattttggatatgctgaaattagaaggaaaaatgatgaatggccttcgcaatcttgggatcaatggggaagatatgagcaaatttttaaaattaaattcacacatttgggaatatacttatgtattagatattcgacattcttctataatgtggattaatgacttagaaaatgatgatttgtatattacatggcctacaagttgccagaaacttctgaagccagtatttcctggaagtgtaccttccataaggcgcaattttcataatttggttctgtttattgatccggcccaagaatataccttggattttataaaacttgctgatgttttctattctcacgaagttcctcttagaattggntttgtgttcattcttaatacagatga

SEQ ID NO: 88491 - DNA, 2840 bp, Homo sapiens
atgatccacagtctatttctcataaactgttccggtgacatatttctagagaagcactggaagagcgttgtgagccagtctgtctgtgattatttctttgaagctcaagagaaagctgctgatgttgaaaatgtaccacctgtcatttcaacacctcaccactacctcatcagtatctaccgggataagctcttctttgtatctgtcatacagaccgaagtgccacctctctttgtaattgagttcctacatcgagttgctgacacttttcaggactactttggtgagtgttcagaggctgcaattaaggataatgtggtcatagtatatgaactcttagaagaaatgttagacaatggatttccactggctaccgaatctaacattttgaaagaattgattaaaccaccaacaattctacgctctgttgtcaactctattacaggcagtagtaatgttggggacacactccccaccgggcagctgtccaacataccatggcgtcgggcaggggtaaagtacacaaacaatgaagcctattttgatgttgttgaagaaatagacgcaattatagataaatcaggatctacagtctttgcagaaattcagggggtcattgatgcttgcattaaactatctggaatgcctgatctctccctttctttcatgaaccctaggcttctggatgatgtcagctttcacccctgcatccggttcaagcgttgggaatctgaaagagttttgtcatttattcctccagatggaaatttccgactcatatcataccgtgtcagctcacaaaatctagtggcaataccagtgtatgtgaaacatagtatcagctttaaggagaacagttcttgcggcagatttgatataacaattggaccaaagcagaatatggggaaaactattgaaggaattacagtgacagttcacatgccaaaagttgtgctgaacatgaacctgacacccacacaaggcagctatacatttgatccagtcaccaaggtactaacatgggatgtgggaaaaattactccacaaaagctcccaagtcttaaaggactggtaaatttacagtctggagcccccaaaccagaagagaatccgagcctcaacatacagtttaagatccagcagcttgctatttcaggcttaaaagtaaaccgtttggacatgtatggggagaaatataagccatttaaaggagtcaaatacgtcacgaaagctggaaagttccaagtgaggacatgagaagaggccaaaattcctcaggaccagtttgttttccaagtgtcattacgatgtatcactattaggtaccaagtgagtgggaatacatattctagttaaagcatttgtgtctagctacacaccgctaacaaagttacttagttatcaatgtaggattcttaaggagctttaagctaaggaaaccttttagtgacttagcttattttgtatcttttcacttaggaagattttggaggtgatttttttccataggaggataccatctggcggctgcacattgtaacagtaaaggcagaaagctgtagtgataacctctctcctaaaagagttaactggtctcatccagcagaagctatcttaaatctgtgatgtgtcaggtgcagccaaatatcacaccttctgatcttagccatcccaaaccagtatctgtcccgagaggaaattccccccacccccagaagtttacagaaaactgcctcttcaagtgtttgccttattcagcttttcacttgtgccattaagcaagcactgtagcaaaagccacttccacatggccctggcagggagcactgctgctccatgctccattctcactgtacttggtattgtattttttataaataagatttttatgtaaagcttacaatttgatttacagggaccttgctgcagtaaataccatctcaattttgtgccactggttcagctgttagcacagtaaaaaaatcatttgtatcaaaggggcaaatgctttattaaggtagtaaaagggaacattacttctgcttttaggaagttactgcaagcacaagcatttgtgcttttaagcaaattaaagtagtaaaagaaaaacttaagtgaaacctttgccatcttcatgttttataatataaagcttacccaacaccagttaagccatggttaacctaaatgcctcatgccccagttcagcaaaaggaggaaaatgtgcctgcctcacagtcatcagtctttttaaatcttttttgttgttgttcttaagggtttgaatttgtctgcattccttgtctttaggggaaattcccttttcatattgtgtgcttcccaaagctatagtcatagatttcttccagaaactattgtcataattgtcactggagtgcttaaatatacgtactatactgacaaaatacatggaagtgagttataatgaggcagaaacaaaatcctcggtaacattgatgatactctaccgatcaccgtggttttggaaagtcagtcaacagttgtattattgcactcaatttcattgtgacattttatttaacttcttcatcttggtggtccttgcccagttattttgcctcattagacatcaagaaatggagaaagactgaaagttaatatcttaagtgcttgttcttcatgtttccttcttgttatttatgctattctctttgtggctccattcttctttcaatcttctcagcttataaccgtctttcccttatgctaaggatagcccttacactcatcccatctatgctgtcaagggctgctggttggtgctggtacaaggagcccactcagcagttttcttacct

SEQ ID NO: 88492 - DNA, 422 bp, Homo sapiens
ctttactctttactgtctatagttctttctcggcaatcatgtacagtgtgccttgcaatgttctccttctcaatggatatggtctgtgtagctaatgctgcctgttcttcgctatggggagaggatgtaatctgaagcatgcctgggtcgcacctggttgtcttaccaagtggagaaactgttgatggggccagcattgcaaagctatcttagcagcaaaagaatataagtataattttttataaaggagatgaaatggaggaaagtgaagctatggtatcagtccattacacttctaagaagagcctggttttgtacttctgtgttagaagtcagattaccaaatagcacagctcttatttatattagaatcttttgacagttaataaattttgtaatgtatggcaagtcaattcctgaaa

SEQ ID NO: 88493 - DNA, 657 bp, Homo sapiens
gggccgctggtggtggacaccgggggacatcgtgggtatgtgccggctgggaaactgcagctgtaccatgtggtccccagtgcagaggagctcagaaggcaggcggggctgaacaaagacccccgatgtctaacaccggagcccagcccagctctagtgccctctattcccaccgggaaccaggtcatagccgcgtacccttttgtggccagaagcagccatgaagtgagcctgcaggcaggccagcctgtgaccatcctggaggcccaggacaagaaggggaaccctgagtggagcctggtggaagtgaatggacagaggggttatgtgccttctggcttcttggccaggggctcggagcccagttctgtggggctggagtctgccctcttagggtaccctctttggagcctacattgccaaatgatgggggaggcttagaggctctgaccctggggggaaaagaagcaaaggaaaggtggaggtggaagggaagacccaggcccagggtgggtgaaagcaacactcaggaggcagccagaagacatgggcgggcctcgcagaagtgcttggtgtggtgggggcacaggaggctccagccaggactgctcattatgtctgcataaagaactcattccgacctggggtcacaatgca

SEQ ID NO: 88494 - DNA, 2546 bp, Homo sapiens
  misc_feature (1)...(2546): n = a,t,c or g
cgcacggaaagtttggaggcttagcaaggagggtggtgccggcctccgcccggtggtggcagaactgcctgtgcgagcacggcttccacgtgggctgcgccgccgggcgtcatgtcgggcctaagagacacgctctacagctgtgaaatctgaagttcaggtttgcatttccttactgctttgtcttgaagacagaacgatgccaaagaaagcaaagcctacagggagtgggaaggaagaggggccggctccctgtaagcagatgaagttagaagcagctggggggccttcagctttaaactttgacagtcccagtagtctctttgaaagtttaatctcgcccatcaagacagagacttttttcaaggaattctgggagcagaagccccttctcattcagagagatgaccctgcactggccacatactatgggtccctgttcaagctaacagatctgaagagtctgtgcagccgggggatgtactatggaagagatgtgaatgtctgccggtgtgtcaatgggaagaagaaggttttaaataaagatggcaaagcacactttcttcagctgagaaaagattttgatcagaaaagggcaacgattcagtttcaccaacctcagagatttaaggatgagctttggaggatccaggagaagctggaatgttactttggctccttggttggctcgaatgtgtacataactcccgcaggatctcagggcctgccgccccattatgatgatgtcgaggttttcatcctgcagctggagggagagaaacactggcgcctctaccaccccactgtgcccctggcacgagagtacagcgtggaggccgaggaaaggatcggcaggccggtgcatgagtttatgctgaagccgggtgatttgttgtactttcccagaggaaccattcatcaagcggacactcctgcggggctggcccactcgactcacgtgaccatcagcacctaccagaacaattcatggggagatttccttttggataccatctcggggcttgtatttgatactgcaaaggaagacgtggagttacggaccggcataccccggcagctgctcctgcaggtggaatccacaactgttgctacaagacgattaagtggcttcctgaggacacttgcagaccggctggagggcaccaaagaactgctttcctcagacatgaagaaggattttattatgcacagactccccccttactctgcgggagatggggcagagctgtcaacaccaggtggaaagttaccgaggctggacagtgtagtgagactgcagtttaaagaccacattgtcctcacagtactgccggatcaagatcaatctgatgaaactcaagaaaagatggtgtacatctatcattccttaaagaatagtagagagacacacatgatgggaaatgaggaggaaacagagtttcatggacttcgcttccctttgtcacatttggatgcactgaagcaaatttggaatagtccagctatttctgtcaaggacctgaaacttactacagatgaggaaaaggaaagcctggtattatccctctggacagaatgtttaattcaagtagtctagtgcctttgcagaatcaaatgcctactattttatatgcatatattaaaagaaaagcaaagacctgagcccgagggagagggatggatttcaagtttccttacctgcgtatctactaacaaacatgagacctccctgttacaggtggtcagttggccaaatgtactaacgggcacatgaaagaaagaacagcaaattaccaagtgtctcagaaaatgacaaaaccatattttgacaagtttatttaatccagtgtggtagaaaaggcacaattccaatgtatcatttaaaattgaatgtcattaacctggctttgttctttggaagaaacaacttctttaaagagcttctttggctctagaaaaatttcaaacaattaaaataagaaaaaattttaaactggttttttataatgaaaatatacatacctttgtgtatagacaagcccatgcccattaaaataaagttatcctgtaacataaattttattaaataatacttccccacagatgagaggcacgcaacacctatggacaaaagggagttacagaggctgcttaaaagatggagaaaagcctgagattgaaggaggaaaaaaacccagtatttaaagtctataaaaaatactcaaaatagtggggtcctccgagtttaaaatagtccattggttatttttacattctaaagtgcctggtanggttgatattttttaaaatatcattggagaatttaatctttctttataaaaatagagcatttttctgctttctggcaaaagttggggataaaaggaaaaaaagttgtcaaaatgtaattttcagtccaattcaccaggaaaacatgcttgtgaattgtgcagtaaaaggtggtaatgactactggaagctaagtcaaaggtgatttcctacctgattttacttacttaaataaaagttactaaaaaagggaaaaa

SEQ ID NO: 88495 - DNA, 658 bp, Homo sapiens
agacaatgaaaccgaacttgatgaacataatatacaaaattatgaaaataccacagtgttttttatttccagttttcagtacctcatagtggcaattgccttttcaaaaggaaaacccttcaggcaaccttgctacaaaaattatttttttgttttttctgggatttttttatatatttttatattattcatcatgttgtatccagttgcctctgttgaccaggttcttcagatagtgtgtgtaccatatcagtggcgtgtaactatgctcatcattgttcttgtcaatgcctttgtgtctatcacagtggaggagtcagtggatcggtggggaaaatgctgcttaccctgggccctgggctgtagaaagaagacaccaaaggcaaagtacatgtatctggcgcaggagctcttggttgatccagaatggccaccaaaacctcagacaaccacagaagctaaagctttagttaaggagaatggatcatgtcaaatcatcaccataacatagcagtgaatcagtctcagtggtattgctgatagcagtattcaggaatatgtgattttaggagtttctgatcctgtgtgtcagaatggcactagttcagtttatgtcccttctgatatagtagcttattttaaggaagagcaaagctgt

SEQ ID NO: 88496 - DNA, 1795 bp, Homo sapiens
ccatgcacaggtgcagctaccatataacaatccacacagttcctgacacatcataggccttcaatacatactttccagttgaattggaaagaaatgtgttaagtctcagttatgtcgtgatgcaaatgctcacaaaatatctgtttagggccatcttttcatcaaaagaattgtatctccgaatacttaacatcagcaatctgagtaaataaacttgctcatcaaggacaacttctttcttataattcttgtctgcaggcatgtctaattttactcattatgcctatctgcttatgatagagtcactgatgttggggaaagttcccccgcatgtccccagtcatcatttcatatttcatgatgatgggagtgccagacagaagggagagagtgattacaaggtcatcatacagcagtggttctcaaagagtggtccctggaccaccagcagcaatgttacctggggcttgttagaactgcaacaaagcatttctgaatcagctgttttaaccattcctccaggagattctggtgcaggctcaaatttgataaccatgtttctacgtaacagaaaagaaacagatctgtgcagtgggagaagtaaagtgaacagaggatggaattctggcagatgcaaacaaaggggcaagactgagcagcctggagagcccttggaacatgtgtatgtgactataaaacatgctgtagccctggaatcccgacatcaaaagggagagcttcagtgcctgataaaaatgtgcattcctcttagcaaaccactccaaatgttcttttctccaccccactgggaagcttggctgcagagagtacagcaacttgcgaaaaacacaagatacttcagacaaagactgcaggaaatgggattcattatctatggcaatgagaatgcttctgttgttcctctgcttctttatatgcctggtaaagtagcggcttttgcaaggcatatgctagagaaaaaaattggagtggtggtcgtgggatttccagccactcccctcgcagaagctcgggctcggttttgtgtttcagcggcacatacccgggagatgttagacacggttttagaagctcttgatgaaatgggtgatctcttgcaactgaaatattcccggcacaagaagtcagcacgtcctgagctctatgatgagacgagctttgaactcgaagattaagtttcctggtcctgaatgacacataaagactttgcgagaaagacctccctccttgcctcacaaggaatataaatggatttctcccccttcctcaggacaattttggttcccagaccagcttgattgaactgagggagacgttgttgtttttaatgtctccagcttggactgcagagacaaaaacatgattccagatttaagtctctcttcttccaagtattctactagaaatacacaccccacatccacacccacatacaccacaaacacacatacacacccacacaacacactctcacacacacacacactctcatacacacacacatctgcatcttaatgtacaggcagtgctaaaatagacatcttaatatttgttccatgaatatttaccttgtagatatacagagtttccttaaaacagcaaaactgttcctgcttctgattcaccctgctgacaatgtgcatggttaagtgtaacagcgtttatagtgagggtgattaatggtagtcacagtgtaacagagcacagacagccaggttccagggttgggagggcaaggaagtcaacacagttttatatcatcctcctggctggg

SEQ ID NO: 88497 - DNA, 1476 bp, Homo sapiens
  misc_feature (1)...(1476): n = a,t,c or g
ttttttttttttaaaattgagaaatttatttttttccatgaaatagtaagcagaattaaagaaatatacagcttaaaacagttgaaatgaccttagaattttaatgacaattacacatttatggccaaaggaaaaaaatgaatagtttttaataatgaattcactttaaaatgtttgcttaataattcatctgaaattacatggatacaaggataactgggatctgggcaccttgtaaaataaaataatgccactttatccttctcaaaaaaattgttatcccagtataacagtggtgcggttctgctccccactcacagtagccaccgttctaccatttacaaacgtgtcaagtcagtcttcctgatttgtaaggatgcctattttggttccacttaaaaatatttccagtaggcggtcagagaaaataacttatttagccccactcagagtagaggatcagtatgtcaacatattggtcggtcatggctttcttctcgtgatcactgaggtcaaatttcctcatataattataaatgttaaaagataaaattacatcttcacagcagccaaaaatttgtatattttttatgtatttacaatattgtatatatttacacgaccacatcaaatactgaattgtagaaacaagtgactatctataaaggcattcatttaatgcccaagcgcattttttcttgtgcaaacggaaacttttcttaaacttctattagaaagctaaagacagtcaacgttgcgaaggccaccatccatggttaaagagccaccgctttctaaaatgtggttattttcagcaagttctttaaccaccccttccatctcttcctttaatttcttcataccaagagtcatttctactaatgtgttagaacttggataaattggggtcatggtatgtttgattccactggaagctgtaaacattttctgaggcagagtttcttgtaactcattagtatattcttgatattttgatacttcttcttcaatatcaaaacactgattagtcagcgataataactgtttcctaagatgaagcatctttcttatccattcttctgacttattcaaaaatgcctcatactttttaacacattcatctgtaaagtgcgtcatagcttttgtggcatggtaatacagtttttgcttatcaaatttgtggatttgttcttcattataagctaatctacgttctgctttgtcttttttgaactgatagtaaatctctgtcatgcaatttaacaggacttgtagtttttctacatttctgtctttcggatgagtgccttcttgatgtgcccatgcgtctgccagtgatccacctggagataatctgctgtcgatatcctgaagactggtttctattgttccctgagaactggaaagtctcaacaatttggtgtgtatgtctgaaatttcacctaactctgccgcttccaggtanatcttcatcaa

SEQ ID NO: 88498 - DNA, 409 bp, Homo sapiens
cccacgcgtccggattgtctcctcattcaggaatgctgaagaaagcaggaaatgggcagtgatgccagctagcttaagatgttggatgtgtcagtttcccttgccttcataatggcaagggaaataaataaaaggcaagtctatgcatcccttcttactgctattttctggaaagtttttattggctaatgttcttgtacctgtgtgaaattacttctgactctttcatctttactctcctacacacttcccctcactctcccacggcaaaatagtgtgacctgctctatgtggtgatcactgctgacacatcgggttgttcctttccagcagcaatagaaaattcacctggggaatctgctgtataatttaaatatttctacccaagttttgtcctgtacttttctaa

SEQ ID NO: 88499 - DNA, 520 bp, Homo sapiens
attcttacaaaggaaagagaacatcactattgtaactataccaaattactatgtatgtgagctcccagctttgacatcaagtcgttacagccacgtaatgggattacgggtgatttttactttattctttgggcttctctgaattttcctatattttgaaaaagcacctgcattattttgtaattataaaaaagtataaataagaattatacacactattatttcttcactgctatgacatgactagattacaatttttttctttttgagatgactttcggtcttgtttcccaggctggagtgcagtggcacgacctcggctcattgcaacctccacctcccgggttcaagcaattctcctgcctcagcctccccagtagctgggattacaggcacctgccaccacacctggctaattttagtagagaaggggtttcgccaagctggccaggctggtctcgaactcctgacttcaggtgattgatccacctgcctcggcctcccagagtgctgggattag

SEQ ID NO: 88500 - DNA, 373 bp, Homo sapiens
gagaccataatacatattcacggctctgggacgaactctctgtgcattgtgctccaggttattaagaataaaacaatcttcgcaaaaccttaatatgggtaactatactacaccatgtaccatggacgctctatttaccccagatatatatatttgagcttatgacaaaaattaaaggcctaacaattctcatacacaagttctgacccattaattacccgaaaggccactctgctcggtcgaactaacactccatgagtggggttacaggtgaaatagcgcttgtcacccactgacccatcattttttcccttggcgcttcggagctcaagtccaagccagatacctgaagcaaagtcagtggggcccacat

SEQ ID NO: 88501 - DNA, 1070 bp, Homo sapiens
ggggctggctctcagttccctcctcgcggtgtgtgcctgccccgctgcgatgggtgtcctaagagcaagggggggaagaggggctggttccggtacattgcaaatgacctgctttttttctgatcccgagctgcgttcagacccctgtcggatagtaaatcccaagtaaggcacctgccgtcggcagatctgagctttcttcttggacacctaaaacccacagtcctccagcagtgaaggatccagtgagattttccaggttaacggtcataaccgcctactggtccaacgttcagaagtaacacaggcacctggacaatacacagtagatgtggaaggacacggttgtacatttatccaggccacccttaagtacaatgttctcctacctaagaaggcatctggattttctctttccttggaaatagtaaagaactactcttcgactgcttttgacctcacagtgaccctcaaatacactggaattcgcaataaatccagtatggtggttatagatgtaaaaatgctatcaggatttactccaaccatgtcatccattgaagagcttgaaaacaagggccaagtgatgaagactgaagtcaagaatgaccatgttcttttctacttggaaaatgtttttggtcgagcagacagtttcactttttctgttgagcagagcaaccttgtgttcaacattcagccagccccaggcatggtctacgattactacgaaaaagaagaatatgccctagctttttaccacatcaacagtagttcagtttccgagtgagacaaaagcaattactggaagaagtaaagaaattttattacgtcataaaccattgaaaacacatctagtaagaaaatgaaaacctgaataaggatagggacaatagttgaagaaaagaaaagtctctgatggagaagcatttcttttaacaaactgattcttctgtatcaaacctggaaaaaaatcatgaaccatctgacatcgtgaacagtctgcagtgggctatggtttcttgacaagtcttatttccttatcatcccattaaatgttgtcattttgc

SEQ ID NO: 88502 - DNA, 449 bp, Homo sapiens
gagtctgcaccatggcttggaccccactcctcttcctcaccctcctcctccactgcacagggtctctctcccagcttgtgctgactcaatcgccctctgcctctgcctccctgggagcctcggtcaagctcacctgcactctgagcagtgggcacagcagctacgccatcgcatggcatcagcagcagccagagaagggccctcggtacttgatgaagcttaacagtgatggcagtcacagcaagggggacgggatccctgatcgcttctcaggctccagctctggggctgagcgctacctcaccatctccagcctccagtctgaggatgaggctgactattactgtcagacctgggacactggcacccctgtgctattcggcggagggaccaagctgaccgtcctgagtcagcccaaggctgccccctcggtcactctgttcccaccc

SEQ ID NO: 88503 - DNA, 1586 bp, Homo sapiens
cccacgcgtccgcaaagcgaggccggggactgaaggtgtgggtgtcgagccctctggcagagggttaacctgggtcaaatgcacggattctcacctcgtacagttacgctctcccgcggcacgtccgcgaggacttgaagtcctgagcgctcaagtttgtccgtaggtcgagagaaggccatggaggtgccgccaccggcaccgcggagctttctctgtagagcattgtgcctatttccccgagtctttgctgccgaagctgtgactgccgattcggaagtccttgaggagcgtcagaagcggcttccctacgtcccagagccctattacccggaatctggatgggaccgcctccgggagctgtttggcaaagactgtcacgggaagtctttttaggataaacgtaggcctgcgtggcctggtggctggtggcataattggagccttgctgggcactcctgtaggaggcctgctgatggcatttcagaagtactctggtgagactgttcaggaaagaaaacagaaggatcgaaaggcactccatgagctaaaactggaagagtggaaaggcagactacaagttactgagcacctccctgagaaaattgaaagtagtttacaggaagatgaacctgagaatgatgctaagaaaattgaagcactgctaaaccttcctagaaacccttcagtaatagataaacaagacaaggactgaaagtgctctgaacttgaaactcactggagagctgaagggagctgccatgtccgatgaatgccaacagacaggccactctttggtcagcctgctgacaaatttaagtgctggtacctgtggtggcagtggcttgctcttgtctttttcttttctttttaactaagaatggggctgttgtactctcactttacttatccttcaatttaaatacatacttatgtttgtattaatctatcaatatatgcatacatgaatatatccacccacctagattttaagcagtaaataaaacatttcgcaaaagatcaaagttgaattttacagttcgtatattcatgtggtcctttgaaagggtattctagaaatcactggaaagaggagaggaaagaaccaggtaggcaaatggtctgtgaaacccttgggtcctggaagcagtgtgagtgtaaatgtgtagtgtttggtttcatctaaataaacaaagatgatttctttgacacttgaaataaaatacaaattcaacaaaaagtagatcagcattattaaagaaacggttcaactttgtttcttcccttagtattgctgacaaagtatctgctgtagaatacaggaattacttagaatagaaacatagtcatcacaactgttactaaatggaaaagaaaagaattattgagttaagtattcctgtcaatacgggaaacactgctagtaccttatgttggtgttagacctctctgccctacactgagaatatagttttacacaggagcaaggtttgtgaagcagcatagtgaggtagctaaagccatgggctggctctaaaggctttaaatcccagccatgtggcttagctgccatgagatgtgcattt

SEQ ID NO: 88504 - DNA, 2727 bp, Homo sapiens
  misc_feature (1)...(2727): n = a,t,c or g
atgatagtggacatctttattttgtccccaaattctggaagaagcattcaatttactaccaagcatgatagtcatttctgttcggcacttgaagtactccttgtttaagaaatcactactgggcagtgtttcggataatggaatagtaactctctgggatgtaaatagtcagagtccataccataactttgacagtgtacacaaagctccagcgtcaggcatctgtttttctcctgtcaatgaattgctctttgtaaccataggcttggataaaagaatcatcctctatgacacttcaagtaagaagctagtgaaaactttagtggctgacactcctctaactgcggtagatttcatgcctgatggagccactttggctattggatcttcccgggggaaaatatatcaatatgatttaagaatgttgaaatcaccagttaagaccatcagtgctcacaagacatctgtgcagtgtatagcatttcagtactccactgttcttactaagtcaagtttaaataaaggctgttcaaataagcccacaacagtgaacaaacgaagtgttaatgtgaatgctgctagtggaggagttcagaattccggaattgtcagagaagcacctgccacgtccattgccacagttctaccacaacctatgacatcagctatggggaaaggaacagttgctgttcaagaaaaagcaggtttgcctcgaagcataaacacaaacactttatctaaggaaacagacagtggaaaaaatcaggatttctccagctttgatgatactgggaaaagtagtttaggggacatgttctcacctatcagagatgatgctgtagttaacaagggaagtgatgagtccataggcaaaggagatggctttgactttctaccgcagttgaactcagtgtttcctccaagaaaaaatccagtaacttcaagtacttcagtattgcattctagtcctcttaatgtttttatgggatctccagggaaagaggaaaatgaaaaccgtgatctaacagctgagtctaagaaaatatatatgggaaaacaggaatctaaagactccttcaaacagttagcaaagttggtcacatctggtgctgaaagtggaaatctaaatacctctccatcatctaaccaaacaagaaattctgagaaatttgaaaagccagagaatgaaattgaagcccagttgatatgtgaacccccaatcaatggatcctcaactccaaatccaaagatagcatcttctgtcactgctggagttgccagttcactctcagaaaaaatagccgacagcattggaaataaccggcaaaatgcaccattgacttccattcaaattcgttttattcagaacatgatacaggaaacgttggatgactttagagaagcatgccatagggacattgtgaatttgcaagtggagatgattaaacagtttcatatgcaactgaatgaaatgcattctttgctggaaagatactcagtgaatgaaggtttagtggctgaaattgaaagactacgagaagaaaacaaaagattacgggcccacttttgaaatttcagtgaataccttaatgttctgtaatttgggaagtttctggcaacacagaactacatagaatcagtattgttttcatggcctccagggaaaaaatgtttttcaagtaagagtaaaagggtgatgggattttataccaacaactgtttcatcttaaaaatatgtatatttttatattaaaaattgtacagtatgtcatctacccaataggaaagtcaacaggatctttattttttgaaagctttagccatccactaagtgccctttttcataagagaagaaaattgtgcataaaaattggttatgtttgttttttagtcatcttttttaacatatatttttgattgacaaattgcctttcaaatttttggggctagttgagatttaaagagtttgatatgccttctatttttatggagaaagtaattttaaaatggcaattggtgtttctaagccattgactaataaaacatagggttggctagtaattattttgttaacttgatgaagtcaagtatgactattatttattgtacatttgataagacaatttttggaattttgaattgcacaaattacatgatatcttttgcatttatgttactatattgtacttctgacaaatctttattcctgggtggtatttttaagatatctttacctataaaaaatgtttaaggttcataggactcgacaagagctatctggtgattttctcattagtaacatgcaacgttgtactgcaaaatttcaatcaacatgacaacttataatgagtggagatttcatattaggtactaaatattatagtattatttctattttctttttccaaataagaagcttggattattttattttgggggctttatcattaactttaattctttctgtactgggtataatatttttatattattggccttaccataaaattatttaggaaaggttgtcaaaataagttatacctctttggcaatagatagatgtatacatctacctactatgatctacaattttaggttaagtgaagcttgggggggctactgacttggttaccttcttgtctcttgtcccaaagatttaaactatgtacctttgtataggcncttctgccccattttgacttctgagatgaaagtatttactaaaat

SEQ ID NO: 88505 - DNA, 424 bp, Homo sapiens
cccacgcgtccgcccacgcgtccggcttggcgcagactccaagctccagctgaaacagtccaagcgtgtcagggacgtcgtgtgggatgagcagggaatgacctgggaagtgtatggtgcatccttggacgcagagtccctgggaatcgcgatccagaaccatttgcaaagacaaatcagggaacatgagaaattaatcaaaactcaaaatagccagacccggagatccatttcctcagatacttcttcaaataagaagctcagaggaaggcagcacagtgttttccagtccatgctgcagaacttccgacgccccaactgctgcgtccgtcctgccccgtcttctgtgttagattgaaagggagtatttatgggagtttgtgtataaatttacggtattcacatgcgtccctctatgtcaaag

SEQ ID NO: 88506 - DNA, 889 bp, Homo sapiens
gttgctccgggatcccctttctcaataacagaagaaagagagttgccagaaggaatttccacttcatccctagaagttgtgccagagaacttgaacggttctgccattctcccaacctttgaaaacttcactaaaaaacggaaaagaaaatatgagcttaggtacagaaagcgtccgtttaattcagaaaatgcaaagaaagcaccggattgcctaataaaacttttaaaccagatgcaactgttcagactcaataaactagagcgctttcaaaatttggttcttcaagagttgagcagtcttaagcaggatattcaggccctggaacaccttgagaaggaggttctggaattctgggggaaacagtctgctgatctgcaatctttctgtgatctgcaagtgctgaggtactttgaaaggtgttctttctagaagaatcttggttgaagtatgaggttcaattcaactcagacttcataagaaagccaaagcctggttttatgattgcagccctcagcctgggctgccctgaagacgaagagaaagagcaaggttattgttggctcaggccttgttagcccagacttcggtgctctgtacgcattcaatttcctcccctccaaacatcatccctgggaactgctgagttcagatagaatatatgttggtagtttgcagttgggttattatccatttgttcataaaaattaaccttttgtattaaaatttggtcagatagtattaatagaaagttcaggatgttaaacaacttggagtggtgttgcttttttttttataaaagtaaaatggactttttttttgtttgagaaatgtcttcaagttttgtgtgaataaaacactttagcagcatctgtataaaaaaaaaaaa

SEQ ID NO: 88507 - DNA, 138 bp, Homo sapiens
  misc_feature (1)...(138): n = a,t,c or g
gtgctccacccgagctaatctaatgcctcccttatattttctcctggacccatataacttgctttttgtggcattcatccctttcggttttatacacatctttgtttctattttgattaatgtctgtcttctccccan

SEQ ID NO: 88508 - DNA, 451 bp, Homo sapiens
  misc_feature (1)...(451): n = a,t,c or g
cgacccagcgtccggcgaagagcaggcaatggagttagcaagcttcatggttgcttatacgtagttggtggttttgatgataattctcctctgagttcagttgagcggtatgacccccgaagcaacaagtgggattatgtggcagcacttactactcccagaggtggagtgggaatcgcaacagtgatgggcaaaatctttgcagttggtggtcataatggcaatgcatacttaaatacagtagaagcgtttgatccagtgctgaataggtgggagcttgttggatctgtgtctcactgcagagctggagcaggagtagctgtgtgttcctgtttaactagccaaattcgaggatgtaggtcatggatccaataatgtggttgactgtatgtnaatttgagttctggccaccaacaatttagtcatatctgataggtacaaaaggaaacca

SEQ ID NO: 88509 - DNA, 2356 bp, Homo sapiens
cggattccagactccatcatttctcgtggtgttcaggggctcccacgagacacagcctccctcagcactactccttcagaatcgcctcgtgctcaggctacatctcgcctctctacagcttcctgcccaacaccaaaagtccagtccaggtgcagcagcaaggagaacattctcagagccagtcacagtgctgtcgatatcaccaaggtggctagaagacatcgcatgtctccttttcctctgacatctatggacaaagcctttatcacagtcctggagatgactccggtgcttgggacagaaatcatcaattaccgagatggaatggggcgagtccttgctcaagatgtatatgcaaaagacaatttaccccccttcccagcatcagtaaaagatggctatgctgtccgagctgctgatggcccaggagatcgtttcatcattggggaatcccaagctggtgaacagccaactcagacagtaatgccaggacaagtcatgcgggttacaacaggtgctccaataccctgcggtgctgatgcagtagtacaagtggaagataccgaacttatcagggaatcagatgatggcactgaagaacttgaagtgcgaattctggtgcaagctcggccaggccaagatatcagacccatcggccatgacattaaaagaggggaatgtgttttggccaaaggaacccacatgggcccctcagagattggtcttctggcaactgtaggtgtcacagaggttgaagttaataagtttccagtggttgcagtcatgtcaacagggaatgagctgctaaatcctgaagatgacctcttaccagggaagattcgagacagcaatcgttcaactcttctagcaacaattcaggaacatggttaccccacgatcaacttgggtattgtaggagacaacccagatgacttactcaatgccttgaatgagggtatcagtcgtgctgatgtcatcatcacatcagggggtgtatccatgggggaaaaggactatctcaagcaggtgctggacattgatcttcatgctcagatccattttggcagggtttttatgaaaccaggcttgccaacaacatttgcaactttggatattgatggtgtaagaaaaataatctttgcactacctgggaatcctgtatcggctgtggtcacctgcaatctctttgttgtgcctgcactgaggaaaatgcagggcatcttggatcctcggccaaccatcatcaaagcaaggttatcatgtgatgtaaaacttgatcctcgtccagaataccatcggtgtatactaacttggcatcaccaagaaccactaccttgggcacagagtacaggtaatcaaatgagcagccgtctgatgagcatgcgcagtgccaatggattgttgatgctacctccaaagacagaacagtacgtggagctccacaaaggcgaggtggtggatgtcatggtcattggacggctatgatggtcaccagcaggagaaagctttgatgcatgtccacatatcattgactgtatcctgtaatatgcaacggcacagctagttttcccgatttggataaaagttgatctgtatagtcaacatcttgaactatatttcaaatgaatttaaatatcttttaaagaaaaaaacacctaaaaataaatcttaacagaaaattctgttctgattatatcaaggcaaatttttcctttcttgcaaattgctttgtgtgttcaatgctaggtctgatagcgatagcttttagtagacagcggtaggtgcctgcagaacttgtgtttttctcatctttaaaatacaactacttatgctcttaaatcaaggctgtctgcttatttatactagcgtaggcaacacttggatttcccttcttagtatgcttcataactgctttacagagagcttttgcttgttctttctcatgtatctcgtgtttatgtgcacagtgccaaaagaagactgactgggtggaggctctgccttgcctcaagaaccatcccctgcagagcatccagggaggtttctcgccccaatagcctcacggcacagtactcttgggcagtaactggacaccttttatttgaagaaacaaactgaagaaaaaatgcttccttaagtgctgacagcctttttaaccaatacatttaaaattgtacagaacaaaaaaataaaatcaaagactgatcttgtacagatattagtgttaccagcattcatgtggaaatcaagagcaaagacaaaataatgttaaacaattctgtaccataacattttctgtaatgatactgaaacttaatgaataaaaaaattccttgatcattatttaaaaaaaaaa

SEQ ID NO: 88510 - DNA, 1928 bp, Homo sapiens
  misc_feature (1)...(1928): n = a,t,c or g
acaccaatggggcttctactaggtggcgtcaagtcaacatatatgtttgatctgctgttggagacgagaaagcctgatcaggttttccaatcttataaacctggagaagtgatggtgaaagttcatgttgttgatctaaaggcagaatctgtagctgctcctataactgttcgtgcttacttaaatcagacagttacagaattcaaacaactgatttcaaaggccatccatttacctgctgaaacaatgagaatagtgctggaacgctgctacaatgatttgcgtcttctcagtgtctccagtaaaaccctgaaagctgaaggattttttagaagtaacaaggtgtttgttgaaagctccgagactttggattaccagatggcctttgcagactctcatttatggaaactcctggatcggcatgcaaatacaatcagattatttgttttgctacctgaacaatccccagtatcttattccaaaaggacagcataccagaaagctggaggcgattctggtaatgtggatgatgactgtgaaagagtcaaaggacctgtaggaagcctaaagtctgtggaagctattctagaagaaagcactgaaaaactcaaaagcttgtcactgcagcaacagcaggatggagataatggggacagcagcaaaagtactgagacaagtgactttgaaaacatcgaatcacctctcaatgagagggactcttcagcatcagtggataatagagaacttgaacagcatattcagacttctgatccagaaaattttcagtctgaagaacgatcagactcagatgtgaataatgacaggagtacaagttcagtggacagtgatattcttagctccagtcatagcagtgatactttgtgcaatgcagacaatgctcagatccctttggctaatggacttgactctcacagtatcacaagtagtagaagaacgaaagcaaatgaagggaaaaaagaaacatgggatacagcagaagaagactctggaactgatagtgaatatgatgagagtggcaagagtaggggagaaatgcagtacatgtatttcaaagctgaaccttatgctgcagatgaaggttctggggaaggacataaatggttgatggtgcatgttgataaaagaattactctggcagctttcaaacaacatttagagccctttgttggagttttgtcctctcacttcaaggtctttcgagtgtatgccagcaatcaagagtttgagagcgtccggctgaatgagacactttcatcattttctgatgacaataagattacaattagactggggagagcacttaaaaaaggagaatacagagttaaagtataccagcttttggtcaatgaacaagagccatgcaagtttctgctagatgctgtgtttgctaaaggaatgactgtacggcaatcaaaagaggaattaattcctcagctcagggagcaatgtggtttagagctcagtattgacaggtttcgtctaaggaaaaaaacatggaagaatcctggcactgtctttttggattatcatatttatgaagaagatattaatatttccagcaactgggaggttttccttgaagttcttgatggggtagagaagatgaagtccatgtcacagcttgcagttttgtcaagacggtggaagccttcagagatgaagttggatcccttccagggaggttgtattggaaagcagtagtgtggacgaattgcgagagaagcttagtgaaatcagtgggattcctttggatgatattgaatttgctaagggtagaggaacatttccctgtggatatttnctgtnccctgatatttcatcagggttttaggactgggantcccaaaagttttctacccnggaatgttccgggcccctttatattccgttgattgatggggataaaa

SEQ ID NO: 88511 - DNA, 1253 bp, Homo sapiens
gggtccccatgccagacaccttctcctatggtgggcatgaagacttttcaaaaatgattgatgaagctgagcccctgggctacccagtcgtggtgaagagcacacgaggccaccggggaaaagctgtttttctggcaagagataaacatcacctctctgacatctgccatctgatccgccacgatgtgccctacctgttccagaagtacgtgaaggagtcccatggaaaggacatccgggtggtggtggtagggggccaggtcataggctctatgcttcgctgctccactgatggacggatgcagagcaactgctctctcggtggcgtgggcgtcaagtgtccgctgacagaacaaggcaagcagttggctattcaggtgtccaacatcctaggcatggacttctgtggcattgatctccttatcatggacgatggctcctttgtggtgtgtgaggcaaatgctaatgttggcttcctagcctttgaccaggcatgcaacttagatgtgggtgggatcattgcagactataccatgtccttgctgccaaataggcagactggaaagatggctgtcctcccaggactgtcgagtccaagggagaagaacgagccggatggctgtgcttcagctcagggagttgcagagagcgtctataccatcaacagtgggtctacctctagcgaaagtgagcctgaactgggagagatccgggattcctcagcaagcacaatgggggccccaccctccatgctgcccgaacctggctacaacattaacaacaggattgcttctgagttaaaacttaagtgaattcctgctttttggcagcatttaaaccaaatcctactgcttccctagtagttttgagtgaataaaatctggactaatgtgatttcatttgcacagaaactagaaatcccatctgggcactcagcattttttctaacgatgatttaagcaaatggcctagctttgtggtttttacaaagacaaatataaaaacactcacaagaacaacgtcccgactgatcaatatgagactgatgtctgctgtgagcacgtggatattacggctgacgctaaggcactgactctgctgttgcttctgacttttagcagtagaacccattagctcaaaatggctcttggaattatgtactcaaaagcaaccacgggatggaagcatgtgcagacgaggtggaatgtgactgcagtaataggttcttcactaagtgtgtgtgtgatgcttga

SEQ ID NO: 88512 - DNA, 2216 bp, Homo sapiens; identical to SEQ ID NO: 63811

SEQ ID NO: 88513 - DNA, 763 bp, Homo sapiens
  misc_feature (1)...(763): n = a,t,c or g
ttttttttttttaatggaaatgacaaaaatgggctgtctttatttttggaaaaaaaaagaaaaagaaaaacccaaaactcaaccaaataggtgatagcaacattattttcaaacccattgattgaaaattctagtccagataacagaataggagtggtacttgtggtctccagatatattcccctgtcagacaaaaatacttttcttcattgaagtacgcattatgtaacactgtgtatcagatgaccttagccatagagttggtctttagagcttcttcttttggtcagcaaagccatccattgcatgaaggatgcccaaatagtcagctataagcagtcctgtcttgaggggcaaaaagcttttaagaaacatcatgaagtataacaactttggcatatacaagtacattttttcttgtagaatagcttctactattttttcaactgcatattttggttccagaattggcaacagagaaggacagcctgtagtacaaccttcaaacattccagtttttataaaaaaggggcacacaatcgtggttttgatccccttttgtttttggacaaatgtttctacaaatacagattcagcaaacccaaaggctgcaaatttacttgcacagtaatctgccagcccatttactccacttaatccagctgaacttgaaatgcaaaccaaatgtccatgcggacgcgtgggtcnncccnnnagttnntnccagattnacagtagatcggtatnnnnnnnncggcacgcc

SEQ ID NO: 88514 - DNA, 1114 bp, Homo sapiens
  misc_feature (1)...(1114): n = a,t,c or g
caaacctactattataaatgaatcttagacacaaaggaaaacatcaatatattacattacctcaactaaaaaaaactgcatcaaaaataaaacaaagccaaaccaatatgtaagtagtattcttggttagaaatattttagcaaaaatatggcaactagtggattataagccatttcactgaataaaggagtctataataaacttggttctcttgggaggaaaacgtatttccccacatccctgtgacaggaagatgcaaatctataaaaagtggtagaacattaataaaagatacaaccaatatcaatacagtacttaagaatagttgagacagtttttcgtaaatgaaatgctttaaaatgtttctcatttttggagttaaaaatcaaaggctagagggtccactggatgtcactgaagtccccagggtctcccaggcccccctctgcttctaagtaattcataaatgcagccatggctgtgtcatcattgtcacatagggcatcgaaatccaactgtgcaccatcactgaggagtggctcatggctgtggacagcaacagtactctggttttgcctggtagcctctagctcccccatttcagaaggacttggtggaaacaactccttatttgacatactcctgcagtttacagtatgagtatctttcattaaacctgttggactcgaatcatcaaggtatgaagaagactgtaacctctgtaaatccagaatttcatttgcaatatctgttccaatactaccagcaccaagtactgttccagtagacattccaggtacactcatacaggactgtctagaggattcttctgatgattgagagctacaaggtaaaaatgatgcttctccaggctcactatgtcccaaaactaaagtgttgacagatacaatatattccagttcttttgtccaaggatttgtgaaactaaaccattggctttttaaagttacaaaagagccatcttttgctttgaatttgtaggaatctgtaagtattttctccttactctgcagaacccctttgtgcttgccagtcaacctattgtggtcncccccgcgtcaacggacgaaagggcggtcgcgtgggcgacca

SEQ ID NO: 88515 - DNA, 425 bp, Homo sapiens
ctatttcagaatcatcttaacacagtgatttgtgaagcaaaatgcatataattttgtttcagatgagacagttaaaaacaagtccaagagaacttttatggttttacctgcaaaaggtggattcacactcactcctggctatgtgtcttctttttcctgttgtaaaatgttgggttaggaaaagcaaattctacttgggtaacttgggaacaagaggactgaattcagtgtctgagtttacagggtgacggctttgtcagcgtgatgacccacgcttaatgtttgctgtcctttggaaagctggggacctggtgctttattgtgcttggacatgagtggcaggccttttgaaggactgctgtgtttcatcatttttgccatctcctggatggcagacatctattgagaactcaattgcaatttaa

SEQ ID NO: 88516 - DNA, 1527 bp, Homo sapiens
tggtggaattcgctgcacctgtccccgcccccgcccccaccacaggccccagcggagggaccttcagtccagcccggtcccctcaggcccatggaggaagagctgccacctcccccggcagaacctgttgagaaaggggcatccacagacatctgtgccttctgccacaagaccgtgttcccccgagagctggctgtggaggccatgaagaggcagtaccatgcccagtgcttcacgtgccgcacctgccgccgccagctggctgggcagagcttctaccagaaggatgggcgacccctctgcgaaccctgctaccaggacacactggagaggtgcggcaagtgtggcgaggtggtccgggaccacatcatcagggccctgggccaggccttccacccctcctgcttcacgtgtgtgacctgcgcccggtgcattggggatgagagctttgccctgggcagccagaacgaggtgtactgcctggacgacttctacaggaaattcgcccccgtctgcagcatctgtgaaaatcccatcatccctcgggatgggaaagatgccttcaaaatcgaatgcatgggaagaaacttccatgaaaattgctacaggtgtgaggactgcaggatcctcctgtctgtcgagcccacggaccaaggctgctaccccctgaacaaccatctcttctgcaagccatgccatgtgaagcggagtgctgcggggtgctgctgagagtgcccgctgggcagtgaacagaccactagccccggctggggcccttccctgacttggtttcccttcctaacctgctcttgcacactttccttctgagcctccatggagaccagcctgcaagccggcccagcctgtccaggatacagtggggctgagcacccccaggccttccactcctctaccctctgggcaccagaaggctcctggaccatgagcttcacccccagaattccctgctgaccctgccccacttccagggaaaagctgggggaggttggacccctctcactgactagctgtctggtaggggtgctaggaccagcctcgcctgtggggttgagctgtttgaggacaaactccaaggtcccttaaaaagtgccttttagaggcttgggcattggtggctcacgcttgtaatccccagcactttgggaggccaaggtgggtggatcacctgaggtcaggagttcaagaccagcctggccaacatggtgaaaccctgtctctactaaaaatacaaaaattagccaggcatggtagcaggtgcctgtaatcccagctactggggaaagctgagggcaggagaattgcttcaatctggaaggcagaggttgcagtgatattgcaccattgcattccagcctgggcaacaagagggaaactccgtctcaaaaaaaaaaaataaaagtgccttttaggccggatgtggtgctcatgcctgtaatcccagcactttgggaggctgaggcaggagcattgcttgaacccgggaggcagaggtgccatctcaggtcg

SEQ ID NO: 88517 - DNA, 2376 bp, Homo sapiens
atggcggctcccagcctcctcaactggaggcgagtttcttccttcacggggccggtcccccgcgcccggcacggacaccgagcggtggccatccgggagctgatgatcatctttggagggggaaatgagggcatcgcggatgagctgcacgtctacaacacggctacgaatcagtggtttctgccagctgttagaggagatatccctccaggctgtgctgcccatggatttgtctgtgatggtaccagaatattagtatttgggggaatggttgaatatggaagatacagcaatgagttatatgagttacaagcaagtcgttggttatggaaaaaagtgaaaccccatccccctccttctggtttacctccttgtcctcggcttggacatagcttctctttatatggtaacaaatgctatttgtttggtggcctggcaaacgaaagcgaagattcaaacaataatgttcccagatatttaaatgatttttatgagttggagctacagcatggctctggtgttgtgggttggagcattccagtgactaaaggggttgtgccttctccaagagaatcccacacagctgttatatattgcaaaaaagattctggaagtcctaaaatgtatgtttttggtggaatgtgtggtgctcgcctggatgacctatggcagcttgacttagaaactatgtcatggtcaaaaccagaaactaaagggacagtgccacttccacgaagccttcatacagccagtgttataggaaacaagatgtacatttttggtggatgggtcccacataagggggaaaatactgagacttcacctcatgattgtgaatggagatgtaccagttcattttcttacctaaatctggatacaacagagtggaccaccctagtatcagattctcaggaagataaaaaaaattcaagaccaagaccaagagctggccactgtgctgttgcaatcggcactcgattgtatttttggagtggaagagatggctacaaaaaagcactgaatagtcaagtttgctgcaaggatctttggtatcttgatactgagaaaccaccggcaccatctcaagtacagctgatcaaagccactaccaactcctttcatgtcaagtgggatgaagtgtctacagttgagggctatcttttgcagttgagtacagacttgccataccaagctgcatcatcagattcttcagcagcaccaaatatgcaaggagtcaggatggaccctcacagacaaggcagtaataacatcgttcctaacagtatcaatgatacaataaacagcacaaaaactgaacagccagccacaaaagaaacttcaatgaaaaacaaaccagactttaaagcactgacggattctaatgccattttatatccatctttggcatcaaatgcttctaatcataatagtcatgtggtggatatgctaaggaaaaatgaaggtcctcacacttcagcaaatgtaggtgttctaagtagttgcctggatgtaagaacagtaattcctgaaacatctgtatccagtactgtttccagcacacaaactatggtaacccagcagaccattaaaactgaatcatccagtacaaatggggcagttgttaaagatgaaacttcactaacaacattcagtaccaaatctgaagttgatgaaacatatgcactgcctgcaacgaagatcagccgtgtagagacacatgctacagcaacgccgttttctaaagagactccttcaaatccagtggccacagtgaaagcgggagaacgacaatggtgtgatgtgggaatttttaaaaataatacagctttggtgagccagttttatttgctgccaaaagggaagcaaagcatctcaaaggtaggaaatgcagatgtacctgactacagcttgcttaagaaacaagatcttgttccaggcacaggatacagattcagggttgctgcaatcaatggttgtgggataggtcctttcagcaaaatcagtgaatttaaaacttgtattcctggttttcctggagctccttctgcagtcagaatttcaaagaatgttgaaggtatccacctttcctgggaacctccaacctcaccttctggaaatattttggaatattcagcctacttggctatccgcacagcacagatacaagataatccaagtcaacttgtgttcatgaggatttattgtggtcttaagacatcatgtatagtaactgctgggcaacttgcaaatgcacatattgattatacatccaggcctgccattgtgttcaggatatcagcaaagaatgaaaagggatatggaccagctacacaagttcggtggcttcaaggtaacaataagaaagcacctttaaat

SEQ ID NO: 88518 - DNA, 1317 bp, Homo sapiens
aaattcagaagaacaaacttcagcaggaattcttctatgagtttgaagggggtgtcaagcttggcagtggggcctttaatttgatgctgtcccttttaccagcaaggattatcagactactagaatttattggattttctgggaatagggagttgggcctcctgcagttacgtgaaggtgcttcaggaaggagcatgaggtctgcactgtgctgcttaaccatcttagcttttcatacttacatctccctaatacttggtacaggagaagtgaatgttgcggaagcagagcgtctcctggcacccttcctccagcagtttccaaatggctcactcgtgttgttttatcatgcccgaatagagttgctgaaagggaatcttgaagaggcacaagaagtatttcaaaaatgcatttcagttcaagaagaatggaaacagtttcaccatctctgctactgggagctaatgtggattaatgttttccaacaaaactggatgcaggcatattactattcagatctgctttgcaaagagagtaaatggtccaaggcaacttatgtgttcttgaaagcagcaattttgagtatgcttccagaggaggatgtagtagcaacgaatgagaatgtggtaactttattcagacaggtggacagcttgaagcagagaattgccgggaaatctatccctactgagaagtttgctgtgaggaaggctcggcgttactccgcctccttacctgcacctgtgaagctcatcttacctgccctggaaatgatgtatgtctggaatggtttttcaatagtgagcaaaagaaaagacctttctgaaaatctgttagtaactgttgaaaaagctgaggcagctttacaaagtcaaaattttaacagcttctctgtggatgatgagtgcttagtgaagttacttaaaggatgttgcctcaagaacttacagcggcccttgcaagctgaactatgttacaatcatgttgtggaaagtgaaaagctactgaagtatgaccactacctagtgccgttcactctatttgaattggcatctttgtataaaagccagggggaaattgacaaggccataaagttcctagaaactgcaaggaacaactacaaagattactccctggagtccagactacacttcagaattcaggcagctcttcacctctggagaaaaccttcctcagattgatcagaacttgaaggatggaatttttcctcaattagcatcggcatctgctatagattcaaccttatattaaagtggaaaaatgatcttgtgaataagagacaaaaaaacagttaaa

SEQ ID NO: 88519 - DNA, 386 bp, Homo sapiens
atttattgaacaggaagaggaagaaattcatgaaaaattgtcatgggtatatcaaagaaaaatttaaagaagtctttgattcttgatgaggtatcctaggtaacatgtggatagactggaattggacttctcagtgagacaggatggaatgcagatcacagaatttatactggggatgctgtatggataggaagggatgatggtggagtcctggtgagaagtctccactcaacactggaggctcaggccattcttcattctcgggcctggaggcagcgattggcattggataggtcaatgatattttctctaaggattccatgcttctcacatagttgtgcaaacctttccttgatgtctgaactcaaatctggttctcggccata

SEQ ID NO: 88520 - DNA, 397 bp, Homo sapiens
ttccctgatgctcgacccgcatgtccagggcggtttttaccaactcgggatccccttcctctcttatttccccctgcaggttcccgacacggtactccacttccagtaaagcaaacaatggcacggttcttctcccggcccagcctgagcctccgctgagcgaaaggccacagctcccaccggcggaggattttaaaatgatctttgcctgggtcggcctgtgggttcagggaagtgttaccaaccattgcgcgcaggtgggcgcgctcgcctgccttctccgaagcaaacttttcccagcaactgggagcagctacggagacttaaaagatccccgcggggtcgtgggcaccgcacgtgggccctgcagggacctccaccgcgggagattccttga

SEQ ID NO: 88521 - DNA, 556 bp, Homo sapiens
gcacgagctgatgcactggttaaatcagtataattcatctgcagatacttgtactcatgcttattggcgcggcaattgcaaaaaagcaagcttggggctagattgtgaaataggtcttcgttgcccgacatattatgtattatgtgggtcagggctgagtgtctggacaaaagttgagggtggtctagcatctgtcagtggcacaaacgtgaagatgcagatcgtgcggctaagaacggaaaatgggcaacggattgtaggtttgatcattccggcaaattgtgtgtctcctcttgtaaatctcctatcaacttcagaccagtctcaacagcttgcggtccaacagaaacagctatggcaacagcatcaccctcagagcatcaccaacttgagcaacgcatgaagaacagacaggtttcaacatggatggttctgaaatgctgttgaagcatatcatttgcataaaaatcagggacagtttccaaagaattatatatttttttcagttgtgctctctagttagtttttttgggagtaaggacaaaacctgggatag

SEQ ID NO: 88522 - DNA, 1417 bp, Homo sapiens
acgtccgaattccgcacgagagggaaacgtcatatatctggaagttcagaaaggccagttcctgcggctcctctgtgctgctgacagccagccccctgccacgctgagctgggtcctgcaggacagagtcctctcctcgtcccacccctggggccccagaaccctggggctggagctgcgtgggatcctccagagaacctgagagtgatggtttcccaagcaaacaggacagtcctggaaaacctcgggaacggcacatccctcccggtcctggagggccaaagcctgcgcctggtctgtgtcacccacagcagccccccagccaggctgagctggacccggtggggacagaccgtgggcccctcccagccctcagaccccggggtcctggagctgccacccattcaaatggagcacgaaggagagttcacctgccacgctcagcaccctctgggctcccagcacgtctctctcagcctctccgtgcactggaagctggagcatgggggaggacttggcctgggggctgccctgggagctggcgtcgctgccctgctcgctttctgttcctgccttgtcgtcttcagggtgaagatctgcaggaaggaagctcgcaagagggcagcagctgagcaggacgtgccctccaccctgggacccatctcccagggtcaccagcatgaatgctcggcaggcagctcccaagaccacccgcccccaggtgcagccacctacaccccggggaagggggaagagcaggagctccactatgcctccctcagcttccagggcctgaggctctgggagcctgcggaccaggaggcccccagcaccaccgagtactcggagatcaagatccacacaggacagcccctgaggggcccaggctttgggcttcaattggagagggagatgtcagggatggttccaaagtgaagaggtctccatggcaacaggacaccagcaagtgtgtgggagtcgcactggtgtgacggccagaactggactcagatttcagccccatccccaatgaagagcttgagtttgaagattatactttttttgagacagggtctgactctgtcctccaggaccaagtccaagtggttcccatttgaacatttaaaaaaaaaaaaagggttgaccccccacagtgggttgaaaattatactttcaattcaaagcgagtttgaaaataacactttggggcatcgggtctatggttcattactacaaaagcttttttggatgggtaaagcccaggaaaccaggcaaaggaggcccagggggctttccaaaacaaaaacccacttcctggagttgtttgttgaaactgcctttccccgttgataaccatgcttttctttcaaaaaagggagagggagaggcccaggtccaaggggttcccttttgaact

SEQ ID NO: 88523 - DNA, 614 bp, Homo sapiens
tccctaccgctgaggagatgtccagcttgacgccagagtcctccccggagctggcaaaacgctcctggttcgggaacttcatctccttggacaaagaagaacaaatattcctcgtgctaaaggacaaacctctcagcagcatcaaagcagacatcgtccatgcctttctgtcgatccccagcctgagtcacagtgtgctgtcacagaccagcttcagggccgagtacaaggccagtggcggcccctccgtcttccaaaagcccgtccgcttccaggtggacatcagctcctctgagggtccagagccctccccgcgacgggacggcagcggaggtggtggcatctactccgtcaccttcactctcatctcgggtcccagccgtcggttcaagcgagtggtggagaccatccaggcacagctcctgagcactcatgaccagccctccgtgcaggccctggcagacgagaagaacggggcccagacccggcctgctggtgccccaccccgaagcctgcagcccccacccggccgcccagacccagagctgagcagctctccccgccgaggcccccccaaggacaagaagctcctggccaccaacgggacccctctg

SEQ ID NO: 88524 - DNA, 2378 bp, Homo sapiens
ttttttgaatgttaaaacaaattttaatgttctgggtgacatataccacgtaggtgggcctgcaatggttgtgtctgcatcgaacatgtagagactatttttcttgtcatgattctctaaacaatacaatcaaacaactatttacatagcttttacaatgcatgaggtattaaaagtcatctagagatgatttacacagtatactggaagatatgcataggttacatgcaaatatgtctatataacaaaggacttggcatctgtggatttagagggtgctggaaccaatcccctgcaatatattgggggataactgtatttaaaaaaattgaaactacttaaggctttatcccatgtttacattcctaggggtctatctccaaagtgagttctttcaagtttctgaaattaaagtactgaatgttttcccacattccatacatttagagagtatctttccagtgagtccttttatgtctatgcaaggaacggagagaactcaatgctttcccacattccttacattcatacagcttctctccagtgtgagttttttcatgtcctcgaaggaaacgggaacgagtgaaggctttaccacattgtagacattcatagggtttctctccagtgtgaattctttcatgtcgtagaaggcaagtgagccaagagaatgcttttccacattccttacattcatatggcttctctccagagtgaatcctttcatggacttttaagttactgaaatgactgaaggcttttctacatgttttacactcataaggtttttctactgtgtgggtccttttatgttgagaaaggtatttgaaacaactgaatgctttcccacattccttacactcatatggcttctctccagtgtgagttgtctcatgattttgaaaggaagagagatcactaaaggctttcccacactgacatttatagggtttcactccagtgtgagttgcttcatgtcttcgaagggaaccggcaagactgaaggctttaccacattgtttacattgatagggtttctctccagtgtgagtcctttcatgtctttgaaataaactgggacaaccaaaggctttcccacatatcttgcatttctggggtccatctcctgtgtgtgttatcatgtgacttcgaaagctcgagctatgagataacactttcccacactgcttacattcatagggtttctctccagtgtgagtagtttcatgatttcgaactgaactaggacaatcaaagcctttcccacatatcttacatttatgtggtccgtctccagtgtgccttatcatgtgtcttcgaaagcttgtgtgatgataaaacgttttcccacattgcttacatgcatagggttgttctcccgtgtgagtcctttcatgtagtcgagtgtaatagtaacagctgaaggctttcccacattgtgtacatttatagggtttctctccggtgtgagttctctcatgtcttagataggtactgtaatcaggaaaggctttggaacactgcttacattcatacgctttctctcccgtgtggattctttcatgtcttagataggaactgtaaaaaggaaaggctttagaacactgcttacattcatacggtttctctccagtgtgtgttctttcgtgcaaatgaaataaactgggccaaacaaaggctttcccacacaacttacatttataaggtccatctccatggtgtgccgccatgtgtcttcggaggtttccaagagaactaaaggtttttgcacattctttacaatcgaagggtttctttccggtggggggcctttcatgtgtctggaaggagtgctgatgactgatggctttcccacgttgtttatgtgtatatggcttctctccatattcctgatgctcacatgatttgtgtccagtgtcaactctgatgttgcaattaagagacgaatgacccaagacgacttctccacactcaccactgtcacatggatttactcgaggagtgttcttgttcacaatactatctggaatctggccaaaagtttctccacattgactgtcatctttaatttcacatgtatgacttcttagatttctcttggcattttggcactgatctccaatgttctggtcctcccatttcatttctatacagtccaggttcctaatggtttcctgcatgacatttctgtagagactcttctgtgatggacccagcaaagcccactcctcttgtgtgaagttcacagccacatcttcaaaggccactgagtccatttcccagcttccaggtgtccgggtgtcctccttaaaagccagtgtgggtcccagcgcgacagacgctgatacagaccttccagggcgtctctctctcggaat

SEQ ID NO: 88525 - DNA, 1927 bp, Homo sapiens
cccacgcgtccgttcttttctgccgggtaatggctgcttccaagacccagggggctgtcgcccgaatgcaggaagaccgtgatgggagctgcagcacagtcgggggtgtaggttatggggacagtaaggattgtatcctggagccgctttccctgccagaaagtccaggtggcaccaccactttagaaggttctccatctgtgccttgtattttctgtgaagaacattttcctgtggctgaacaagacaaacttctgaagcacatgattattgagcataagattgtcatagctgatgtcaagttggttgctgatttccaaaggtacattttatattggaggaaaaggttcactgaacagcccatcacagatttttgtagtgtaataagaattaattccactgctccatttgaagaacaagagaattattttttgttatgtgacgttttaccagaagatagaattcttagagaagagcttcagaaacagagactgagagaaattctggaacaacagcagcaagaacgaaatgataccaattttcatggcgtttgtatgttttgcaatgaagaattccttggaaacagatctgttattttgaaccacatggccagagaacatgctttcaacattggattgccagacaacattgtaaactgcaatgaatttttgtgtacattacagaaaaagcttgacaatttgcagtgcttgtactgtgagaagaccttcagggacaaaaatacacttaaagatcacatgaggaaaaaacagcatcgtaagattaatcctaagaacagagaatatgacagattttatgtcatcaattatttggaacttggaaaatcgtgggaagaagttcagttggaagatgatcgggagttgctggaccatcaggaagatgactggtctgattgggaagaacaccctgcctctgcagtctgcttattttgtgaaaagcaagcagaaacaattgagaagttgtatgtccacatggaggatgcacacgaatttgatcttctcaaaataaagtcagaacttggattaaatttctatcagcaagtgaaactggtcaattttattcggaggcaagttcaccaatgcagatgttatggctgccatgtgaagttcaaatccaaagcagacttaagaactcacatggaagaaactaaacacacttcgctgctccccgatagaaagacgtgggatcaactggagtattattttccaacctatgaaaatgacactctcctgtgtacactatctgacagtgaaagtgacctgacagctcaggaacaaaatgaaaatgttcccatcatcagtgaagatacatctaaactgtatgctttgaaacaaagcagtattttgaaccagttgctactataagagtacttgaaaacctagaagaaactaccacagaagcaatttttcatgtttttctcctatgagacagatatgaaagaacaatttaaatttgaacatcaacaaaagattggtccttggtgaaataaacttttcaaaaatgaatgttcttttcaaaaaataaagtagaaaaatgcacttactaagaacatgaaaaaaaatgaagtaggaaaataagatgaagactttgtattttggctgtaaagttttattgtgtgatcatcttaaattatctcacttcattaaactcataattatatatagaagtatatgtcaattacaaagaaatgaaatgttcaaattatttataaacctgatttttcaatcagtagtttcagtctcctccccaaggaccttcttcatccaacaagttgcaaaatttgaatatcccttctgtactatattgggtgagctgtaaatgtaatgactaaaagaaaagccacagaagaaagaagaaatggtcaaagacgtggataatatgcaaattggccattatattagaacaatca

SEQ ID NO: 88526 - DNA, 1491 bp, Homo sapiens
ttttttctgatgcactggctgcacctttattattggtacggggaacactaacagctccgtgacgccaggttaccacacacagttagatagtgtctgcattgcacatctaaggctatacagcaaaagaatcagaattagtacaaatacaaggactatatttacagtctgtatactcaagctccaaacatcagataatatttacaaaataaaacatgaaaatgaaaatccaaaattaatgtacattgttgctaatgtgctcaactcccttcacgggggagagatcagtttgcaaagtcttggttcaaaaaggccacttatgcattatgggttttgttgtcatgtgtgaggatggtgacaagagacttgaaatctcaacagacaggtactttagagccacaaagtctaagacgatgccttaaatacaagaaggctgagggactcctcaagtgagctgatgccagaataggcagaatgaaaaaaaatgaactcgaagacatgaagaacaacacacaacagccacggtttggcaagagaccaacctcagctcagactttccatctgagcacagccgtttggctatgagctttttactgaattttatagcaactctgatttcttcctttaaatgattggaggctttttaaagatcttatggggctcaaatactaacttcataaatggccttttgaataacagcagcaaataatctctcagctgatatttcaatttactaaggaagcacaaattaaaacattcctgctacacagtcatggtctggccacacactggggtgaatcactggccctggtgaacaactgtagtgcacacaagttagagtcctatgtaaacacatccagcaaaccttctgggagcagcagcatcatgaatcttttctttttttttgagacggagtcctgctttgtcacccaggctggagtgcaatggtgcagtctcaactcactgcagcctccacctcccaggttcaagctattctcctgcctcagcctcccaagtagctgggactacaggcacacgccaccacgcctggctactttttgtatttttagtagagacggggtttcaccatgttggccaggctggtctcaaacttctgacctcaggtgatccacctgccttggcctcccaatgtgctgggattacaggcgtgagccaccacacccggttgaatctttcaagaggcaggttaacaatcacatttttaaaagggaaccgaaaggaaaactgaaagacctaagtcaaacaagccctgatactgtccattggaacccgagcgggacacagcacgagggaaatgcagaaagagtaccgatgagtgtgcacactggagaatcctttctctccaatccactgtgcaagtaagtatagctggataaatatacatagacctgacaaaattaaatatccctgtaaattagacaataagcagcaggcaacaaagtctttgctttggaatatgtgccaggaaaagcc

SEQ ID NO: 88527 - DNA, 3429 bp, Homo sapiens; identical to SEQ ID NO: 64445
  misc_feature (1)...(3429): n = a,t,c or g

SEQ ID NO: 88528 - DNA, 1733 bp, Homo sapiens
atgaggctggtcttgtcggtttcagcagcaccatacaaccctgagcttgggtctgctgttcccttctcctggagcctgctaggactactcagccagtgaggaaccagatctgtgaacaatcaagctttatttttacaaaaatgaaaattgtagcatgtctcaacagccagcctgaggtagggctggctcagaactcactcagaactgctgggttccctttgctctttcttggtttcaaagcaaaaccaggccacagtgccccaggaatgaacccccagccccgagaggttggtcaagggtgaggtctggctggtgccaggaggctattggcagcctcacctttccttccaggaaggggcagaaaggaaccatctgggaaggtgggagcacctcacctcactctgtaggctgtcatggctctaataaggggtataggatgggcctctccaggccagatccttgctctggccaaacagggacgcaaggcccgggttcagccgcactctaaagcagcaggtcctgcctctccaacaggttcctgggagggactgcatctctggtaagctccaaagtcccaggagtcagaagcctctagtgcaaggtgcctgagcactggggtcacaggcccaggagcacagtggggcagtgaggaggagctatcactgcaccctccaggcaagagaagtccctgagtagctggtttccctggcccagaggcaggggtggccctgacggtcatgggttttgaaaatccaggacgtggaggttgtaagacagggcagcatagagatgcttggtggtgagacgcaggcagtacacagggctgctgaggggagtcgacgtcagcgggaaggcgtgcaggcaggccctttgacgccggtcccacagccgtacaacaccgtagtaggaggaacctgtggccagcaggtggttgccatctgtctgcaggcagtacagggtgctgtcgtggggctcctcccactccatgacacatttccggacgctggtgcggaggtcccagtagcgaacataggtgtcatagccacaggacagcagtgtgaaaggggactcatacatgacatccagcaccccagcccctgggggaaagtcactgcccaagtgtgtcatcagctgcccactgttgaggtcccagattctcaggggtgagaagtgcccgcaacaagccgtccctgtcacaaaagagctgagtaatgggctgatagcaatggaccagactcggtcttcagtctggatggtgtgtaagcactgccccagccggcctgaggccaaaggccacaccttggccgtcctgtccctggagccactcacaatgatgccccctttgcaatccacacagttcacctcctgttcatgagccgagtacttgacagtgaaggtgctgtgaatcttatgaatgccaatcttcccatcccctcctgcactaacaatatgcgagttggccagcacaaagtggcaaacgtcctcatcatgcccagcaaagactcccagaggccgacgattcaagctggcaccatctggacggaactggtaggccaggatgaaattagcctgggatatgtacagagaatcatcctctagctgcatccagggcatctgactgcatctccacttcagcagaatcccctctcggcagcgccccagtctccagttctgagacaccttcactcgttccttcactgggacactggtcatcaggtcggtgccgagccgcg

SEQ ID NO: 88529 - DNA, 425 bp, Homo sapiens
  misc_feature (1)...(425): n = a,t,c or g
tttttgaagacaaccagctcaatgaaagaactgttgaccttactcctgagcagcttgttattggtacacctgatgaaggctccaatccagaaggcatccaaagtcaagtccaagaaaatgagagtgagaggcaacagcaaagaccatctaacattctgcatttgccatgctttggctccaaattagcaaagcatcactcttccaccaccggaactccatctagcgatggaaggcaaagcccatttgatggggattcaattacgcctactgaaaatcctaacacattggttgagttagctactgaggaacaatttaagagtataaatgtagacccacttgatgcagatgaacacagtccatttgaattccttcaaagagggaccaatgtacaggaccaggtacaagactgcttactactttcaggn

SEQ ID NO: 88530 - DNA, 1118 bp, Homo sapiens
gaatcctcaatttctgcatcatcgcctattttcacttttcactactaatagttcggtgtttctttgaatttctagaacacagtgatgtggaccaggatactgcactggcaggtgcgcagggcttcacaggctgcctctctgcagtgcagctcagccacgtggcccctctgaaggcagctctgcaccccagccacccagaccctgtcactgttacaggacacgtgactgagtccagctgtatggcccagcctggcactgatgccacatcaagggaaaggacacactcgtttgcagatcattctggaacaatagatgacagagagccccttgctaatgcaatcaaaagtgactctgcagtaattggaggtctgatagctgttgtgatttttatcttgctttgcatcactgccatagctgttcgcatttatcagcagaaaaggttatataaaagaagtgaggcaaaaaggtcagagaatgtagacagtgctgaggctgttctgaaaagtgagcttaatatacaaaatgcagtcaatgaaaatcagaaagagtacttcttctgattggcagctatgatttaacataaaattatgatagtttgttttaatagccaggggttctcaatggaaaaacgaatgctcttacactgaatgtacaggcagtgggcttgcagcactgccatcttgccatgtacaggcttggggtggctccaggaagcctcatccagtgatatatttctcatagcattcattctatggaacaagaaattagatattgctgttaattttcaactgttctggtatgatctaaaacaagtttaacctgcttaatggctacagtttttacatgtgaaaactgtagccttggtctcttaaccatgtaatacataagttttgttagaggtaaaaattaaatttggactataatgtccctgctttatttgagaacatttgctgtgtttgcttttgtctcctcgtggtgttattcatagacctggaaatgcttctcagatcctgtgtggccggtgtttgcatcttcagtggccacaagcataataaagcccctttgcctttctctgtattatattcaatacaatacatcaatagtcttgaaaaaaaaaa

SEQ ID NO: 88531 - DNA, 1209 bp, Homo sapiens
atcagcagcaccagctgagattgcagtttctcccgaatcccaggaaatgcccatgggacggacaatcctcaaagtcaccccagaaaaacagactgttccaactccagtacggaaatacaactccaatgccaatatcataaccacagaggacaataaaattcacattcacttagggtctcagtttaaacggtcccctgggacttcaggtgaaggagtcagtccagttattactgtccgaccagtaaacgtgacagccgaaaaggaggtttccaccggcactgtccttcgctctcccaggaatcacctctcctcacggcctggtgcaagcaaagtgacgagcactatcaccataacaccggtcacaacgtcatctgctcgaggaacccagtcagtgtcaggacaagacgggtcatcccagcggcctacacccacccgcattcctatgtcaaaaggtatgaaagcaggaaagccagtagtggcagccccaggagcaggaaatctgaccaaattcgagcctcgagctgagactcagtctatgaaaatagagctgaagaaatctgcagccagcagcaccacctctctcggaggggggaagggctgagggcagtggctaagggggtatgttgtgcagatgctactgctgccgtgaaagtgaaccttcatctgtttgtgccagttctttacatgtactaatttaagttttaaatattgtgtttataaaataaccaactaataaccatttgtctttcccattttgtgcatttgttttgatgctggggaacaaaattagcaaaactattgcttgctgcctagaagccagggcgtggtttctagttccagttttgcttctagcaagtggacccatcaatagacccatctgagcctgtttcctcatcagttagatgtggggactcaatcacacgctcttcaagtccggctcccatatttcctaattgcaagccaaatttaatgtaccttgttccacaataattttttattaaaaaaatcctattacaaaataagacatactttaactattgtcatttgcctctttcacatcatgaatttgctttatgtgctggaaaaaacatcacatagctatcacagggcctggacctctaaaattttgcaaaaacaaaaggttctaagatgatttcaggaaataatgtgaacatgtaataaaatggaaatgaaatatggaatcctaaa

SEQ ID NO: 88532 - DNA, 4741 bp, Homo sapiens; identical to SEQ ID NO: 64308
  misc_feature (1)...(4741): n = a,t,c or g

SEQ ID NO: 88533 - DNA, 1387 bp, Homo sapiens
ttttttttttttaataaacactttagatttattctgccatttctgaagccacctcatttaatttatacataggatataaatggctatacatttttacacacttttatacaagtttaggttgtactactgagtttgttaaaatgtacccattatttactcaaaatatttattgttacaagaaaaccgtaagaagcttgtgtaacatgaacagcaagtattgaaaacgaatatgtaaagtaaatggttttgccctgactaaatcagcctcagtattttatgcttttagtagaaaagcccattaaacaaaatagaatcctgggggatcaaatcatatgaatgattcatgaaataacacttctgaagcaaccccagaatcatataaatgtaagggttaaaggtcatatgtactaagcatgggtcagaggaatagaatggatttgttaattttaccctaaataaaaggcgcttgtgggcaacagctctgccatcaatacacatgggcagatgtttccgaatccagccattcccagatttcactgacatgcccttttccacaggctccctgctgatgagatttccccagcagcagaagtttgacatcactgctcccggatgggagaatcagagctctcctcatttgggtcaggggtggctggctcacgaggtttggtccaaccagcagaaccagctccttggatcctggaataaaccaaacatcaatggtaccatgcgctctgtgcccagggagtgaaaggcaggtccagggtgggaagaagaggggctgctaccttttggagtgaaaaaaatgaggtttacactgtagtataacaaaatgcctttttgtaaaggtcagaagaaatggctgtgctgtgctgcctgaagcagaaaaaccttcatgtaccaggtgaatgtaaagcctttctccctcccacacacaatggactcacccagtattaccctcccactaccacttttgaccctcataacaggcaccctggcgggggggcagattgatgttatcaccatttaccagatgaggaaactgaggcctgatgggcagtgatttgtgcactgcgacataggactcagtgaagagcctagccagctgacggtcagctgactggtgcactctttccctcaccttctctctcaagggcacagctacactctttctccaccattattaacactcacagggcacaggtagagcgtccccagacctgtgcaatattctacacgaaaacatttggaatgtgagcaatgtctgaacaggggcttgccaggcacatctgatcaccataaatgctcccacccctgcctgtcctcacatgtgctgcactatgcaagcaagcagcaggttctcagaaggccactgtcctgcatgtca

SEQ ID NO: 88534 - DNA, 579 bp, Homo sapiens
ctatggagtactaacacataagttttttttaatttaagaatttagccaatttctgttcaatactctgataatttttaccattacttaagtagcaaataaaattttacccagcatttatagagacagcataggtgtttaatgaaatatatttttaagaaaatattttatctctagattaatcggtaactgtaccttacaaagagtactttaatttactgccctttgttgttgttagggggggaaagaacatggtgttccaatcctcatctctgagatccatccggggcaacctgctgatagatgcggagggctgcacgttggggatgctattttggcagtcaacggagttaacctgccatatcacttgtgatgagatctaacttttgtgtcatctccttctcattatcatagctgatggtaaactcagctgactgatgtctggcaaagggatatttaatctgcttccaacagtctgttttctgagcctctgctgatccatacggacttcctttcttcttcttcctgtggatgtttcttccgaggggatgggccttgtgattgtctcatcttctttcttag

SEQ ID NO: 88535 - DNA, 2502 bp, Homo sapiens
gcagtgcgcaggaattcctttggtgatgcgaatcctctgggccacaggccagtgtgagattgggaagccccttttcccagagctgtccagggcaggtgcggcaggcctgatgggtgcttttggcacccccttcctagtcaggaccacaggcacctcagagactgagatgtcggctatctgccaggaatacaggagcacctcagccaccgccgtgacattctctgactcgtcactgttgaagacgcaatcctcggactctgggaacaacagggaggcactaagccatggtcccagaaaaatcaaggccacccagggccagaggcagagccttagcaagactgagcccacccagagccagaggcggaactccagcaagaccaaggccactatacacaagaggaactccagcaagaccaaggccacccaaagccagaggcggaactccagcaagaccagggccacccagggccaggggcagagctccagcaagactgaggccactcagggccagaggcagagctccagcgagattgaggccacccagggcccaaggcaggagcccagcaagaccaagaccacccggagcccaaggcagaggcccagaaaggtcaaggctgctcgtggccggagctggagacccagcaagggttgatgccacccagggccgaagcaggggactgctccgaagttccaccaagactgaggctttgtatgactcaaactggagcctcagcaagactgagtatgcccaaggccagggctagaggtccagcaaggctgagggtgcccaggccaagagccagggcatgagctcaacttccagcaaggccgagtccacctggggacccagcccaagtctcagcaaaactgaggttgatcaggacctcacctactatgaagctgtctgaagggaccatccagaccctcccttcttgctggggaggggatgagttctacccacctccccacactggcactcagccagctgcctccttccagagcaattaaaagtcttagcaacagtcctctggtcccacagctgagtttattatacttgttttcttttacaaaattaaaaacatctaaaaccaggcccaagtggcagcttgagtccctccatttctggaaactgagaaggctccacctggcttgatatggacacagggtgtggggtggaggggaggaggtatggtgcccgaccaaggaggcaaggggcaagggtggcagactgaggagggagcaccgccacgagccacagtccctgagttataattcacagtaagaaggctcaggctgcagggggaggtcaaggctcagtgaggttctggggtgaccaggggtttccctggggaaggtggccggggccaagatgctctcgagccagtttagaggccagggcccttcctggccatctgtcccgtggcctagccgacactccgttcatctcacttggtgctctgggttcctgtgacagaggcccctggcctttcctgcatggcctggccatcaggggggccgaggacaccactcagagagtcagaggaagaaggcgattcgggaggccacggtcttgcagccgttggaggagaagagctgctcgtcttcagggaagaaggtggtgctgtccagcacagcctggacaacctcatcccttggctccaggcccagctgggccagctcgttgagcacgcagtgccggacgtggtgccgctggagcgggaggaagggcaccactgcgtctaggaggcgctcttccatgatgcccgagtttgagaagccatggtgcgggttgtccagcaccgcgcgggagatgaccggctccagctcctgcaggaggatctcctcgcggtcccgccggctgcgccacgcctccaatgccacctggttgatctgctcgccacccgtgttgctgatgaagatgaagatggctttgcggtaattggtcccgtataccacccaggaggagcccaggaaaggccgcaggacttccatcaggcctgggggcatcttgtccatctcatcgaagaggaagagggagcggccacaggcagtgaggttcccttggacccagctcttcagatccttcttgtagcgctcgatgtggctggggtgggggaagtggaggacgggagaaaagtggtgcacgcgggggctgcggaggccgccctggaagaggtagtgcgccagcagggagctgacataggatttgccggtgccggtccagccgtgcagggagaggaccagcggcttggtgggggctgggtcccgcacaaaggccttcagcgccttcaccaccagcgccttggccagatgctggccggccaggtgctgagccaggtcacactccagacccggcaagtcgggccggaagtcgcattcgcaaaaggcgcccaaggtgcagcgcagggaagccaggtcccaggcggcggccgcggccgagaccagcccgagcagcccgaggagcgagccccagggccggcagccgcgcgtcgcagccgccat

SEQ ID NO: 88536 - DNA, 418 bp, Homo sapiens
taagctgagatcctaaggacctccccaaaggaggaggtctgtggccttcccaaagcgcagtagccacggtggaaacgaaagcgtgccgcataagcctaccgtctaccgcccgcacatcaggaacctcacggtacttcagggaagcagttaagtcaagccggcgcgtcacaggcactcggcgtgcaagccgccccgcaggtgctaccgtctcttacctccctctacttttaggaaacacgttgtatccccggagggggtgcaccgttcctggaggtactgcaataccaggtcgatgcgtggagtggacggagcaagctcctattccatctccctgctccaaaaatccatttaatatattgtcctcggatagaggacgtatcagatattaaactgataagaacagatactacacttggtc

SEQ ID NO: 88537 - DNA, 2668 bp, Homo sapiens
gaagattttagccattgagctggaaaatctcaagagcaaactcgtagaagtaattgaagaagtaaataaagttaaacaagaaaagactgttttaaattcagaagttcttgaacagagaaaagtcttagaaaaatgcaatagagtgtccatgttagctgtagaagagtatgaggagatgcaagtaaacctggagctggagaaggaccttcgaaagaaagcagagtcatttgcacaagagatgttcattgagcaaaacaagctaaagagacaaagccaccttctgctgcagagctccatccctgatcagcagcttttgaaagctttagacgaaaatgcaaaactcacccagcaacttgaagaagagagaattcagcatcaacaaaaggtcaaagaattagaagagcaactagaaaatgaaacactccacaaagaaatacacaacctcaaacagcaactggagcttctagaggaagataaaaaggaattggaattgaaatatcagaattctgaagagaaagccagaaatttaaagcactctgttgatgaactccagaaacgagtgaaccagtctgagaattcagtacctccaccacctcctcctccaccaccacttccccctccacctcccaatcctatccgatccctcatgtccatgatccggaaacgatcccaccccagtggcagtggtgctaagaaagaaaaggcaactcaaccagaaacaactgaagaagtcacagatctaaagaggcaagcagttgaagagatgatggatagaattaaaaagggagttcatcttagacccgttaatcagacagccagaccgaagacaaagccagaatcttcgaaaggctgcgaaagtgcagtggatgaactaaaaggaatactggcctcccagtagcattggatgcaggaaaaaatacattgacggtgaaaaacaagccgaaccagttgtagttttagatcctgtttctacacatgaaccccaaaccaaagaccaggttgctgaaaaagatccaactcaacacaaggaggacgaaggcgaaattcaaccagaaaacaaagaagacagcattgaaaacgtgagagagacagacagctccaactgctgatccataaaccagaagcctgacatgtttggaagtccttttcaataagcacatgattagtgttgttatattggcaagggctgtaaacattctgctctggtcactgtattcagaatacaggttcttttctggtgtcacttttgtaagtagcaactataaacataagtaagctgtttagcaaaacacacattcctagtaggttttggttttttgatctttataaagatgaggtttttttcctagttactgtattaagtatgacttcttttagaaggttacaaaaaaattcagatgttgatacctttttaggaaatgtgcataccactcatcaaatggaatgctgaaagtttgaggtgcttgtatataatcggataaacaaaactgatcaacccaatgtgattttaaaagcccccaaagaagcttctgttttgggtctgatcctcttgatggagaaactgcagcagcatggaaattgttgggtactgtggcatacaagttattttctacagtagactgagataaactgaaaactcaggagctggcatcaaactcgtagtcccatagtcagtgttaattacacacattgttaactattggatgaaaaatacatgctattgattgtgtccaaagcctcccgaggacctccgtggggatgctctggtagcctgaatacagaactgaggtgaaagtccaaaccttgaattttacagtagtaagttggtaaaccatgtgctctgtgctatgagttaattatgttttcccaaatactaatgtggcacaagtaccatattttatcagagttcttatgtacagtatggtgaagataagtgacaagcacacatttttcttgcttcactgctgttctatattacacaggtttgttgttgttttttttaaaaaagaaattaagcagtagttagtctctaaaaatacaatgtttcaggctaccacagtgaataaatagaaatgtaatcagggattaaaaaaaaaacttatgcagcttttcaaagttgattgtttcaaaattggggtttatttaaaataagtggtaatgtacttgaatgcactttttatgacaatgattcagtaatggtaattttactattaaagaaagtgaaaggtttagttttgttagcatggctcagcatgtagctgtcaggtgtttttcacctaagggcaaaagaaaatgatagtaataattgcagtagttgtattgtattgtatttttgcacgtgtggtaagcataggcttgaagaggtgggtaggcaggtacatgtacttcctaaatttggagataattatctttctgtaagttcgttatgcttgactgtttccatgttctcccaataatgattttatagttacttatcactttactcatggagaattaaaacgtaatgtttttcaactgtatctttctttaactggataatactgctatatgatatgcttactacagactgcattaattcacgaaacgaattctgttatgctgtaatttgaactctcctcaccacaacttattaaaaaggcaccaatagtttcccattaaaaaaaaaaaa

SEQ ID NO: 88538 - DNA, 582 bp, Homo sapiens
  misc_feature (1)...(582): n = a,t,c or g
agatggaagagggctcaaacacagtaggtactggaaaactttctctggtgcaggtagtttgagtttcataacgaataagacgagactgaagttcanaaaatcctccatctctttccaaagcttttcggtcatccaagcaatattcaattccatgataatgacatactgaggctttctcaaaaggtaagacctgaagtttcccaggactaagttctggtgtcaaaacaaaagtcttttcccccttttgaatcggtaaaggttgaagatctccaatgggtaatccatctgaggtaaagtacttcagcaattctttagcatccaacaatgtgattgagtcccgaggaccctctttgtggcccagcaactgttcagatgaatgaggtaatgaaccagttctcattttttgtttagttttttcaaaagtttccaaattttgaagaacatgcctttctggccattccagaggattggtttccattagacttgaggaattaggttcccctggactaaaatctaaagtgaaagaaatccacataagtctgaaaagtattatcatactgaattttgctaataaaaatgtgt

SEQ ID NO: 88539 - DNA, 1619 bp, Homo sapiens
ttttttttttttacatcttcactgtagaaaatttatttgcctttccatggacaacaatcatttgtattattatcagttttctacaacacgtagagttgtcaaatagcttaaagacaaggacaagtatagacccttctagaatcagataactcctagaaaggtcttctagacaatctgtagtgaagttaagtaataccttcaagatttcacaaactgtaaactcgatctgggaattcaacccagatctatattgttctggaaattccaggctctttttttctgtatcaagaagcttttggactggaagagtgtttttcagcaggaattgtggtattggccacccatcaccccatttaattaaaaatccctggcctacaggacctacagcaatgtactgaagaacttcagaacctcaattagccatttgccatcttgagagagtcttgtccatggttcaagtgttcccttggaactcctgaagggcttggagcttagtctgagccatgggaaatggccaaagagtctcaagattcccactgtatcctgtgccttggagcaggcaaggagaccatggcagcccctggccccggtcagttcttggctttggcagttccgggaccaggacgctggtacagccggattatcccttcatcgtgtagccgcttccagacttctctctccagcttgaagtcatggtttatgtaaaagatcagccgcttccatgatgtatcatagtagtgatcagaaaagcgctcatggccctcagtgatgaagccataagcactcacctggtcacagagctgaagggcagtgagcagcaggagggccccagtggtggggcggtatatcctccagtgggcaccatccagggtcttagacctcagaaacctgttcttcatgtatcggagaaagtctgggtgcagcaacaggtacctgtccatgtgcagggcttcccgaaaagcttcctggggtctgtgcctgaaccagaaaaggttttttgacatcaccgtctgattcataagcagtgcttccagccactcatagtcccgggtgccttccaggaagtgcaagtagcggacgtccttcccaagaggcacgttcttgaaaccccgattgcccaatataaggagtgactgggtcagggagaaggcggtaaagccgtagaaggatgtccgagtccccacatcctgttcgtagcctttaatgagagctccgctcaatcggaacacgtagtcgtgactgtctatctcctggcccatgtgggagttgttcaggatgcccccgttgcccaccacggcacaggtgatgcaccggaggctcccagcggggaggctggccaggagcagctgctgctggggcactggagggaagcgtgtcacgaccttctgcaccactggaacaagagtgggggtgctccattcagagcccttcccctgggttaaggactcacaggagtagttgagctccatgaagccaaagggtggtgcaaagtgttccaggcggtcccactcactctggttgaagtgtctggagtccaggaagagagtgaggttgggcagaaagagtttctggagccacagcgacttggaggctttgatcttcacagagtcagggcaagt

SEQ ID NO: 88540 - DNA, 823 bp, Homo sapiens
  misc_feature (1)...(823): n = a,t,c or g
cattgctagtgccaagcataagcaggcaccatgaagtgagggtggaggtgaccaggccagtgagggcatggccttgcccatggtctctgatgcccctgcctgtcttcctgcagactactctgccctcccagggcccactgcagagacccagccggctggtgtttaccgatgtggccaatgccatccatgtgtgagtggcctgggacaagcctggacttctgatagagacccatcacggtgcctacagagctccccactccctgattgtcaagacctactctgaagatcttccctgccaagacacaagagggctgagccaggttcctagctgttctccagacccacctgctgactttagactctaagagagggccctagccaggctgggacttctggaccactggacttctcctgacctgagggccctggcacagagggcatccctcatgctgaggaaggtcaagagcctctgctgggtttcctcattcccttgttccagatccttcacatcagggtctgccccgctaatgtggaggaaatgagggagatacggagtngggagggattnggggaggaaaggggaggtttccctctnttagggagagacctgttttttggaatctggagcctcctctggggtggggagaggaaaccacccaagttatagggacagggtagggcagcatctgttatgggccctggagaagcccagagatnggagctgaaactgtccagtattgcaaggatnccagggagtaagggcaatttcacacccagggttccntccttattacggagggttccaggangttttcccanccat

SEQ ID NO: 88541 - DNA, 444 bp, Homo sapiens
cccacgcgtccgaatagatcatcagtattgcattcaaagcctccagtgcggatctggaaattataattacaatattcctgttaataaacacacacccaccaatgtcaagttctctctggaaataaacacaacagagccattgatagtcttccagtgcaaattcacccttggaaatatatgtttccatagtaaaaggggaaccaaagggctggaaagccacagagaaatctcccaggagatgacacagggatatcagcacatttggagcctccctgtagccccattttctgacagcatgttccatttccgtgtagctgcaccggatttagctgactgttcaactgatccttattttgctgggatattcttcaccgattacttcttttacttctatcgacgcttgggctaatttggttcagtttggggactttaccaaagaaaaat

SEQ ID NO: 88542 - DNA, 6252 bp, Homo sapiens
tacggctgcgagaagacgacagaagggcgtattcctctcaaaaacatatatcgcttgttttcagcagatcggaagcgagttgaaactgctttagaggcttgtagtcttccatcttcaaggaatgattcaatacctcaagaagatttcactccagaagtgtacagagttttcctcaacaacctttgccctcgacctgaaattgataacatcttttcagaatttggtgcaaaaagcaaaccatatcttaccgttgatcagatgatggattttatcaaccttaagcagcgagatcctcggcttaatgaaatactttatccacctctaaaacaagagcaagtccaagtattgattgagaagtatgaacccaacaacagcctcgccagaaaaggacaaatatcagtggatgggttcatgcgctatctgagtggagaagaaaacggagtcgtttcacctgagaaactggatttgaatgaagacatgtctcagcccctttctcactatttcattaattcctcgcacaacacctacctcacagctggccaactggctggaaactcctctgttgagatgtatcgccaagtgctcctgtctggttgtcgctgtgtggagctggactgctggaagggacggactgcagaagaggaacctgtcatcacccatggcttcaccatgacaactgaaatatctttcaaggaagtgatagaagcaattgcggagtgtgcatttaagacttcaccttttccaattctcctttcgtttgagaaccatgtggattccccaaagcagcaagccaagatggcggagtactgccgactgatctttggggatgcccttctcatggagcccctggaaaaatatccactggaatctggagttcctcttccaagccctatggatttaatgtataaaattttggtgaaaaataagaagaaatcacacaagtcatcagaaggaagcggcaaaaagaagctctcagaacaagcctccaacacctacagtgactcctccagcatgttcgagccctcatccccaggagccggagaagctgatacggaaagtgacgacgacgatgatgatgatgactgtaaaaaatcttcaatggatgaggggactgctggaagtgaggctatggccacagaagaaatgtctaatctggtgaactatattcagccagtcaagtttgagtcatttgaaatttcaaaaaaaagaaataaaagttttgaaatgtcttccttcgtggaaaccaaaggacttgaacaactcaccaagtctccagtggaatttgtagaatataacaaaatgcagcttagcaggatatatccaaaaggaacacgtgtggattcatccaactatatgcctcagctcttctggaatgcaggttgtcagatggtggcacttaatttccagacaatggacctggctatgcaaataaatatggggatgtatgaatacaacgggaagagtggctacagattgaagccagagttcatgaggaggcctgacaagcattttgatccatttactgaaggcatcgtagatgggatagtggcaaacactttgtctgttaagattatttcaggtcagtttctttctgataagaaagttgggacttacgtggaagtagatatgtttggtttgcctgtggatacaaggaggaaggcatttaagaccaaaacatcccaaggaaatgctgtgaatcctgtctgggaagaagaacctattgtgttcaaaaaggtggttcttcctactctggcctgtttgagaatagcagtttatgaagaaggaggtaaattcattggccaccgtatcttgccagtgcaagccattcggccaggctatcactatatctgtctaaggaatgaaaggaaccagcctctgacgctgcctgctgtctttgtctacatagaagtgaaagactatgtgccagacacatatgcagatgtcatcgaagctttatcaaacccaatccgatatgtgaacctgatggaacagagagctaagcaattggctgctttgacactggaagatgaagaagaagtaaagaaagaggctgatcctggagaaacaccatcagaggctccaagtgaagcgagaacgactccagcagaaaatggggtgaatcacactacaaccctgacacccaagccaccctcccaggctctccacagccagccagctccaggttctgtaaaggcacctgccaaaacagaagatcttattcagagtgtcttaacagaagtggaagcacagaccatcgaagaactaaagcaacagaaatcgtttgtgaaacttcaaaagaaacactacaaagaaatgaaagacctggttaagagacaccacaagaaaaccactgaccttatcaaagaacacactaccaagtataatgaaattcagaatgactacttgagaaggagagccgctttggaaaagtccgccaaaaaggacagtaagaaaaaatcggaacccagcagccctgatcatggttcatcaacgattgagcaagacctcgctgctctggatgctgaaatgacccaaaagttaatagacttgaaggacaaacaacagcagcagctgcttaatcttcggcaagaacagtattatagtgaaaaataccagaagcgagaacatattaaactgcttattcaaaagttgacggatgtcgcagaagagtgtcagaacaatcagttaaagaagctcaaagaaatctgtgagaaagaaaagaaagaattaaagaagaaaatggataaaaagaggcaggagaagataacagaagctaaatccaaagacaaaagtcagatggaagaggagaagacagagatgatccggtcatatatccaggaagtggtgcagtatatcaagaggctagaagaagcgcaaagtaaacggcaagaaaaactcgtagagaaacacaaggaaatacgtcagcagatcctggatgaaaagcccaagctgcaggtggagctggagcaagaataccaagacaaattcaaaagactgcccctcgagattttggaattcgtgcaggaagccatgaaaggaaagatcagtgaagacagcaatcacggttctgcccctctctccctgtcctcagaccctggaaaagtgaaccacaagactccctccagtgaggagctgggaggagacatcccaggaaaagaatttgatactcctctgtgaatgctcctgccaggccttcagaaattgcatggccactccagcgtcatcggactctctcttattacaaagatcactgcccaggaccatcttcccgagaagcatcccttagcctaaaatccacaccaaagggagagttccagaggaatccatgaagaattcccatgcccaggctccatgtgtcatgtggaaacctccacaggtctgctagtgaagaatgcatgtatgtgagatttttgttttctttccaatagcaaatttcaaaggcaagcaacttgcaggctccatgggaactttttaatgaaggacagtgtcttcttttgaaggaaaatcaagctcgtgtttttattcgaagctctggtgtaaaatatttcaaagtcatagaaatagtttgagaaatgcatagcattatttaacactattgaacagccgactttgagcattgtttcttctaactgcccctcaactaccattatcttcaagtcaacatgcatattacattttcatcctttgctttgcaagcactggtggcttgcagtttgctaatttatttatcatagagtcatcaatgtatttgttgctgacatggttttattagatactgtagtgattcaaataagttttctatttgaaaaaaaaaatcacttgattgtatccttgcccagtgaagccatcctaagacttagcaatatggattgtacatttggctgcatgagcaagtcggccgcacacttccagacagtgtgctgtttgaattgactatttgcactcaaagtctgggtattcattggttattggcctgaaatgatcaaataactacaaatgatctgttgaataaaaatagttgagctgatatatgttaagcagatattcaatcagaatgaacaggttccggtggttattttgccgtttgacattttttatggttcatttatttttaatatagagaggaagattgaatatttatctagagaatacaaagacccacatgtaaatgataggtattatctccatgtatatatgtacccacttagtcatgtaagtgcatatacacatacacacacatgagtgtagacatgtgtttattaattgacaatgacccaaatctcttccacaagacttaaaaccaaattcagggacaaatggatagagaagaaaagggtcaaacatcgagattacatggatgttaaattatatggagacgcctaagaaataattggatggagcccttgatgccaaacccgaagtagatttagaaccttatatgaatttgatttatattttgccaagatcaaaaattagatgttaagtatccagattttaagcttgttttaatggtcaaaaaattaggacagaaataatatggacatttattagtatcttccataatttttaagtctgacacatttctattttattctaacataaaaaaacttccattatatatttactaagtatatttaattcacttaactctgtctttataagttcctattttagatggaataagagaaacaaattatatcaaggtaaaactgatcaaaagacataattgaaagttctgaaaaaagaaaaataataatatgtagaaaaatgtaacttagagagtaacacatgaacattgaagttaaaacccagaagccagatgctcacagttttattttactttaaaataaacctgtctgactgtagctttgcgaaatatcttaaaacgcaaaaaccagttgtgtcctgaaaattgtttcaagaatttaatatttttatgaaaattattttatttaactttaagcaataactagagattacaattaaattttaatcaaaatgaaggcttagttcaaacataaggaaacagtgtttgattaaaaaaaacacatctagtaagacgtaaggggaaaatcacatcctctttggagatgattatattttgatctgaagggtttggggtgttcattagacacttaataaaacttaacttccaatgaaaaagaaatcttttgtaaatcattctacttttgcactttgaaagaaaggcgttaatcataaagaagcaagaatggtcaaaatcgaatgctgcatttttataaacaaaattacagactgtctgaaattgaagaagaatgaactaataatagcattcataaccaaacacaatgatgattattgcagaacattgtatcacattttagtccagagatagaataaagttgaataaccttgacttacacaaaactgttttggtagttggatttcattatcttagtgaatttagtcattttacaatatgtttgtatttggccatttactgtaatcacatttttatatctgtacaatgacactttttgcagttgtggggtagtgtgtaacactgtccatcttgcatcattgaaactactacaatgatactatcatttaataatattaatattacttgaaatagactaagataaagaaaaggggtctgtatgatgtgcagttttgtgcctttatgtatttgccttgttctttgtcgaatgtgtgaaattctgtactggggtttttcctataatagaaagtagagctgtgtattaaattagactgtgtctctctgatacctttacactactgagaatagcatggttttggccatgtaaaccaattttcaaagttctaatgacatagccatgtgtttttggttttttatatttcattttaaaatttgagtatcaccatacattaattaatactcctgtagtagataagctgtcattaagtaattcccaaaaaaagggccatttgcttgcattactttgaatttaatgttgcgcttgtgcactgtgttaatattgtttgtgatggattggacgttgtgactcttgccttttaagaagaaaaaaaagataggacaaagtatttgaagctcttaaaatgtacatattttggttcttctatctcaaattatttaaaatgcataattcacatttttgtaataattctatgcaattttgtggcatgatgtttcttccacttgtaattttatgtgctttcatcacaaatccaaaggaaagaataaaaatttcttaacacaacccagcggtt

SEQ ID NO: 88543 - DNA, 432 bp, Homo sapiens
attttacactggtttgttcacaggtggtcaggacgtaataaccgagagaagattggtgttcatgttggctttgaggaaatcttaaacatggagccctattgctgcagggagaccctgaaatccctcagaccagaatgctttatctatgacttgtccgcggtggtgatgcaccatgggaaaggatttggctcagggcactacactgcctactgctataattctgaaggagggttctgggtacactgcaatgattccaaactaagcatgtgcactatggatgaagtatgcaaggctcaagcttatatcttgttttatacccaacgagttactgagaatggacattctaaacttttgcctccagagctcctgttggggagccaacatcccaatgaagacgctgatacctcgtctaatgaaatccttagctgatcc

SEQ ID NO: 88544 - DNA, 500 bp, Homo sapiens
  misc_feature (1)...(500): n = a,t,c or g
taaaaagttatgtgtttgtcaataatcaaaaaatgtttaatctaaaataaagtagatgccacgcttctaattctgcttttgctaaggcaataatcagtagaagagggtagtaatatttgtagcttgttaaccaactggagcaaaaggactttttaatatgaataacagtggtctcgtgccataagtatttctctcatacatattaaaatagcatggtattttatttaatattgaaggcctaaacacaattgaacataagggatggcttggaattaaaaactgtgacaatatgggtaaaaggagaccttaatttaatcataaaaattcataattaatgttaagctttgtgctcatattatatgccactctgggattagacaaaagacgaaaaacagttccatattttgaacgatatattctacctcctgcaggggattagcattgtagcgtangagactatttcttgattgtattagtacagaaacctgccaaaaaggtgg

SEQ ID NO: 88545 - DNA, 369 bp, Homo sapiens
ttaggaaaccattctcaaagcattcaaagggtttgaccctgattgcaaaggggtgctgaaggctgattactttcgggaaacgctgaccacgcatgcggagaggttttccaaggaggagggtgaccagatgttctccggcttcccccctgacgtgactggcaacttggactacatgaacatggagctcatcatcacccacggaaaagagaacgactaagagggggctcgctggtgcgccctgggctcgtctttataaagagggacctggcctcatctttctccttccagtaacgactctgaccctaccttgtgtgttatccatgggggtgccccatttatacacctccatcttctttgcaggctgggagg

SEQ ID NO: 88546 - DNA, 1196 bp, Homo sapiens
ttttttttaatgctaacattttttattgaactcttctcaaggtcttttgtagaaaatacacattcatgcttacccaatctaaatatggaaggacctcatgatcacttaagttgtattcctgattcttttatttgagattcactttaagtctaacctagataataatcaatgtatttttaaaaatttcttcacctgtgttactgaaaggcctatctaaaattcttgacatacattttgggacaactttatattgttttgggtgttttatttctttaagaaaatagatgctcctctcccaactttactgtttttcacacttttttctattttgtttgcctagcccacagttcccctatgtattctggttagatagcattgcaaagaaaagaatcaaatttaaaaaaatacaaagatcggaaaaaaaaccctccagaaaaccaatgtccaatgtcctaggaatgctgagaataaagtgagctggaagaatttggcaggatctggtcccatgggtatttttccacagtgtacaatagactccactggctgtagacctaggttgatagggctcaggggtaagtttggttgagttgtatgggctttgtgatgagtgcagggatttctacttttggtcttgctgccatcaaagctaggtcatgacagcagcaacggtctctcttcttagttcaatggaatgtctagtttctgaacttggaggtaaatcatcttttctttattttttcttggtctttgcatattttcggcttcctcgatggtctcaggcaaagctttccctttagtttctggaagcaacagcaccagacctccagcaaccaagccaagtacgccgaaaaccatcagcgggagctcaagccagatgttagtgagccggtagaccaggaatggcgtgatgatgccaccaatgtcacacattgaggaacagatgtggacgccaagattcctaatgaatgtggggtacagctcagcattgaccaggcagactatctcataggccattgtgatccccattcttcccaagcatgagataataatttttagccattgtagatctaagagggaaaagtacagtacttatccgtacccggatgattcctcatcttcagacagtgctccagagtgggactgtaaggacaaattccccatcccagaatgggccaagaaagaaaaatgacttaatc

SEQ ID NO: 88547 - DNA, 1949 bp, Homo sapiens
acagtcgtcctcaaggattttatcctggaacattacagtgaagatggctatttatatgaagatgaaattgcagatcttatggatctgagacaagctcgtcggacgcctagccgggatgaggccggggtggaactgctgatgacatacttcatccagctgggctttgtcgagagtcgattcttcccgcccacacggcagatgggactcctgttcacctggtatgactccctcactggggttccggtcagccagcagaacctgctgctggagaaggccagtgtcctgttcaacactggggccctctacacccagattgggacccggcgctatcggcagacgcaggctgggctggagagtgccatagatgcctttcagagagctgcaggggttttaaactacctgaaagagacatttacccatactccaagttacgatatgagccctgccatgctcagcgtgctcgtcaaaatgatgcttgcacaagcccaagaaagcgtgtttgagaaaatcagccttcctgggatccggaatgaattcttcatgctggtgaaggtggctcaggaggctgctaaggtgggagaggtctaccaacagctacacgcagccatgagccaggcgccggtgaaagagaacatcccctactcctgggccagcttagcctgcgtgaaggcccaccactacgcggccctggcccactacttcactgccatcctcctcatcgaccaccaggtgaagccaggcacggatctggaccaccaggagaagtgcctgtcccagctctacgaccacatgccagaggggctgacacccttggccacactgaagaatgatcagcagcgccgacagctggggaagtcccacttgcgcagagccatggctcatcacgaggagtcggtgcgggaggccagcctctgcaagaagctgcggagcattgaggtgctacagaaggtgctgtgtgccgcacaggaacgctcccggctcacgtacgcccagcaccaggaggaggatgacctgctgaacctgatcgacgcccccagtgttgttgctaaaactgagcaagaggttgacattatattgccccagttctccaagctgacagtcacggacttcttccagaagctgggccccttatctgtgttttcggctaacaagcggtggacgcctcctcgaagcatccgcttcactgcagaagaaggggacttggggttcaccttgagagggaacgcccccgttcaggttcacttcctggatccttactgctctgcctcggtggcaggagcccgggaaggagattatattgtctccattcagcttgtggattgtaagtggctgacgctgagtgaggttatgaagctgctgaagagctttggcgaggacgagatcgagatgaaagtcgtgagcctcctggactccacatcatccatgcataataagagtgccacatactccgtgggaatgcagaaaacgtactccatgatctgcttagccattgatgatgacgacaaaactgataaaaccaagaaaatctccaagaagctttccttcctgagttggggcaccaacaagaacagacagaagtcagccagcaccttgtgcctcccatcggtcggggctgcacggcctcaggtcaagaagaagctgccctcccctttcagccttctcaactcagacagttcttggtactaatgtgaggaaacaaacatgttcaggccccgaacatttccggtgctgactcggccttaaacgtttgtgccataatggaaaatatctatctatctgttctcaaatcctgtttttctcatagtgtaaactcacatttgatgtgtttttatgaaggaaagtaaccaagaaacctctaggaattagtgaaaaaagaacttttttgaggtgtgttactatactgctgtaagttatttattatataaagtattgtaaatagaaaaaaaaaa

SEQ ID NO: 88548 - DNA, 317 bp, Homo sapiens
ccgacatcttactgcgaaaacagactgaataaactttgccatcacattatcaagagaggaattactgtggagagggccttttcgctattctctgctgcagacagatatgatgcagaggatttaaaagaattctgctttaagttttgcatcaatcatttgacagaagttacacagactgcagcattttggcaaatggatggccctccgctaaaggaattcattgctaaagccagtaaatgtggagcctttaagaactgaagcgcaaggctgctgggttctgtgtgagtcctctggggcactgttgaggatgtctcagt

SEQ ID NO: 88549 - DNA, 708 bp, Homo sapiens
ggaactttgactactttcttcaatttgtgtaataaaattgatgtatttaagagaaagttaaaaatgtggttgaagcgcacacaagagaatgattatgacatgttcccttcattttctgaattctcaaattcatcaggcttaaatatgacagacatcacaaggattatttttgagcacctggaaggactttctcaagtgttcagtgactgttttccaccagaacaagacttgcgttcaggaaatttgtggataattcacccttttatgaatcaccaaaataataatctcaccgacttcgaagaagaaaagctaacagagctatcttcagatttaggattacaagcactatttaaatcagtgtctgtaactcagttttggataaatgcaaagacaagttacccagaactccatgaaagggcaatgaaatttttattacccttttcaactgtttatttatgtgatgctgccttttcagctttgactgagtcaaaacaaaaaaatctgttgggttctggccctgccctaagacttgcagtcacatctttaattccaaggatagaaaaattagtgaaggagaaagagtagcaatatgcacattgcttaacagtgaagtcaataatcctgtgttaagttttgtataagtatcctaaaagataatttcctaatgtggatttgtgttttcagtgattaaatgttttaataatttta

SEQ ID NO: 88550 - DNA, 1427 bp, Homo sapiens
  misc_feature (1)...(1427): n = a,t,c or g
atgggcctgtctgtggcgttggtctgtccgtggcgtgggccggtccgtggcgtgggccggtccacagtgtgggtggaggtggacgtgctgcactgcatggtgctgagctgccctgcctctctggggcagccaccgtggagcgggagatggagctgcggcacaagaatgagatgctgcgagtggagaccgaggcccgggcgcgcgccaaggccgagcgggagaatgcagacatcatccgcgagcagatccgcctgaaggcgtccgagcaccgtcagaccgtcttggagtccatcaggacggctggcaccttgtttggggaaggattccgtgcctttgtgacagaccgggacaaagtgacagccacggtggctgggctgacgctgctggctgtcggggtctactcagccaagaatgcgacagccgtcactggccgcttcatcgaggctcggctggggaagccgtccctagtgagggagacgtcccgcatcacggtgctggaggcgctgcggcaccccatccaggtcagccggcggctcctcagtcgaccccaggacgcgctggagggtgttgtgctcagtcccagcctggaagcacgggtgcgcgacatcgccatagcaacaaggaacaccaagaagaaccgcagcctgtacaggaacatcctgatgtacgggccaccaggcaccgggaagacgctgtttgccaagaaactcgccctgcactcaggcatggactacgccatcatgacaggcggggacgtggcccccatggggcgggaaggcgtgaccgccatgcacaagctctttgactgggccaataccagccggcgcggcctcctgctcttcatggatgaagcagacgccttccttcggaagcgagccactgaggagataagcaaggacctcagagccacactgaacgccttcctgtaccacatgggccaacacagcaacaaattcatgctggtcctggccagcaatctgcctgagcagttcgactgtgccatcaacagccgcattgacgtgatggtccacttcgacctgccgcagcaggaggagcgggagcgcctggtgagactgcattttgacaactgtgttcttaagccggccacagaaggaaaacggcgcctgaagctggcccagtttgactacgggaggaagtgctcggaggtcgctcggctgacggagggcatgtcgggccgggagatcgctcagctggccgtgtcctggcaggccacggcatatgcctccaaggacggggtcctcactgaggccatgatggacgcctgtgtgcaagatgctgtccagcagtaccgacagaagatgcgctggctgaaggcggaggggcctgggcgcggngtcgagcaccccctatccggagtccaaggcgagaccctcacctcatggagcctggccacggacccctcctac

SEQ ID NO: 88551 - DNA, 810 bp, Homo sapiens
ccggaattccttggtggacacacgcctccgaggcggtccaaacggagattccagtggtgggacccagggagtggcaaagttgctgacctcgccgtccctaaagccctctgcagttagtagtgtgacatcgtctacctccttgtcaaaaggagcgagtgggactgtgctgctggccggctcctctttgatggcttcaccctacaaatccagcagcccaaagctgtctggggccatgagctcgaactccttgggaattataacccctgtccctattcctgtccatgtgctctccttcagcgctgactcctctgccaaagcaggggtctccaaggatgccatcgtcacaggccctgcccccgggtccttccaccatggccttggccacagtcttctggctggcttgcactccagcccgccccatgcagcgcctctcccacacgctgcggtgcccacccatatcccgcagagtctgccaggtaatcacccgacggtcagtgtgccacgcgcaccgtgtgcctttgccctctccacccctaggtgctttgccgctgccaagggtcttggtgtctttgccttgacgctgttgttgttttggtttgtcctttgaggctgtgctttgtcagtactcagggtgacacgcacttctactcttggggtttcctctggtccccactttggagtgccgccaggtcagcctcagcctgtgtgatcacagggaaagttgcggggggcagggtggtgcgcttttgtgtgcgggtggaggagttccttaaccctcggcttgtttttttctcttcagtttaaaaaaaa

SEQ ID NO: 88552 - DNA, 2975 bp, Homo sapiens
cagttgaagaacccatagccttcggtggcaagctgaagaacccactccaagttgtcctggtggccacccacgctgacatcatgaatgttcctcgaccggctggaggcgagtttggatatgacaaagacacatcgttgctgaaagagattaggaacagggttggaaatgatcttcacatttcaaataagctgtttgttctggatgctggggcttctgggtcaaaggacatgaaggtacttcgaaatcatctgcaagaaatacgaagccagattgtttcggtctgtcctcccatgactcacctgtgtgagaaaatcatctccacgctgccttcctggaggaagctcaatggacccaaccagctgatgtcgctgcagcagtttgtgtacgacgtgcaggaccagctgaaccccctggccagcgaggaggacctcaggcgcattgctcagcagctccacagcacaggcgagatcaacatcatgcaaagtgaaacagttcaggacgtgctgctcctggacccccgctggctctgcacaaacgtcctggggaagttgctgtccgtggagaccccacgggcgctgcaccactaccggggccgctacaccgtggaggacatccagcgcctggtgcccgacagcgacgtggaggagctgctgcagatcctcgatgccatggacatctgcgcccgggacctgagcagcgggaccatggtggacgtcccagccctgatcaagacagacaacctgcaccgctcctgggctgatgaggaggacgaggtgatggtgtatggtggcgtgcgcatcgtgcccgtggaacacctcaccccctttccatgtggcatctttcacaaggtccaggtgaacctgtgccggtggatccaccagcaaagcacagagggcgacgcggacatccgcctgtgggtgaatggctgcaagctggccaaccgtggggccgagctgctggtgctgctggtcaaccacggccagggcattgaggtccaggtccgtggcctggagacggagaagatcaagtgctgcctgctgctggactcggtgtgcagcaccattgagaacgtcatggccaccacgctgccagggctcctgaccgtgaagcattacctgagcccccagcagctgcgggagcaccatgagcccgtcatgatctaccagccacgggacttcttccgggcacagactctgaaggaaacctcactgaccaacaccatgggggggtacaaggaaagcttcagcagcatcatgtgcttcgggtgtcacgacgtctactcacaggccagcctcggcatggacatccatgcatcagacctgaacctcctcactcggaggaaactgagtcgcctgctggacccgcccgaccccctggggaaggactggtgccttctcgccatgaacttaggcctccctgacctcgtggcaaagtacaacaccaataacggggctcccaaggatttcctccccagccccctccacgccctgctgcgggaatggaccacctaccctgagagcacagtgggcaccctcatgtccaaactgagggagctgggtcgccgggatgccgcagactttttgctgaaggcatcctctgtgttcaaaatcaacctggatggcaatggccaggaggcctatgcctcgagctgcaacagcggcacctcttacaattccattagctctgttgtatcccggtgagggcagcctctggcttgggcagggtctgtttggactgcagaagcaagggggtgatgtagcccatccttccctttggagatgctgagggtgtttcttcctgcacccacagccagggggatgccactcctccctccggcttgacctgtttctctgccgctacctccctccccgtctcattccgttgtctgtggatggtcattgcagtttaagagcagaacagatcttttactttggccgcttgaaaagctagtgtacctcctctcagtgttttggactccatctctcatcctccagtaccttgcttcttactgataattttgctggaattcctaacttttcaatgacattttttttaactactatattgattgtcctttaaaaaagaaaagtgcatatttatccaaaatgtgtatttcttatacgcttttctttgttataccatttcctcagcttatctcttttatatttgtaggagaaactcccatgtatggaatcccactgtatgatttataaacagacaatatgtgagtgccttttgcagaagagggtgtgtttgaaatcatcggagtcagccaggagctgtcaccaaggaaacgctacctctctgtcccttgctgtatgctgatcatcgccagaggtgcttcaccctgagttttgttttgtattgttttctgacagtttttctgttttgtttggcaaggaaaggggagaagggaatcctcctccagggtgattttatgatcagtgttgttgctctaggaagacatttttccgtttgcttttgttccaatgtcaatgtgaacgtccacatgaaacctacacactgtcatgcttcatcattccctctcatctcaggtagaaggttgacacagttgtagggttacagagacctatgtaagaattcagaagacccctgactcatcatttgtggcagtcccttataattggtgcatagcagatggtttccacatttagatcctggtttcataacttcctgtacttgaagtctaaaagcagaaaataaaggaagcaagttttcttccatgattttaaattgtgatcgagttttaaattgataggagggaacatgtcctaattcttctgtcctgagaagcatgtaatgttaatgttatatcatatgtatatatatatatgcactatgtatatacatatatattaatactggtatttttacttaatctataaaatgtcggttaaaaagttgtttgtttttttctttttttataaataaactgttgctcgttaaaaaaaaaa

SEQ ID NO: 88553 - DNA, 733 bp, Homo sapiens
ttattatgaaagtggaatttatgttaaaattctaacacacacagggagcaggagaaacggaagccaactgtgctttcctgggtcttctgctgctctccacactgagacctcaggcccagcctctgcacagacgagtgggaaggcacagtttttgaacacccacctgaggcaaggaggtcccaggagagggagtgttgtcagcccaggtcatgtcacagggagggagggagcctggtgcttggcagtcaccccacaggcactggtcagccatagaagggaacccagacctccctctaggaggcaggggcaagaagagagagagcagctccttttccttgcacccaggtcttttgggggagaccagaccaggggcagggaactggcttgggaccccttgttcactctggcatcccctgctgcctccagagtcttctgctggtgccccagaggctgtatccaggccccgagaacaccgaggccccgagggactgtgctgtctggctgctcatggaacctccggccggtggcccttgcggtggatgaccagctgcgacttccagtcgaaggcgcggccacagtcactgcagaagtgacgccgctggcctgtgtggctcttgcggtggatgaccagctgcgacttccagctgaagctgcacccgcactcctcacacgggtaactccgggggcctgtgagtgagcgtcgggggtggtgcggaaaggccacctccccttg

SEQ ID NO: 88554 - DNA, 1257 bp, Homo sapiens
ttttttttttttaatttaaaacaattactttattaaaaaatagcaaatctcacaaatacttatttaatttcttatcactggccattggaaaacacaccagcatgtgtactgattgtctaacataaactgaagctgggcttgccacaagacgcctgtgcatcaacagcttgcgatcaacactggaataagtttggtgagctcaggaaagagaaatccctccgccctgtcaagaacatcagcaccaatgcatttcaagtataatcccataaggcaacaatatgaagcacagcaggcacaattctctgcgtcacatttcctgatgaagccttcaacaagggcctaggcctccagttatggcgaattacagcgagtcacatttactaaaagcagtaagtgaaaacgatcattgaacttgcactttaattactttaattccttgttgtggaagatgattctgctactggatttggctggaaaagtaaagactgctgcttctcttcaaatcacaagaaagcaaactacatttcattttagctagcagaagtatttggaacatcttgtgcatctgccaaatggagtttttgtatggaagaattcaattcttctaaatctgacagaagcctatccagattggagtcactggctgtttttctcttatcctcaggaagttcctctaactccccatagagctccaaattcaagcgagctaatttctcctgcattccccgaacatgttccatctgttcaatggaacattcatttccaaatgcttgaagttttccagagtggaaatcattcaaaagactgagcagccctctctccatctcctgaacatctgagacatcagtgaggaaggagtgctggatcggagttgactgagcgcctttgccctctccaccctgaggtttggtcttttctttcatcactctttttaactttggtcgctgtgaagttgactgtgatgcaggatttgaaaaccctgtgcttttactcactggaatggcattttttttggcattgacaacctgagtacagtgggcactaaaagacttaggactcctcctcttcactttccgctcttccattgttttaagttccttattgcaccacggccagcttcttaagacctgaagaagaagggtattggggcccccttccgcaacccgcaaagacccgacagcctcagaagccaccgccgcagccacaagcagagccccggtcacatcccgggacccgctcctccgcagctccgtttcc

SEQ ID NO: 88555 - DNA, 378 bp, Homo sapiens
atctcctgctttgtctctctttctacgtgctttaacccttgcctctctccctcctcctcccacaggaggaaatcctgagcagcctgttcaactagaaaatcaatgactggtggagacttagttgctagaccggcctttgtaaacaaaatctatctttggaagagaatgaggaaacttatgagagccgtaacaaccaagtgttgttgtagcagcctacatttattgaatactattttgttcactgctctattttcataagcactctgtatgtggacgattttaatcctctaaacagtgttatgaagtagataatattaatagatgaggaaactgagacaaagattggtaacttgttcaagggcacagtggagccaagag

SEQ ID NO: 88556 - DNA, 359 bp, Homo sapiens
  misc_feature (1)...(359): n = a,t,c or g
gaaacattttggaaacttcacatgcattccgcttgagaccatagtgtttaatctatggcaccaagcatcgtttcctcagattaatgagacccttcaacaagcctgaatcagtcacttttcaacacagcgatgttttaacaagccagctgctaagcttgtgtttatgtgactcttgttacagatcatggcggtgcgtcagcctcacaggagacatagcaggtctcagaaaccttctatgaccctgtcatctaaccatcagggaattccctgctcccatgccacacatttgtctattatggctatagtaccaaagtacttttggtgtttggtaggtgtcattctattttggctnnnnnnnc

SEQ ID NO: 88557 - DNA, 1708 bp, Homo sapiens
  misc_feature (1)...(1708): n = a,t,c or g
gcgtggtggaattctcaacccttactagccataagagaatacatactggtgagaaaccctacaaatgtgaagaatgtggcaaagcctttaactggtcttcaactcttactaaacataaggtaattcatactggagagaagccctacaaatgtgaagaatgtggcaaagcttttaaccagtcttcaagacttactcgacataaaaaaattcatactggagaggaaccctacaaatttgaaaaatgtggcagagtttttacctgttcctcaacacttactcaagacaagaaaattcatactggagagaaaccctacaattgtgaagaatgtggcaaagtttttacctattcctctacacttactagacataagagaattcatactgaagagaattcccacaaatgtgaagaatgtggcaaagcctttaaccagtcctcagctcttactcgacataagatgactcatactggagagaaaccctacaaatgtgaagagtgtggaaaagcttttaaccggtcttcacaccttactcaacataaggtaattcatactagagagaaaccctacaaatgtgaagagtgtggcaaagcctttaaccggtcttcacacattactcaacataagagaattcataatagagagaagcccttcaaatatgatgaatgttgcaaagcctttaagtggtcctcagctcttactacccttactcaacataagagaattcatactggagagaaaccctacaaatgtgaagagtgtggcaaagcctttaaccagtcctcagcccttactcgacataagatgattcatactggagagaaacccttccaatgtgaagagtgtggcaaagcttttaaccggtcttcacaccttactcaacataagataattcatactaaagagaaaccctacaaatgtgaagagtgtggaaaagcctttaaccggtcttcacaccttactaaacataagagaattcatactagagagaaggcctacaaatgtgatgaatattgcaaagcttttaactggtcctcagctcttactacccttactcagcataagataattcatactggagagaaaccctacaaatgtgaagagtgtggcaaagcctttaaccggtcttcataccttattcgacataagataattcatactggagagaaaccctacaaatgtgaagagtgtggcaaagcctttaaccagtcttcacaccttactcaacataaaataattcatactggggagaagccctacaaatgtgaagaatgtggcaaagcctttaaccggtcttcacacctttctcaacataagataattcatactggagagaaaccctacaaatgtgaagaatgtggcaagccttttaatcgtttctcataccttaccgtacataagagaattcatgctggagagaaccccaacaaatatgaagaatgtggcaaagcttgtaaccattcctcaaaccttactaaacataattcataatggagaaaaaccctacaaatgtgaagaatgtgtcaaagcttttaactggtcctcaatccttactaaacataagggggattcctaattggggaaaccctnccaatgtgaagaacgtgggcctggcttttaacaaattcctccacattttcctnaggccttaaaattaattcctggctgggngaggaaactccttgaaatggtgatgaatgttgggcatagcc

SEQ ID NO: 88558 - DNA, 374 bp, Homo sapiens
ctggaatccgggcaaagttccccaacaaaatcccggtggtagtggagcgctaccccagggagacgttcctgcccccgctggacaaaaccaagttcctggtcccgcaggagctgaccatgacccagttcctcagcatcatccggagccgcatggtcctgagagccacggaagccttttacttgctggtgaacaacaagagcctggtcagcatgagcgcaaccatggcagagatctacagagactacaaggatgaggatggcttcgtgtacatgacctacgcctcccaggagacatttggctgcctggagtcagcagcccccagggatgggagcagccttgaggacagacccttgcatcctctctagcccatgtcg

SEQ ID NO: 88559 - DNA, 657 bp, Homo sapiens
ttaagccccacagccttgtgcccttggagcgccgtttctgtccttcagtgggcacctctgttcagctcacgggattgtgctcgtctcgttagggacacacgcagtccacacagtgccgcgccacgtggctctgcagtgttggtgaacaggagttgcagggaactgaaagcccgggatcccagctggtaaagggagcctcagctaccgaccgagctgctgctctcatcttgagaacttctgattcccagccctgcggggaagacgtactggtatctgattgttcttacagaaactcaggatgaaaaccgaagaagaggcccggactcatacagagattgaaatgttccttagaaaggagcagcagaaacttgaggagaggctggagttctggatggagaaatacgataaggacacagaaatgaaacagaatgaactaaatgctctcaaagccacaaaggccagtgacttagcacaccttcaagacctggcaaagatgataagagagtatgaacaggtcatcattgaagatcgtatagaaaaggagaggagcaagaagaaggtaaaacaggatctcttggaattaaagagcgttataaagctccaggcctggtggcgaggcactatgatacggagagaaattggtggtttcaagatgcc

SEQ ID NO: 88560 - DNA, 1417 bp, Homo sapiens; identical to SEQ ID NO: 64147

SEQ ID NO: 88561 - DNA, 373 bp, Homo sapiens
acgattgccctttctttccctctctagttttcatgtattacttcgataacccgggtggccaaattccgtcctggctcattaactgggccgccaaggtgagatcccatgaggtggggcggggggagggatgggggagtgtcttcaacaaatttttacttatttcgcggacttatggggttgaacacacactttgattactgcgagacgtggctttttcactttatcttgacttggcgataactgtagggatgaggaatggggtatatcccaccccctctccactgaatattgagaattatcttattggttccggtctttacttgattttgctcaaaaaccctcacattatttactggcccttgtgaaaaagttg

SEQ ID NO: 88562 - DNA, 639 bp, Homo sapiens
caagccatctgcacgtgcaacatccaaacttggcagcccagacacagtttctcctagaaatcgccaaaaattagcaaaagagaagttacctaccagcgaaaaagttagtaactctcccccattaggaagatcaaagacacagctctccccttctatcaagcgcaagagagaagtcagccctcctggggcccgaacaagaggccagcaaagggtggaggaagcccctggggcccgaacaagaggccagcaaagggtggaggaagcccctgtgaaaaaagcgaagcgataatcctgaccactgctgccctaggcttatggaggaacacggtggagaggaaagagacatgccttggtggccataggcttctctttaaccaggaaaaagatatgcatgtgctgtaagtccctaggtgcaagctttttcttgttatgttttaaacagctttataaactattgttcatagaagatattatgtacatttatttcagataaaggacaataagtttactttgtatctgaactcaaaacaaagtagttgtatattttaacattcaaaattgggatttcccaatgtgacacatcatgaatgcaaacccctccagcccatcagacgccaggctgcctactggtaatctgtg

SEQ ID NO: 88563 - DNA, 3115 bp, Homo sapiens
ggtggtggaattcggtactccgagcactatgtcgtccccggcgtcgaccccgagccgccgcggcagccggcgtggaagggccacccccgcccagacgcctcggagtgaggatgccaggtcatctccctctcagagacgtagaggcgaggattccacctccacgggggagttgcagccgatgccaacctcgcctggagtggacctgcagagccctgctgcgcaggacgtgctgttttccagccctccccaaatgcattcttcagctatccctcttgactttgatgttagttcaccactgacatacggcactcccagctctcgggtagagggaaccccaagaagtggtgttaggggcacacctgtgagacagaggcctgacctgggctctgcacagaagggcctgcaagtggatctgcagtctgacggggcagcagcagaagatatagtggcaagtgagcagtctctaggccaaaaacttgtgatctggggaacagatgtaaatgtggcagcatgcaaagaaaactttcagagatttcttcagcgttttattgaccctctggctaaagaagaagaaaatgttggcatagatattactgaacctctatacatgcaacgacttggggagattaatgttattggtgagccatttttaaatgtgaactgtgaacacatcaaatcatttgacaaaaatttgtacagacaactcatctcttacccacaggaagttattccaacttttgacatggctgtcaatgaaatcttctttgaccgttaccctgactcaatcttagaacatcagattcaagtaagaccattcaacgcattgaagactaagaatatgagaaacctgaatccagaagacattgaccagctcatcaccatcagcggcatggtgatcaggacatcccagctgattcccgagatgcaggaggccttcttccagtgccaagtgtgtgcccacacgacccgggtggagatggaccgcggccgcattgcagagcccagtgtgtgcgggcgctgccacaccacccacagcatggcactcatccacaaccgctccctcttctctgacaagcagatgatcaagcttcaggagtctccggaagacatgcctgcagggcagacaccacacacagttatcctgtttgctcacaatgatctcgttgacaaggtccagcctggggacagagtgaatgttacaggcatctatcgagctgtgcctattcgagtcaatccaagagtgagtaatgtgaagtctgtctacaaaacccacattgatgtcattcattatcggaaaacggatgcaaaacgtctgcatggccttgatgaagaagcagaacagaaacttttttcagagaaacgtgtggaattgcttaaggaactttccaggaaaccagacatttatgagaggcttgcttcagccttggctccaagcatttatgaacatgaagatataaagaagggaattttgcttcagctctttggcgggacaaggaaggattttagtcacactggaaggggcaaatttcgggctgagatcaacatcttgctgtgtggcgaccctggtaccagcaagtcccagctgctgcagtacgtgtacaacctcgtccccaggggccagtacacgtctgggaagggctccagtgcagttggcctcactgcgtacgtaatgaaagaccctgagacaaggcagctggtcctgcagacaggtgctcttgtcctgagtgacaacggcatctgctgtatcgatgagttcgacaagatgaatgaaagtacaagatcggtattgcatgaagtcatggaacagcagactctgtccattgcaaaggctgggatcatctgtcagctcaatgcgcgcacctctgtcctggcagcagcaaatcccattgagtctcagtggaatcctaaaaaaacaaccattgaaaacatccagctgcctcatactttattatcaaggtttgatttgatcttcctcatgctggaccctcaggacgaagcctatgacaggcgtctggctcaccacctggtcgcactgtactaccagagcgaggagcaggcagaggaggagctcctggacatggcggtgctaaaggactacattgcctacgcgcacagcaccatcatgccgcggctaagtgaggaagccagccaggctctcatcgaggcttatgtagacatgaggaagattggcagtagccggggaatggtttctgcataccctcgacagctagagtcattaatccgcttagcagaagcccatgctaaagtaagattgtctaacaaagttgaagccattgatgtggaagaggccaaacgcctccatcgggaagctctgaagcagtctgcaactgatccccggactggcatcgtggacatatctattcttactacggggatgagtgccacctctcgtaaacggaaagaagaattagctgaagcattgaaaaagcttattttatctaagggcaaaacaccagctctaaaataccagcaactttttgaagatattcggggacaatctgacatagcaattactaaagatatgtttgaagaagcactgcgtgccctggcagatgatgatttcctgacagtgactgggaagaccgtgcgcttgctctgaagccttgtgagcaaggaaggctccctgcatgtcctgcttgctgcacgccacatgggtgtggtctgcatctcagttggccgccatcagtgtaaatagagcttaaagtcatggtttggctgcataaaaattttctaacttgggttcaatatttgtagtgaagtatctgttttcatttttttcacgttataaataaaaatactatgctggccgggcgcggtggctcacacctgtaatcccagcactttgggaggccaatgtgggtggatcatgaggtcaggagttcaagaccagcctagccaagatggtgaaaccccgtctctagtaaagataacaaaaaattagctgggcttgatggcatgcgcctgtaatcccagctactcgggaggttgaggcaggagaatcgcttaaacccaggcggcagaggttgcagtgagccaagatcgcgccactgcactccagcctcagcaatagagtgagactgtctcaaaaaaaaaa

SEQ ID NO: 88564 - DNA, 374 bp, Homo sapiens
ggcacgaggtcctctgtagctttgcataattctattcaaacagctcagtatgtggagaactggacacgcacagtcaaccaagggtggctacttgagaataaaattaacactgagttacaaactgaagtggcagtgttataatccacgattctatggttaggggaacaagtacaaagcttgcaattgcagcagaaattgtgttggcattttaatcacactcatatttgtgtaaccaacttaaaatataaccaaagtgagtatccatgggatcttgtgaaagcccatttgcagggagctttcacatccgacatcacctttgatattggtgaattacaaaacaaaattcttgatttaaataaacaaattccagagtt

SEQ ID NO: 88565 - DNA, 2566 bp, Homo sapiens
ccggaaaagaagtttgaaagagaatgtagagaggcagaaaaggcacaacagagttatgaaagattggataatgatactaatgcaaccaaggcagatgttgaaaaggccaaacagcagttgaatctgcgtacgcatatggccgatgaaaataaaaatgaatatgctgcacaattacaaaactttaatggagaacaacataaacatttttatgtagtgattcctcagatttacaagcaactacaagaaatggacgaacgaaggactattaaactcagtgagtgttacagaggatttgctgactcagaacgcaaagttattcccatcatttcaaaatgtttggaaggaatgattcttgcagcaaaatcagttgatgaaagaagagactctcaaatggtggtagactccttcaaatctggttttgaacctccaggagactttccatttgaagattacagtcaacatatatatagaaccatttctgatgggactatcagtgcatccaaacaggagagtgggaagatggatgccaaaaccacagtaggaaaggccaagggcaaattgtggctctttggaaagaagccaaagggcccagcactagaagatttcagtcatctgccaccagaacagagacgtaaaaaactacagcagcgcattgatgaacttaacagagaactacagaaagaatcagaccaaaaagatgcactcaacaaaatgaaagatgtatatgagaagaatccacaaatgggggatccagggagtttgcagcctaaattagcagagaccatgaataacattgaccgcctacgaatggaaatccataagaatgaggcttggctctctgaagtcgaaggcaaaacaggtgggagaggagacagaagacatagcagtgacataaatcatcttgtaacacagggacgagaaagtcctgagggaagttacactgatgatgcaaaccaggaagtccgtgggccaccccagcagcatggtcaccacaatgagtttgatgatgaatttgaggatgatgatcccttgcctgctattggacactgcaaagctatctacccttttgatggacataatgaaggtactctagcaatgaaagaaggtgaagttctctacattatagaggaggacaaaggtgacggatggacaagagctcggagacagaacggtgaagaaggctacgttcccacgtcatacatagatgtaactctagagaaaaacagtaaaggttcctgaagagggtttctgaggaaatgggcaagatgttgaaggaggttacatgcagctgcttttgggggagggtattagagttgtcaggctcaaagagagtgagagaagcaagttgcatgagtgcatgcagacatgattttttttttactaacttcattagcatttccatacattgtttttaaaaatcataataccaacccttaagttcctagttcacagttattcccacaaaagaaaaagccaacaatagtgtaccatttttctatttattttattgctgtctaatcaataaagaatgcagagctgtcaaaaaatgtgtcttacattagctgtcccaacaggattgtcttccctcccagctctgttttaattggcttttagacccactatctgtcagatccttgccatctgtcagtgtctgcctgcgccacctccgtgcttgcttaacatcctgttgcatgtctagcgtgattgagctagatttttcaggcatgtctttagattcccttgttcttgtcaaagccttgttttgttttacatttgtagtgcaaatcactttgtcaaacatctccagcactaatgtttccatcttagtatttgtgcacactgctataacttccccactgcaaacattccagttttggcattacgaagaagtagctgtgaacctgaagtatttatgataagaaaaagaaaacatctctgctgtagcctacagcccagttgaaagaactctttgaaacgtgatacatcttcagcacctcagtctgggaagaatctagtcagcactgaaatcctggcataataaacacagaagatattcaccacctcaagacaaaggactattgtcaaaagtcagctgcttccattcaaatgctgccttaaacttgagtgcctaaatctgttgattgccaacactaccactacagtatcccacaaagggctttatgtgtcagctcagtgcgacctgctttaactctgcagcaccgctgcagctgccgatgtagcctcggtaggtggctattagagctctaccatatacaggggggcatcttcaaatttatgcatcaaactaaagacatgtccaagtccattttaatttcctcagtggttttatgagaagttttatgggcctcccccaattgtctttttattttgggttatgacgatcatgtttgataattacaatgatagtctctttccacgtgatgcttttgtttgaacctgataaaatttagtgaaactttgtaatgatctatgtgcacttttacttgtaaaatggaatttctgtatgtttatactagaaaatatgattgttgttagtgctcctgtt

SEQ ID NO: 88566 - DNA, 1997 bp, Homo sapiens
tttgaaaaccggagaaactaggacatcctacgccatcttggcacgaggatctgagtttaaaataaaaacatggttcatagactggctactctttttcatgagaagccagcatttggaattttgttgctgctatgacaggcatgcaaagcccaggcttcgctgattcagtctgttcagtagcaaactgtgtgtgaatcacggatgtgaactgggaaggggaaggcagcagggtctctcaggtcgagtcaacttctaacctgtctcctattctgtttcttcccacaaatctccctctcgcctcacagtgggatgccttctccatccctgaacttcagaacttcctaacaatcctggaaaaagaggagcaggacaaaatccaacaagtgcaaaagaagtatgacaagtttaggcagaaactggaggaggccttaagagaatcccagggcaaacctgggtaaccggtcctgcttcctctcctcctggtgcattcagatttatttgtattattaattattattttgcaacagacactttttctcaggacatctctggcaggtgcatttgtgcctgcccagcagttccagctgtggcaaaagtctcttccatggacaagtgtttgcacgggggttcagctgtgcccgcccccaggctgtgccccaccacagattctgccaaggatcagaactcatgtgaaacaaacagctgacgtcctctctcgatctgcaagcctttcaccaaccaaatagttgcctctctcgtcaccaaactggaacctcacaccagccggcaaaggaaggaagaaaggttttagagctgtgtgttctttctctggcattgattcctctttgagttctcttacttgccacgtacaggaccattatttatgagtgaaaagttgtagcacattccttttgcaggtctgagctaagcccctgaaagcagggtaatgctcataaaaggactgttcccgcggccccaaggtgcctgttgttcacacttaagggaagtttataaagctactggccccagatgctcagggtaaggagcaccaaagctgaggctggctcagagatctccagagaagctgcagcctgccctggccctggctctggccctggcccacattgcacatggaaacccaaaggcatatatctgcgtatgtgtggtacttagtcacatctttgtcaacaaactgttcgtttttaagttacaaatttgaatttaatgttgtcatcatcgtcatgtgtttccccaaagggaagccagtcattgaccatttaaaaagtctcctgctaagtatggaaatcagacagtaagagaaagccaaaaagcaatgcagagaaaggtgtccaagctgtcttcagccttccccagctaaagagcagaggagggcctgggctacttgggttccccatcggcctccagcactgcctccctcctcccactgcgactctgggatctccaggtgctgcccaaggagttgccttgattacagagaggggagcctccaattcggccaacttggagtcctttctgttttgaagcatgggccagacccggcactgcgctcggagagccggtgggcctggcctccccgtcgacctcagtgcctttttgttttcagagagaaataggagtagggcgagtttgcctgaagctctgctgctggcttctcctgccaggaagtgaacaatggcggcggtgtgggagacaaggccaggagagcccgcgttcagtatgggttgagggtcacagacctccctcccatctgggtgcctgagttttgactccaatcagtgataccagaccacattgacagggaggatcaaattcctgacttacatttgcactggcttcttgtttaggctgaatcctaaaataaattagtcaaaaaattccaacaagtagccaggactgcagagacactccagtgcagagggagaaggacttgtaattttcaaagcagggctggttttccaacccagcctctgagaaac

SEQ ID NO: 88567 - DNA, 2002 bp, Homo sapiens
aacagaataaaagagaatgtaacatcatgcttccgagatgaggatgacatcaatgatgtgacttctatggcaggggtcaaccttaatgaagaaaatgcctgcatcttagcaacaaactctgaattggttggcacactcattcagtcatgtaaagatgaaccatttctttttattggagctctacaaaagagaattttagacattggtaaaaagcatgacattacagaacttaactctgatgctgtgaacttgatctcccaagcaacacaggaacgactacgaggccttctagaaaaactgactgcaattgctcagcatcgaatgactacttacaaggcaagtgaaaattacatcctgtgtagtgataccaggtcacagctcaaatttcttgaaaagctggatcaattggagaagcagagaaaggatttggaagaaagagaaatgttacttaaggcagccaagagtcgttctaataaagaagatccagaacagctgagattaaagcagaaagccaaagagttacagcaattggaacttgcacagatacagcatagagacgctaatctcacagctcttgcagctattggaccaaggaagaagagaccactagaatctggaattgagggcttaaaagacaaccttcttgcttctgggacatccagcctgacagccaccaaacagttgcatcgtccaagaatcacgagaatctgcctcagggacttgatattttgtatggaacaggaacgggagatgaagtattctcgagctctatacctggcccttctgaagtgaccactccactcttccatccagatccttgctatttactgccaaagaagacacaaagcattgttgcactgtcctgaaatttcaatttctggaaaataatcaccaacatgaaagagcattgtttacagttagaaactttattaactcttacctatccatctcatgggactcttacagactcagattcatctttgtcttctgaaaatcagttatgaaatacactttgcacagaattaggcatctgcctatctgtgcattaaattaaagcaagttaaggccctatttgttactacctgcctcatttgccaaattgtagcaggtgaggtgtccttccctaatacagcatgcattgagatgcaggagaaaggaagaggcataagaaaatacaagaatgactatttcattctatattgaacctgtcccaaagtggtaggttttctgggctggaatcagaagttgcttagctaactatgacagtcaccctctgtacgtgacaggccactgtggtgactttggtcggctgagttccagtgttgtcaaaacaagacaaatggggatagattgtgcctggggttgctaattctctgcttcatatcaccatatgccgtttctggtaccaagtgaggggacatgcttgtcagggaaaccttaaaattgaatctactgatatatcttgttgaaaaaatggaaaaggtgcaaagtattagaaggaacgttagggcgttgctttcaaactgatgaggggaatgtgaaaatggtatcataaaacaggaaatgtgcttcatatgcccaagaggggaagaggtggaatcggaactccaaaacaactggtacatgttttgttgatgggcaaaaaaaatcacagcacaaccagaaaggagaatgtaccagatgttttcaaattagagtatttcaaaaggaaaatgttattttttgttttgtattgttttaaatcccaaggatagtttttatatttccttctgtcataatatattttagttatcctaatttttaagcatgttggcacatttaaaaaatcctaattgatgatgagaaatttttaacaataggactttatgttggattctgtacttaaaaggtactgtcaatatctcactcttggggatatgagctctaaatatgagaagcaagttatatgtgttcacctgaggaagaagctgacggacaaagcaaaccctctttaaaaaaaaaa

SEQ ID NO: 88568 - DNA, 2628 bp, Homo sapiens
cccacgcgtccgggccaaaacagtttgtgccaccagatcactgcggcctgcaagcatggtggagacttgtatgtggtgggagggtccatcccacggcgcatgtggaagtgcaacaatgccaccgttgactgggagtggtgtgctcctttgcctcgggaccggctccagcacaccctggtgtctgtgcccgggaaagatgccatatattcactgggtggcaagacactgcaagataccctctccaacgcagtcatttattatcgcgtaggtgataatgtgtggacagagacaactcagctagaggtggctgtgtcaggggctgctggtgccaacctcaacgggatcatctacttactagggggggaggagaatgatctggacttctttaccaaaccttcccgactcatccagtgctttgacacagagacagacaaatgccatgtgaagccctatgtgctgccctttgcaggccgcatgcacgcagctgtgcataaagatctggtgttcatcgtggctgaaggggactccctggtgtgctacaatcccttgctagacagcttcacccggctttgccttcctgaggcctggagctctgccccatccctctggaagattgccagctgtaacgggagcatctatgtcttccgggaccgatataaaaagggggatgccaacacctacaagcttgaccctgccacttcagccgtaactgtcacaagaggtattaaggtgctgcttaccaatttgcagtttgtgttggcctaaggctgtggggaggggaggagaactgctcactccttttccctccccatacaaactcaaagtcccctgggccccaattcagagttatgttttttttggcacatactagaaaggcagtgcctcagcccttccctgaatccatggaggtgttctgtttggggctttttagactgctgctgctcagctggttgcttgaactgacagtaggccagcctgttctctgccattccctagtcatcctgtgcctcaccacagcttgcttagagcaagccttttctcagaccttaggcacagcctctcctctttacctgatcaatgttaaatgtaagcacccctgatcccaggacataaggaaagatgcccaattgtacttttgttctatagcctgtgaaatggctagttgatcatttttccacaaagaattaggtgttaagagttttccttcaggctttacttaggagaatggactaagctgaaggtgtacttcaccagcaagagtcaactctagaattcaggatgttccttctattgttttcttagccatctgtcaggaaatgtaactttggttttatttttggcttattccaaggggtaagccagaaaatagaaatgattatttctgattaatagcagaaactttttcaatctcaaatatataaggtgtctgctcttttaaaagctctaagctaagtcaagagctaggaactgttgatacaaataaaagtttttgaagggatatgtgtgtctgtgttgaattccaaaggggtgactttgaaggggtgagggtgtttcattccctcaggggaactcattacgtaccatcacatggctcagtctgcagcagtcctgactgcagcccatgctcccacttctccagataggatccctactccacagggccagtgagattcagattctgacagtggcaaagagccagaggtgagtctccttttttcaagtgctaaatgttttttgagttgtggtgctaaatattattaggcacaatattaggtacataatagatttttgttaaaatacttctttagccctattcaagaaaagatgatagccccatccctgtcctgtatcccatgaatacaagccacactaaatcttttcctttctagccacacaacagtgttatttcaagaaaacaaaacaagtcagagaaagaaaaattacctattacctattggcacatttctgttacgtcaagtctgggcttaagccctgttggtcctgttaagctctttttgttctgtatcaagcaggagtgtcttgagttctttctaatccccatacatcatgtctttgaaatgacaaaagtcccatcctttgttgcccgtgcagtaatctgcttgtggaactctttaagaacatccagctggccaggcctgatgtggatgtatgaccggatcttggcgatggctcttacagcctcctctggactccatttgtgcacctgtgaagagttgcacaggaacctcgtctcgtactcctcgttcatggtgatcaccccgcgcacgttctcgtcctgtaccagctgccgaggcaaagaggtggctcagcaaagacggtggagaccccagcggcccgacagggacggagcggcggggacggggcaggggcccgggctccccggcccggctcacctggcgcgtcaagctccgcaacggcagcgcgcccagcagcacggtggggtcgatgcggtggtaccagtcccggtgcgcccgacccggcaccttcccgcggaacagggtgtagagcagcgtcgggtagaagagcacccgcgccaggccggcctccagcagcgcggtggccgccatcccggcccggcgcagcggcgtcccgtgaattccaccaacg

SEQ ID NO: 88569 - DNA, 376 bp, Homo sapiens
cccttaagtgggaacgtctaaaggcccagattatcagaaggcgcccagaatcttgtcatgggttccatcctgaggagaatgcgagggagtgggggggtgcgccgagtctccaagcccagacgggcctccttctgctccctctgattttgatgctctcctcatggggaccctgactgagaagatcccttggcaggcgtatttcatggcaaaacagtctacgaaattttggactctggttccaggcctgaaattagcaagagcgctgggacctgtttgagaatcaaagctgggctgaggatgcttgcctgtggcaccagatgccttacagtggccaggagtgctgcgggacagtctactttgattgatttctttcctt

SEQ ID NO: 88570 - DNA, 381 bp, Homo sapiens
ttgggtattctccagtccaattacagctcgtgatgcgttgggtattaaacacaccatggtgaagattcgtcccttgtcacaggccacaagagcagccaaggccaaagctagagcttatgctgagttcctccagccagcaaaggagcgtcctgagacttcagcagccctagccagaaggttagtcatcagtgcccttggggttcgaagtaagcagagcaaaaccgaacgagaagcagagctcaagaaactgcaagaagccagagagagaaagcggttggaagccaagcaacgggaagacatctgggaaggcagagaccagtctacagtttgaacatcactcaatgaaagggataattccatgaatcagaaaatgtttccatt

SEQ ID NO: 88571 - DNA, 1051 bp, Homo sapiens
cagttccagtaagctcaaattttgtgagtcagaatattacccctgttaatgaatcagtggtttcttcagcaagagcagtaaatgtgctttcagttaccggagcaaatttatctttgggttcctttccagggacctcagcctctgcttcagctggggcacaacctcctgttttagtcagtggaaatgatacctcttcaagaattatgcctattttgtcaaatagactttgctcatcaagtctcggaaacactgtggctatatcaactgtgaaaacaggacaccttgcatcatctgttctgatttcaactacacaaccagtagtgtctcctaaatgtttaacatcagctttgcaaattcctgttacggttgccttacctacacctgcgactacatcccctaaaataataaacacagttccacattcggcagcagtaccaggagccacacgttctgtatctatttctaaaagacaatctcggacttcactccagttccattcaccagggatttcaactacagtgccaacaaatgtaaacacaaataaacctcaaactgaattgtcgtccctttcaacaagtccaggtaaaataactaatacgtccaattttgcttctctgccaaatcagcaagctttagtaaaaacccccagttacagttctgctccaggtggcactaccattcacacggcttcggcaccatccaatgtaactagtctagtcgggagtcagttcagtgaaccttgtattcagcaaaaaatagtcatcaataccagtacacctttggcacctggtactcagattatgattaacggaacccggtttattgttccaccacaaggtcttggagctggcagccatgttctccttatatctactaatccaaaatatggagcccccttagttcttaacagtgggccaaggcattcaatctacaccaatagataactctgcccagaagatcacactaggcattcaaataattccttaagtgggccaacctcttacaacatccttcttaaggaaggccctacaaaatttattaaactcttttg

SEQ ID NO: 88572 - DNA, 401 bp, Homo sapiens
agaggaggaggaggtagacagtgaaaataaaaggctggatacggagcccgaaacgattcgagatgaagagaacactgtggaccactccatggtccattgttcggtggatgggaatatggatgccaaatcataccacgagggagacaatatggtagatgggatgttataaactactggattgtaagcttcctatttttttttgcaggggtattgttacctgcttgaaaacactgctgtgttaagctgttcatgcacgtgcctgacgcttccctgaagctgtagagagggacagaaggggcggttccccccttacagatgtagacggagtgggagctgggtattgttaaaaactgcattatgcaaaaattttgttcagggttaaggcctataaactgtgtggt

SEQ ID NO: 88573 - DNA, 1840 bp, Homo sapiens
  misc_feature (1)...(1840): n = a,t,c or g
cactgaattaatgaatgcagtagaaattcaattatttgcattctgattatgtgactttcatttagtcagacttgaattattcgcgtttaaattatctagctaaaaaaatacccaactgcactccaaatggctaattaaaagtccaaatttcctgtctctctttgtgactggagataattaaagttctcctctgttactcaggctttgagtgtgttgtgaaaaccaatttcctctttttattattttccccctctcttcttttccagttcatcctctgggcttggacacagtagtgatgacagcagttcacatggatgtaaagtaaatacagctccgcaggaatcctgaaaaataattctaatgttactatcttaggaatagcaaattatgtccagtcatagagaagaaagcttcataataatacattcttacctaaagctcactgtcatgatgttaggtatttaaattcttaaagatgttgggttgtttattagtggtatttttatgttgtcttattttaggtaagcttctgtgtaaagctaaaaatcctgtgaatacaatactatcctttacaggcagacattattggtaaacaagatcttgccctccaatgaaatgacttacatgttttaaaaaaccgagttggttttattgaatttaaaaagataggtaactaagtagcatttaaaatcaagatagagcattccttcttgtatcagtggggcagtgttaccataaacacggtgtatatgttgttaaaccctatgaagagtaacagtgtagaccagactgcctctctcagatatgtgcctgatattttgtggatacctcccctgcactggcaaaacactatgcttttgggtgttagactgaaatattttaagagtatttaacctttccagtattctgtttcacgcttagatggaaatgtatcttatgaatagagacatattaaaataatgtttacatcttagaaaaaacatagatagtgctagtaatattacttataactgtaatatatagattcagaaatacattttcattatccaaaatcagcttcaacaaatggtttctggagacaaataatttgttttcattatcattgtataatcaggttaatgatttattttttgactaaatgtgcaatttcttatcactagataactttcagtatcagtggtggttacttattacttaaatcagaggaaggattttataaagattaataaatttaattttaccaataaatattcccataatttagaaaaggatgtcgacttgctaatttcagaaataattattcatttttaaaaagccccttttaaagcatctacttgaagattggtataattttcataaaatgtctttttttttagtgtcccaaagatatcttagataaactattttgaagttcagatttcagatgaggcaacattttcttgagataattacccaagtttcatccatgttgaatggtacaaaatatttctgtgaaactaacaggaagatattttcagataactaggataacttgttgctttgttacccagcctaattgaagagtggcagaggctactacaaaaagcaaccttttcattttcactaagagtttaaaagctattgtattattaaaaagtctttacaatgcttgtttcaaagaaccaacagaaaaaaaagctaagaaaactgaggaactaacattaaaaaaattaaatttagaataaggaatgatttctttaaatttgtcctttttttctttgggtctaaaacattatttaaatttttgtnaaatattttggattttaatgtgtcttagggtcccgccttnttttnattaccg

SEQ ID NO: 88574 - DNA, 1236 bp, Homo sapiens
  misc_feature (1)...(1236): n = a,t,c or g
ctggggtgaatgcacgtcagtggaggcagaatcattctgtctgaatgaatggagtttccaggcccccactggccctctgtgtgagggtctgcagggtttggcaggacaggtctttctctccggcgagagcacccaccctgaccggctgctggatgagggcaccaaagctcgctagggagggctctgtccttagggaggagctgcggaatccctgcagctgtgcccccaggccctgccttgcacacttcctgcagccagggcgcccctggggaggtcagggcaggccggggaggctgaggcccacctgccatagtgngcaggtgcgggagccagggcggcagtggcctcggggctgggtggggcgcctggcctctggtctctggagtagtcaggggctctgcagatgctgagaggcctgctcatagtggactgggagatgctggagcagcctcagagccatggccggcccacggcgggagacggccctgctgctgcccctctgcctgtgcgtgtgcacctgtgggcacctgcgtgtgctggggcaggcagggctgtattgggaccaggtcccgtaacagcctgcctgcttaccgtctgctcccatccctgggggaaagcaagggagctcggggtcctaggacctgacctcagcgctcacccccaccagcaccacagtcagcaggactctgtgactcagtttaccccacgagagcccctgggattcccagggcatcagaaggcccatcagcctcccgtgaactgctggggtgggcctggccttgggacgcgggtgcaggggcctctcctcactgcccccatggcacctacagccagtgcccgagcctgctgcagccccgacccggcagagcaagcggctctgctacctcagccacgtagctgatggcatccttcaggttcagctcgtggaagacattcaggatccggtctcgagacttctgggccgaccgtctcatgaggaccctgctgaggaacttcctgtcgaagtgggaccacctgtagggacagaccttgggtgtgagcctcaggtgacaggcgccctagagcccgccggacgcgtggcccggccccttctctcctgaattttgttttgttatagtggaccctgttagggcggcgtttaaaaattgaggggaaggcaggcccttgccaacacggcccagggccgttccgcctttcttnccgcttgttcntgtttgggatggganggcctttaga

SEQ ID NO: 88575 - DNA, 1636 bp, Homo sapiens
acatctatgatcgagatccactccagcttgccacgagggccggccaaccacttgatatcaacatggcaggagagcccaaaccatacagaccaaaacctggaaacaagaggcccctttctgcactttacagacttgaatcaaaggaacctttcctgtctgttggcgggtatgtctttgactatgattactacagagatgatttctacaatcggttatttgattaccacgggcgtgtgcctccacctccccgtgcagtaattccgctgaagcgtcccagagtggcagtcacaacgactcgcagggggaaaggagtcttttccatgaaaggtggatcgagatctactgccagtgggtcaacaggttctaaattgaaatcagatgagttacagaccatcaagaaagaattaacccagatcaaaactaaaattgactccgtgctagggcgcctggacaagattgagaaacagcagaaggcggaggcagaagctcagaagaagctattggaagagagtctagtgctgatccaagaggaatgtgtgtcagagattgcagatcactctacagaggagcctgctgaaggagggccagatgccgatggagaagagatgacagatgggatagaggaggccttcgatgaagatgggggtcatgagctgtttctacagataaagtgatcttgaaattaacgcatgatgccacaaagcaggaaaagaggaaactgttgacaacccccaggaatgttgaaagggaggttttctttactgggacagcagcatctttggttcaatttatataaaaacccaaatttataaaatggacagtattgctcagttttagaaattccatttcttctatgttttaagctgtacaattgtcaggtttttatggtttaaattgtaaatgggttttcccctttgctaattatgttttttttttcagccttaaaatgtgaaaggcatttatgaatggtaagggaaacactatatacaaatgtatatttgtaaaagctatttttatgattagcatgtttcactgttgatcatatataaagtcaggggattttgcaattctgtatttaaagcttatttccaacaatgtcatgtaagaaaagatgcatcttatgctagtttttataatttatttataatttatagtttaaagtacttcagatcataatgataaaatacttgaaaaagttatatttctgccctgtataagcaccctttttattaataaagaatgccagatatttccagatgtggatataatagttaaaagaactgttggtttgatctgtgattaagttgagcaatcgcccgctctactgaaactaaaatgatcccaattattacttcagtctgggtatgagattccattggacaagtaaggactagattgccaaggaaaagactgtccttgcccttggatcccaaaagtttaaattagtgcatacatccatgtcatttcacctcctgttcctaggaactctccattcccaagcattgccagtgttttccagataatcttagctgttgtcttgtgctgtggaaatggaagaaaccatcttcacagactgtaggagaattcaacatataatttcttaataaatactgtttcttttaaaacaaaaaaaaaa

SEQ ID NO: 88576 - DNA, 2564 bp, Homo sapiens
cataaatcccgtcagtagtgcggtaaatggagaagctcattcatctcatgagactagagggcagaacagtaatgcccttccttctgtacttctcgagcttctcagtcagtcctgcctcatcccagccatgtcatcttatctacgaaatgattcagttctggacatggcaagacatgtgccactctatcgggcactgctggaattgcttcgggccattgcttcttgtgctgccatggtgcccctattgttgcccctttctacagagaacggtgaagaggaagaagaacagtcagaatgtcaaacttctgttggtacattgttagccaaaatgaagacctgtgttgatacctataccaaccgtttaagatctaaaagggaaaatgttaaaacaggagtaaaaccagatgcgtctgatcaagaaccagaaggacttactcttttggtaccagacatccaaaagactgctgagatagtttatgcagccaccaccagtttgcggcaagcaaatcaggaaaaaaaactgggtgaatactccaagaaggcggctatgaaacccaaacctttgtcagtattaaagtcacttgaagaaaaatatgtggctgttatgaagaaattacagtttgatacgtttgaaatggtttctgaagatgaagatgggaaattgggatttaaagtaaattaccactacatgtctcaggtgaaaaatgctaatgatgcgaacagtgctgccagagctcgccgccttgcccaggaagctgtgacgctttcaacctcactgcctctgtcttcatcctctagtgtgtttgtacgctgtgatgaggagcgacttgatatcatgaaggttctaataactggtccagcggacaccccttatgcaaatggctgctttgagtttgatgtgtattttcctcaagattatcccagttcaccccctcttgtgaatctagagacaactggtggtcatagcgtgcgattcaatccaaacctttataatgatggcaaggtttgtttaagcatcttaaacacgtggcatggaagaccagaagagaagtggaatcctcagacctcaagctttttgcaagtgttggtgtctgtccagtcccttatattagtagctgagccttattttaatgaaccgggatatgaacggtctagaggcactcccagtggcacacagagttctcgagaatatgatggaaacattcgacaagcaacagttaagtgggcaatgctagaacaaatcagaaacccttcaccatgttttaaagaggtaatacacaaacatttttacttgaaaagagttgagataatggcccaatgtgaggagtggattgcggatatccagcagtacagcagtgataagcgggtaggcaggactatgtctcaccatgcagcagctctcaagcgtcacactgctcagctccgcgaagagttgctgaaacttccctgccctgaaggcttggatcctgacactgacgatgccccagaggtgtgcagagccacaacaggtgctgaggagactctaatgcatgatcaggttaaacccagcagcagcaaagaactccccagtgacttccagttatgagctgcattgatgtggacttcatagacacaaaggcttcgaagcacaagccaaatatgtcaatatttgtatgtaagaaactaattatgtaataggtaatgaaactgaaactatactatgcccttaaggagatccagtttaattcaaggtgatcttttatttacctgtacaggagtgtaaacttttttgtgcttttatttttcaattgtgagaaccactgattggtatgttcaacaaatttgtgtatacaaagaaatggataaatcactgctatataagggaaactaccttaggaaagaatgtttactgaatgtttattttattttattttttttttactatagagtgaggggttgttaacaaagaatatatattggtcattcttacaactactatttaaagtcagcaacttttcactgaatttgatagattttatgtttggccatatcttcatgctcacatttgatttctgaagacctcctacatacacttcaataaaagttaaatggacatactccctcttttttgatttactggtacatttttaaaataataaatctgccataaaatgcattatatctggagacttgcacttgtatggatgaatttattacattcaacatatttaattttatgccttctaattctaagatgcagaaaaaaataaatgaacatgattttattctatgccaacatttgggcctctgaatgtatctgttatttgaatttaagtatttgaaaaggaatggtcaatttgaaagtcattctaaactgattttttttttctaaagggctccttttttcctggactatgtggttttatgactaaagtcacatgtatgtattaaacattgaggctctgtagaggagagaggatgtacctctctggtgctgttacagtacattctgtacctgccatacaggctcattttcatgcaaattcttcctagagccaaataaataaagacttaggtgaattagt

SEQ ID NO: 88577 - DNA, 366 bp, Homo sapiens
gtgctgtacgggggaggcaggtgttgctcggagccccagcctctgttcctatgcaggcagggccatcaggcaccagaaggattatgccagcatattgctcctggaccagcgatatgcccggccccctgtcctggccaagctgccggcctggatccgagcccgtgtggaggacaaatctacctttggtcccggcattgatggtgtgcagaaggccatgcctaccttcttctttttgagagcctccccaccccgagatcacatttgtcactgtcttctgtctgcccagactcaccgagagaagtcggcctcttcctgatgggcaaccacaccactgcctgtcgccgtgcccttcctttgtcctgcccg

SEQ ID NO: 88578 - DNA, 2937 bp, Homo sapiens
  misc_feature (1)...(2937): n = a,t,c or g
ctgggcagctgttgtcgcgtggcgggcggccgggcggcggcgctgcggggaccgggtgcgggaggccccgccgcgcggccccggctgggcggtgacggtggcggccggcggcacctggggcaggggcagccgcgcagacgtctggcgggctgtggcagccgcgcggacggcggcttccgcccctcccgggtggtggtggtggccaaaaccacccggtacgagttcgagcagcagcggtaccgttacgcggagctctcggaggaggacctgaagcagctgcttgcattgaaaggctctagttacagtggacttcttgaacgacatcatattcacaccaaaaatgtagaacatattatagatagtttacggaatgagggaattgaggttcgtctagtaaagaggagagaatatgatgaagagactgttcgatgggcagatgctgtcatagctgcaggaggtgatggcacaatgctgctggcagcgagtaaagtcttggacagacttaaaccagttataggggtaaacactgatccagaacggtctgagggtcatttatgcctgcccgttcgatatacacattcctttccagaagccttacagaagttctatcgtggtgagttcaggtggttgtggaggcagagaatcaggttataccttgaagggactggcataaaccctgtacctgtggaccttcacgagcagcagctaagcttgaatcagcacaatagagcccttaacattgaaagagctcatgatgaaaggtctgaggcttcaggaccccaacttctgccagtgagagcactaaatgaagtcttcattggggagagtctgtcatccagggcttcctactatgagatttcagttgatgatggtccatgggaaaaacagaagagttcagggctcaatttgtgtactggaacaggatcaaaggcctggtcattcaatattaacagggttgcaactcaggctgtagaagatgttttaaatattgcaaaacgacaaggaaatttgagtcttccattgaacagagaattggtagagaaagtaacaaatgaatataatgaatcactgctctacagtccggaagaaccaaaaatacttttcagtattcgagaaccaatagcaaatagagttttctcaagcagtcgtcagcgttgtttctcctcaaaggtttgtgttcgttctcgttgttgggatgcctgtatggttgtggatggaggaacttcttttgagtttaatgatggtgcaattgcttcgatgatgatcaataaagaagatgagcttcgaactgtgcttcttgaacagtgaaggatttcctcatgacaaattttgattactggcgagaatatttttacttcagaaacagactaccagtcgtaaagtgacattttttggttattgttgagactgcttgcccgtgggctcagaagtgagatttgcattattcttctgttggattctgatagaaaaaaagacattcactgtataagaaaatggatggactgaaccaattagaattgataccagtgaaatttttatattgcttacaattggtaaccaagagtgctgatacctttttaaatttagaggggcaggcttaaataaaggactaaatatttaggatttgaaacttaactgtataagtgtgttttccttccctttcctcctaattgggggattgtcagaactgaacacatatcatttgattagtgcatattttttatagtacctgaaaaccaagattttgaaaaaattttcaagacagagaattttgataaatcctgacattgacctaattgacataggtaaatatgtttgtatatgtgctaataattttctaatttcggaacacgatgatgttatgactattgatttaaaaatttcaaataataatttttgaaattatagatgaatgctttcatttgagtttcattctgtaattcagcagttctgggtgaaatacagatagcaaaacaaatcatgatgctgttacaaatgtattagttatccaataagtgttttaagtcaatttttttaaaatgatatgagtcttacaggtttcttccatctttaaaatgctcaaacatggattcagggactaaaaggatgaactgattagacattttctattaggagtttggtaaaatattgtaaaaatatcttcacctgtgttaggagtattatcagaaagaatggattctttaataaatatgtaaaacacagtagttttggaattgccttccttagtattgtggttttcacctagcttatattccaagatttacagaatagcttttaggataagatgttaggactttttttttttccccatgagaattcctttatttttggaggaaattattatctaattattgatctacttataagtaatcctagaatttttgccaaaagatcctgtcgttgcataatcaaacagttggtattctcgtgccgttgttcaaagtcatgtgtttctttcatttggtgctgaaaaatttctgttcaatcattgacaaatatttattgaacaacccactctgtgccatgttaaactatgtcaggtgctggatatgttgatgaatgaaacagactctatccttatacaatttgagtcttgtgggctcagaagtaaattctgtgaaagctggacggatagtcgaattgagtgctcttagttttgccaatatttaacatgttgttcttatcaattttttaaaataaatgttaatgtacaaagttaatctaggttttgatgtatatccagagaatcaatttttcttaaagtatctgcgtagacattcatagcaaagaatttatgacatatcagatagaaatacattaaaatgtagtgttttcccagagattgatctggcnnnnnnnnnnngatatacataagataccactttataaagaagctccttactatagaacctcccc

SEQ ID NO: 88579 - DNA, 491 bp, Homo sapiens
  misc_feature (1)...(491): n = a,t,c or g
agggggccnnttagancccctaattgatatcntgcgaagnggcgggaattctaagcgagtcagattccagatcgcgctccagcccggactcggaattcctgccccgcgggtctgcattttcacagcggcagaccagggcggggtgatgggtgatcccagtcgtcgcagtgaactccgagccgacttgaaaacgcgcgcgggcgaccagcgcagccccctcctgagttacacaagcaacaagcgactgctctgggccgtttgtctttcttttccggacccagcagtggcgcctaaagtctgcgaggggaaaatcgcttgtgtgctgagcatgtgaacctacaaggcccagatcaacacctggttgggacagaagaacaccagggcagtgcacagctgggatttcagtctctggtgtcatctcctgggtccactggttccactgagggtggctacactctgcagccaggcggcctggattcaactccctgccc

SEQ ID NO: 88580 - DNA, 2206 bp, Homo sapiens
  misc_feature (1)...(2206): n = a,t,c or g
ggcacgagaagccttttaaatttaactgaaagaaagggtacccagtgtgttgaacaaattcaagagttggttctacgcttctgtgagaagaactgtgaaaagagcatggttgaacagctggacaagtttttaaatgacaccaccaagcctgtgggccttctcctaagtgaaagattcattaatgtccctccacagatcgctctgcccatgtaccagcagcttcagaaagaactggcgggggcacacagaaccaataagccatgtgggaagtgctacttttaccttctgattagtaagacatttgtggaagcaggaaaaaacaattccaaaaagaaacctagcaacaaaaagaaagctgcgttaatgtttgcaaatgcagaggaagaatttttctatgaggagcagggaaaacctgaggtgcttggaggtccagacacaagaagaggattggaaccagttccgatacagcacaatggttggtctgttcccccagtattagaataaattaaaacatacaagccaggatgaatgaagccaataggaaataaaaaacaggcacacaacattatttggggaaaaacacctctagtgacacattttcttcatctgcactgattatttcagcaaaagaaatctagtatgttttcatacatctgatgtataaatttgctgaactttgagttagttttcttaagataatttttcatattaagaaaattttccttttctaacctattaaaatacctcactatcatttcaaaaggttaaatgagttgatcactatctctgctctgtgctcctcaaaatataatttcaaatggatccgatctaaatctatacctagtgcagatttgcaaaaaaagaaaaggaatagtcattaaggatacctgttaccatggccgcgattgttagcacttcatctacacagtcaaattcacaggacgctaagatagacttcgagagttgtggatcaagaggaaactctgacatgatgattccaaattcagaaagatttccatcattatccagtgctgccagataatctaagtcttccaatgcctgcatcaaactttctggtgctaggaaaggaaaaaaataataatttaagagtctcatatggctaagatggagaaacaggtactggacttttccctcctgcatgaaacaagcaaacaatggacaaaatatgtgaaacaacggtttgcaagccaccaaataccagggagtgaaggatagtgattcttgagagggcaaactcaggaggggagccctgtgattgtccagctcatgctccgaggagggtcccagctgcagtgtgcatgcggggggaacccaggtggagcctgccagcctccctgcagtaggaaaacaatgccagggatccagggagactaaggtggccggaactcgcggtcacagtactggagagagacacacagatctaagtcgggggccagagggagctccctcaactaggcagcacagccctactgatcagcgcatgtgtgtaaggaaccacctcaggccagagaaagagccatgtgagaagattaggaagggaacaagtggtgcctgacacagggcccctagggtaggggccctgtcccccacccacccctagcctggaaaaccctcatgatttatggggcactggggtagaaaaccacaagtgagaaaccccctagatgggcacctgcccaccctgacacaggctatacagcaggaccctgaaaggatcacactgccatccctaggacaaagctcaaaagtacctctgggactacaaaaatattcagtgcccaagaaggtaaaatgtacaatgtctagcatccagtagagaggcatgaaaagcaggaaaatacattgcataatacagagaaaaattaatcacaactgacctggatctcagatgctagaaatagtagacaaagatgttatttcccagtgcaaataaagaaataaagatagcaagctgattctctccatctctttatttcttttaagtttatgtaacatcgataatgatgtggtattatatatgctcagtctttaccaaagtttttaaaaatccatttatttaaagaaatatattctctttgtggaataaggctatatatagattggtgcaaaagcgnacgcgtgggtcgtcccgagggtttcaagcggttcgcacgctgtcagtgttaactctccccggccactgaca

SEQ ID NO: 88581 - DNA, 1245 bp, Homo sapiens
  misc_feature (1)...(1245): n = a,t,c or g
ctggcgatggatagttcgcaaatgcggtaaaccgcgcaccagcggaccaagctcaatggtcgcagcacgcagcgccgtcatttcttggagctttgttttcgagattgaaatccagtctccagtgcattctagctgtgtgacttttggcaaacggcttaaaatctctatcccctttttcccatatgtaaatggagttagttacatcatgtgtctactatgtggctctatgacagacagatctattggaattccatggcatgagggaggacactggagagagacatttatcagacgtccacttaccaatgagaaagctcagtgtccttgggtgtgtgatttagcctctccaaagcttcgtttccagatctatcaaatggaaatattaatcgtttgttcttgtgaagttgttggggggatcatgagagaaggactgtggacactagtgcagtttgattcgagatttactattaacaccagcgactcctcttccttcttcaatcgatttgctataatttttaaacaaccctacccgatcggaaataatttcaatactattgaactcaaaggttcacttacagcaggtgctggtgatctgacggtcgatattgcgctgtgcaaagtcaccatcaaccgcatcctcaacgttcatgattcagggcatattcttaatccactgctggcagaaggtcaggtacacggcggaatgggaatgggcattggctgggcgctatttgaagagatgatcatcgatgctaaaagcggcgtggtccgtaaccccaatctgctggattacaaaatgccgaccatgccggatctgccacaactggaaagcgcgttcgtcgaaatcaatgagccgcaatccgcatacggacataagtcactgggtgagccaccaataattcctgttgccgctgctattcgtaacgcggtgaagatggctaccggtgttgcaatcaatacactgccgctgacgccaaaacggttatatgaagagttccatctggcaggattgatttgaggataacatcatgtttgattttgcttcttaccatcgcgcagcaaccccttgccgatgccatcaacctgctggctgacaacccgcaggccaaactgctcgccggtggcactgacgtactgattcagctacatcatcacaatgaccgttatcgccatattgttgatattcataatctggcggagctgcggngaattacgctggcggaagatggctcgctacgtatcggc

SEQ ID NO: 88582 - DNA, 292 bp, Homo sapiens
ataggaatctcaggaaggtggaaagtataaaggtgatcagcagacactaggaagaaaaggggtgggatagggaatgaagacaagtggataattgtgtcccaaaatacagaaagatggaacaagtgagttctagtgtttgatagtacagtatgaaaattttagttcacaagaattgcttgcatatttccagatgctttggtaagaagcttcctaactttctcattatgctggtttttaagctcttctctttccactcttgaaatcatgcataatgagaaagttaggtcgacgc

SEQ ID NO: 88583 - DNA, 1348 bp, Homo sapiens
gaattcccgggttttttttttccatgaagggcatttaatgtcagagagaaaccgtgcacctggggcagagatgatgagcacgccgggcccgccagcctgacccgttgcagcgtcctgtggtttgtgaggcctccctcggtggaggagtgacagcagcagctcaagcttcccctccccgggggtgggggaagacagtataacgtccacgcagcctggtcatgcaccctggcttctgcagcccaggcgcaaacattcagtttagggctttcctgacatgtcaggtcaaatggccccctttcctcttcaggtaggagctagtgaaccgtggaggatgaagaattctcgctggaaaggcaggcctgaagtccgggaggtgcagatctctctgtggtcactgggccagagatgaccttggacttctcattttagggaaggagccgttcctgtaaactgcagatgccgcacaagtgcacgtggatgaaagagtaagagagcaccaggcctcttacggaacccatctacattctggacaagaccctgaagacatcgaggttgaagctgagttcccgccaccttcatagggcctcttggcctagtggccaggatcacaggcagtcctctaaccaacaaagactctagacttccagacaagatcatctcctccatccaaccacaacctccctcctccaggccgtggtggacagacagtaaatatttccaagtccctacatcctgagagtcctcaccagagggagagaaaaagccctgtctcccacccaccaagaggagagaaccagcaaagtccactcctcagagatctccagcgtctcttaaataagctcttcctttccattttcatctttccattgtatagcacccacccatttacttatacaaatataaaatagatttatatagatttatataatatagacctttgtgaggcagagtgcaggggggccgggagcaggccctccgggctatttacagatgtactggtccacgatctccgtgcacttcttacacctgacgaagcagcaccagtggaacttgcagtggcagcgctccacctgcacgctcttgaactggttgtagccacgcccgcagcacatgagctcacagccatccatgccctccgaggtcttgttgcagaggcggccctgcgtgcccagggagcccgtgctctcgttgcgcaggccggtcgcagggctgtgtataagatggcagacgtagcctgcaaatgccacggcgtctcggggtcctgcagcctcaagacctgctggctgcagctggccgagttccgcaaggtcggggaccggctgaaggagaagtacgacagcgcggccgc

SEQ ID NO: 88584 - DNA, 1915 bp, Homo sapiens
  misc_feature (1)...(1915): n = a,t,c or g
ggaattcgaagttccctcctcgggctggaaaagacagccagcatttccatcgcagcactgattattactgtacaaggttggaaactatgcagatgttcactgctggagaactttcatgcaatggataccactcaactgtgaaagaaaaaagagataattctctctatagtgaagtggaaaaacctccaagattaactttgcacagaaagagcaaaatgcagagtgaccccttcttcaggagcgcccagaggtggatcgccgccctggcagggaccctgcctgtcttgctgctgcttcttgggggagccggttacttcctgtggcaacagcaggaggaaaaaaagactcagttcagaaagaaaaagagagagcaagagttgagagaaatggcatggagcacaatgaagcaagaacaaagcacaagagtgaagctcctggaggaactcagatggagaagtatccagtatgcatctcggggagagagacattcagcctataatgaatggaaaaaggccctcttcaagcctgcggatgtgattctggatccaaaaacagcaaaccccatcctccttgtttctgaggaccagaggagtgtgcagcgtgccaaggagccccaggatctgccagacaaccctgagagatttaattggcattattgtgttctcggctgtgagagcttcatatcagggagacattactgggaggtggaggtaggggacaggaaagagtggcatataggggtgtgcagtaagaatgtgcagagaaaaggctgggtcaaaatgacacctgagaatggattctggactatggggctgactgatgggaataagtatcggactctaactgagcccagaaccaacctgaaacttcctaagccccctaagaaagtgggggtcttcctggactatgagactggagatatctcattctacaatgctgtggatggatcgcatattcatactttcctggacgtctccttctctgaggctctatatcctgttttcagaattttgaccttggagcccacggccctgactatttgtccagcgtgaaaagaagaagagagttcctccaattctgaccgagtgctgatcattccctagagacaccagtaaccccgggcttagctaacgaaagtggggagcctcaggctgaagtaacttttctctgcttctccctgcccagctcagagctgagggcctccccctccacagcaaccaatcacaaccataaagctacaagcacgcactgaagcactttactgatactcattcaattattcatatgacagttgtttgagtttggtaccatcttattttccccttatacagataaggaaactggggtgcagaaaagtgaattgactacaaagtagacatgactagttaacaacacagctgggatctaaacagcaataactaacattaatggagaacttaaaatgctctgagtgctgtgttatgagctttggtggatgtcactcctttaatcctcgcaacaccctgtcgggtagtctcatttagcaagtatggaagttgaggcagggcaacattaagtaacttacataactcatgcagtaatttctgcagttgggagatgttcagcttcagtccctggccctatggccgttcttttccaccctgtttcttcccccataggaagaacccacctgtagccctgaggttcttttcccaggatggctccaggataaggatcactgtaggtggttgtggagttgacacccctgttgactccttcccagctgattgtcagagccttatacccagcacgcctttggattagctctgcagaagtgtcttggttnagagaataacctcaccgtacccacatgacacgtgatttggaaagagactagagggcacacttgataaatcatggggaacagatgtgttcc

SEQ ID NO: 88585 - DNA, 6277 bp, Homo sapiens; identical to SEQ ID NO: 64776
  misc_feature (1)...(6277): n = a,t,c or g

SEQ ID NO: 88586 - DNA, 1299 bp, Homo sapiens
ttttttttttttaagcaacattctttctttaatttccctttgcaaatggaagcccctgagctggtgcccacccccacccctaccccataccctggggacccccgatgcaaggcccccacctcaacctggtgggaaaagaggagcaccccctccctatgatggtccattaaaaaattcctagtcatttaagaaatgaggctgggaatgggagaaaggaactggaagacaaggcccaggtcaggccagtctgaagatgttggggttgtgagacccttgagaagggtttgcaagcacatccctaagctcggggccagcatggctgaaggaggagaggtgacacacagacagatagtctgatttccttcaaggtcctgcctgcctggctgtactgtagatgctgtcatcatcaccaccaccaccaccaccaccatcaccaccaccaccaccaccacaggcctcctgatggagaattttccagttactctgggattgggtttgctaagcatcccctctggcccctgatctggggcatccctggggtccccctgagaccaaacctgggagaaggagggactctgggaacatgcaaagtgggggagcagagaccccgccccaccccgctgctctacaggatggtggctccagctgcatctgggctccgagggtccttaacagcgatgatgaagttgttggtccttcggctgccatggacccaggataagacatctactttctccacgtggtgacccctggcttccaggaactcaatctcttcctctgtgaactcactgtccacctgcaggaggttggactgcaggtccgggtgtaggcggccgcgggccaggctgtcactcaggttccggttcaaggtcaggacattcagcagaacctgtgtcaggccgctgaggccccgcgcagctccattggcccccagagcgaggtaggttccacagagcccctccgcgggtcggaccactgtgggcagcaggaaagagagtggccgcttccctggctgcactgaattctccaggctgggtgcagagtggttagctgtccggttgggccaggagaagtccagcatctggctgttgagcaggatccccgagggggtgataaggccgctgccaaagggctggttcagggagctaaccatggccacaatgaagtcatcaggtcccatgatcagcacctgggcagccgtgggagctccgtctagttcatagacaggcaggagtggggcaggggctgcctgggagtcattgatatggccccggaggtaggcggcctccaccttgctga

SEQ ID NO: 88587 - DNA, 1575 bp, Homo sapiens
ttttttttttttccaaatcaccaatacatttatttgcgggagatgaggtcaaatcttaccatgaactttaaaactgggtaggactagagacactgatctgcccaacctctgggtattcacaactgcacaggtaaccagatcctgtacgcgaggcatcaccattaaacagatgagcattagatgaggaggacacattctgagtagttgcatgatttcccattcagaggcaggtgctgccctcatatcagaaaagtagtgttgagaaaaacacaggcagagcctggccatttgcctcctagcataggcctagacatgatggtggccacgtgccaggggaccacaccctatgtacaaagcaggagaatgatgctcccagctgagctgcaggatgggcgctgggctgactggaggggtagacggggtggggtctgaccccattagcctttccccatccaacctgggcccccataagccattctctggccctctgcacaagacagactcagcaaatctgcgaggtatggggattctgccaactccccacctcgcctcaccttccctaggtctgccgggtgacccaatccactgggtgcagccccacccccgctcaaccccacatctggacagacacatggcaaatatggaactgaagcccggctgggctggagcacatctggttgttgttgggttggagtcgtcttgcaggtgtcccaaggtggtcaggcctcacccacggtggccaggttgagaccgtgttttttagatgattcaggttactccagggcaaagcatgatcctgatgacacccggcggaaaagcaggctggagcctcggaagagctggccctgcacactcaggtacttccagcagtgaatccaggatttgaacactggggagtaaggggggagcccagcttgcagcccgcagttgttcacagccatgaggtcgccaactagcaggaaggggtaggtcagcatgctcactgcaatccccatcacgaacttggtatagctccggatggccagggcctggctgaactgggaacctggattctggtcgtttcccagcccccctggggtgtcactcacgctgtcatccaccaggtaggcattgatgaagtgggccagcaggttacagccccacaagaaaaccacatcgcccaggaggtgagggattaatccaacgaagaatcccagcagcccttcctctttgaaaatcttcccaatggagctcagcacaccactgtacttggcctcccgtcccacaaactggaccatgcagcgcattgagatgacatgcagggggtgggccaacatgcgggacacacactgcatcatcatctcgtaggaggtctccttcacaactttcttcagggaagtcttcatatcatccttgttggaaacctgctcaatctcatctggagggaaaaccttcttcatgctaccccgagtcacagtagagagggcgttggacatcagccggggactcaggcctcggaacagccctatcttaccatccacttgcacgatgtacttggcgtaggtgaagaagctcggcagatagaggacactgggg

SEQ ID NO: 88588 - DNA, 486 bp, Homo sapiens
  misc_feature (1)...(486): n = a,t,c or g
nctcgaagacctagagcaccgtcgnggaantccacgcacggngacccgccaacttcagcccccgcctgcccacacagaccctgcctgacgccccccgccctgttctcccgcccaggccagcatctggggcgccgcccagccctgcacaggatcgagaaggaaggagctcctccccagtgccccctcctaggctcaaggccatgacctcacaggcgaggaagcaaaatggagggggtaagaattccggagccggcgagctggctgcagcctcagggctaggaaggcctacggccccgatggcagattgcagatctggcggccacggtatttttatgggcatgcctgttgcccagtgaagcattccaggggccctcgagtcagtctcacaagactccccaagaggtgtggggccctggagggcccacatgggagcagccctggcatcctggcttggatgccccacccccatagtgccagcttcatttg

SEQ ID NO: 88589 - DNA, 388 bp, Homo sapiens
  misc_feature (1)...(388): n = a,t,c or g
cggacgcgtgggcttgaacctggaaggcagaggttgcagtgagccgaaatggcgccactgtactccaacctgggcgactgagcaagactccatctcataaattaaaaggaaagtatgatagtgttatggattttagctctgagtgagctggaaaactaggtcattatctagatgatttcagacttgaccctaattgaccatatatgaccaggaaacacttctgagtttacagctccgtggagatgacctcaacactgcctcttgatttgtttgatgcatgtcactttcattaattttccccctcctttttgaaagtcctgtggcagnactaatattttcattttatgtaatctctggtgctgctttccagtcactgtatgaagtgtcn

SEQ ID NO: 88590 - DNA, 328 bp, Homo sapiens
  misc_feature (1)...(328): n = a,t,c or g
gggggacatggccggattccatctggtacaaaagggacccctgaagctgaggggcggggcagaactggaagtgaccaagcggaacaacaaaaagaaggacaaagactttgcgaaactcctggaagcaatgggaacgagcaaaaaaaacgaggaggagaagcggagcggactggacaatctttccccggcccaggcggacttagaaaaaatgcaggaaaagcggcgaatggaaaggatcctaaagaaggcatccaaaacccacaagcagagaggggaggacttcaacagacacctggacacactcacggagcattacgacattcccaan

SEQ ID NO: 88591 - DNA, 1101 bp, Homo sapiens; identical to SEQ ID NO: 64581

SEQ ID NO: 88592 - DNA, 3659 bp, Homo sapiens
ttttttttttttgagattcagaagttctcatatctttattcacacaaaaaaagtcacagcatttcagactattcaaacacacaaacaggaacagagggtgcccaccagtgacagccatcgtccctaagtctggatcaaaggccacgctggtagggtggggtgtcctctcggggcctccttttttcagcatcccgtgggctccctgyctcccagcctcctctkgccatcccccaagagcagttacaactgtgcagaaacaaagtcactttagaggagggctgggccccacctcattgccatggaaaaaggccagattctgaggaaaagacagaatcagtgctactgtgtcatcagttgggggatgctgggcactcctgggcctggctggcatcacctgcgtcccagacctggggcagagaaaaaggcaggaccctccccacttggcagtactgggcagcagagagtgtgggtcactggtcacgtgacagccccaaactgccacgcagacctctctgatgtgatcagccagacactcagagggcacaacgctttcaagcaagaacaccagcctggttcctaaagggggtgggtgaacaacgctcccagaaatcttaagaacccagagtcctggagcgctggaacaatacaggtgtcattgggttgcagcgaggagggaaacttggtgaacaccagccctccgagagggcggaaataccactcctgtctatttcccagagcacgtgcctgtgccttggggctcaagagcagtcttttcatggcggcaactatggaatctaagaggaatgaaggaaacggcgccctcaggaggtgctcaacattggtgtctgacccccaggcctccttgctgaacctggtgagaaagctggggttggtctaggagctccagcccacgctgatcaggcatgccccaggaaagcagacagggacaagcgcctcaacgagactgggcacaaggccgcaaaccaagctgcttttcctctgtcagtctgatgttactcattggacctggccaaggagcgcctcttccaaagtcctccatcctacccggctcagagcagtccttcccgtgatcactactttccttggctacatctaactttttttttctctgaaagatacgactggatggatgcctgtgactcttgaaggggtggctgcttttactgaggacggcagttcatctaacactttacagctgtaaaaatgtggcgcataggtgtgtagacgttgatgtgtcagcagaaacccctgtataccgggttctatgctatgctacagatacagagaaacaaggagactgagggtcctagggaaaagttatgccatctgggcatggtcaggtcagaagctcaaaagacatttggcacagtctgcagtcatttccagaaactactacccagacgtaccttggcaagcaggtgagctgtggagcacacaggacatcacttctgaaggtgcccaggagcacctggctcgaggaggctttcatagaaggagaagtccccagagccccttccctttctctgtgccatctgccatactactgaaagttattcggggcagacagggtcccctggctctaccgcattccatgactgctcagcgagacccacatgctcggagagaaagtgtggacacaaactctgtggatgcagcccgaaagagggtgctgccgcatccggatcctcgccagcatggcactccagaaaagaaagtaatggcgggggtcaggggggtggtcagagacacagggggtccccagactgcctagcacatacatacataccactggggacagtacagaggggagcaggtccgccaaggttagaaaccaagagacacaaatattgcacattcagtcaaggcatttctaagagagtcacagaaataactctctctgagacacaacataacacatttggcaactttcaaagaaacagccttccccactccaagccatcaaagggtccataagtgccttcatctttggtccagttgaaaaagccagggaaggaagacagggtcaatggggagtaagaagaggctgcaggtgcagttcctacagctcccacttgtctgactcagtgcaggatgccgcctgtctcaaacctcttcttggagggaaaacaagctctccagagggtcccggctgctggagaaaggtgaggcaaagctgcatgtggtggcagccgggagccccaaatccagagcaatgatcaccaacctccaaccacaacaaaggacaccccatcctccctttccttggaggctctattcatgggaatgcggggtactctggcaactctatgctttacctaaaacctcaattcgacaaactgcagctagaaccctttgcatctgctgcaggtcttggagggtgcataggagggacggtgttccgaagcagctgctaacgtccattgtggcacacatagggtgaaaccatggcacggcacgggaacaatcctcttggctccagcgtccttaaagtacaggccatttccaaggagctaggccttccgccctcatcccccagatccccgaaaggctccgactgggaacccagcccagctgctgttgtaaagatctgttctaatactggctaagcaaatgaaagcaggtttctgaaaaggtattctgcagccagaagtcgcactgtcttcggagtcctgcaggtggggagggagttcctttagttttgaccagaacacttcttcacagggggccaggatcaactgtgctttgcagtggctcggtcactggacaggagtgaggtttcacttcacagaggggctctgctgactgctctcctgaaggtctggagttttcggggtcttagtttacatccgcgatcctctctcctgaagaatcttcgccttttcgctcggctctatgacgatgccattggtagaattatttagttctctggagacaacacagaggaattgtgcctgatcctcattgccgtagttataggaagatccgatgctgatgagctgttcgaatttccagccgtcggacatcgtggacaccatctgcgtgagctcttcttcctgacactgcaggactctgtacacgtgcttcacggggccttgtgaagttctgttctcattgtcccgtatcctttccttaaccagccgcacaagggacgcgatgttgtaaaactccgcttcctccagcacaccttcttctgccaactccttagtgatgatgagtttcccgtggcggaggtagttgaggataggaccaaagtaggtggggtccctgtcaatcagataggctcctgtctcatccttgtctgagtccagctccgggtcctcctggcagcagaggcggcagagaaatgacttgggctcccggcctaaggtctgtctggtggtcacgaagtaggtgcctcccacgttcagcctgacccagcgggccgcgccgccgccccctgcccgctcgggtggtccgggacccggctccaatcgctgcgcgacggcggcagccgggcggccgtgcccgcggggcgtggggccagccgggcgtgggctggggggcccgcggactgggccacccccgtcgcccaccccactcccgccgccccctcccagccccgccatcgccgggtccagctgcagttccgccatcttgga

SEQ ID NO: 88593 - DNA, 372 bp, Homo sapiens
aaatgagtccagggatcatccagcagctcctcagctgctcctgccacttacccaaggaccaacaagcaaagctgccacctaccactctggagaaatacggctacagcacgggggctgtcacccttctcacactgggctccatgctggggacagcgctggtccttttccatagctgtgaggagaactacaggcttatcttacagctgtttgtgggcttggccgtcgggacactgtctggggacgctctgctccaccttatccctcaggttcttggtttacataagcaggaagccccagaatttgggcatttccatgaaagcaaaggtcatatttggaaactgatgggattaattggaggcatccatggatttt

SEQ ID NO: 88594 - DNA, 660 bp, Homo sapiens
tttgaccattcaaactaacgccttcatttctctcccatgctttctcctccgggcaggagcggaaggttttcatagagctgaatcacattaaaaagtgcaatacagttcgaggcgtctttgtcctggaggaatttggtaattacactattttgctcttaggtctggactcacatggcagtaactcaaacctcggagctccagaggagggtctaggggcagggagaaaaagaacctctgtagagaagtcaggaggagcaggagtgacaaggaagaaaagggacccctgagatgagagccgggatgtggaagggaaagatagataatggatcgcagaagagcaaatggggcctcaggtgggtttcgagtttagaggtggtcctgaagcagctcagtgaagtagcaccacctccccgtgctgggccagccagtggtcagaaagtttgggacacagcagactggcgacccccaagctccactatgtccatgtcacctgctgcaatctctctagcagcccagtgcgctagccagcctccctggcgccgctctggtctccacctggcctctgtgccagacaaaggggcaccgggcgtcgcaggcagactcacttgagggacagaggagtctagcgggacagctgtagccggaagctgggagccagcg

SEQ ID NO: 88595 - DNA, 425 bp, Homo sapiens
gagaaagagggagaggatgaacgtctgcctcccaaatctaggattgactacaaccaccctggacgagttctgctgcagaatcttaccatgtcctactctggactgtaccagtgcacagcaggcaacgaagctgggaaggaaagctgtgtggtgcgagtaactgtacagtatgtacaaagcatcggcatggttgcaggagcagtgacaggcatagtggctggagccctgctgattttcctcttggtgtggctgctaatccgaaggaaagacaaagaaagatatgaggaagaagagagacctaatgaaattcgagaagatgctgaagctccaaaagcccgttttgtgaaacccagctcctcttcctcaggctctcggagctcacgctctggttcttcctccacttcgctccacagcaaatagtgcct

SEQ ID NO: 88596 - DNA, 1836 bp, Homo sapiens
acaagattggtgtctttaatacatctggtggaagtcactccggtcagaattcaggtaccctcaatggtggagatgtcatcaatcttagacccaacaaacaaaggaccaagaaaaacagaaatccttttagcagctgtagcataccctaagatgttttgggaggaaaacaattgaattacattgtgcaatgcattaagaaacccatccagctgtcatggtatgttacaaggttttcagcagactttgctcctaatggctctctgaaagtgacagacttaaatattgctctgcagtgcttttcagaatgtagagtgagacctctggtggaaaaattattgccctgtggactcctttaattttttttacattagacgaagcttctcctgtttgtaaaggaatgctataagaaatttcaaacacaggttttgcggaattttaaatgctggaaaacataaatgaaatgcctaaatatattgttacagattttaatactgtggatcaaggaaagatagcaagcattcttttcctgaaattgggtcatgtaggcttttctgcggaaatagtattgaatctggaatactttcacaaaataatactgaaaggtaaaccctaaatcttgccagactgcattagaattttggcattgaaacttgtgcaatatctgtgtaatgtagaatgtggggtgtgcatgcagatgtctggtactggagtaagctgaaggtatgtgcagtatttaagaaaatgtacattctaattaattcacttataaaaccatttacatattgtgtatatgtttttattttcaaatgataaactctagacatatattttgcaaaatgagcttgggtttaaaaagtgctttgtgccaaaaatatcatacctaatttttatagtgctttactatcagaatttatattgtttattatatcttttaaaagcagtaagcagttttcatctgacagcgtagataaaagaggagtataggaatttgaatgctagagcatctcccagggtgagccttattgcagatctttttgatatagtcacccataagcatggtgagctcctgctctcataaggtcagccaaagccccttaagaaggtacacagcacatctgcagtcattcaggaggtcctgtgaagtgtggtgatgcatctaacaccttttgctgctcactgagaacccagctttgaacttacaagattacactaaccatttttaaagtgcacaaaaatattattattagtcttaactaaaattacatattttataatgccctgcaactctaaaccatccttttgtttacacatttttgtatggtattttaagattatcaatcacttcaacatttctataaccttgtttgtatagcactttctcaagagctgtcagtcccacatacagaatcatttcttttacaaaatgatttaatatgtaatcatgtgtcaggacataaattttgtcacttgggacagtagctttccagctaagataattgcgtgaactctgttaaaactgattatcactcatcaatggctttatttttaacctataaataacccctttcaatatacctggtttttacagcattgcaaaatctgtaaaaataacttttatttggaaaatgtcatgaagtcatttttcattatttgtactaaacaatgttttatgtactccttttgtgttttatcttttgtttttccatctgtactcccctcatcctcctaatgttgagaaaatcaaatttcctgggtgtgtccttgttaagtgatcaaaagtaaatgttctctttgccattttagatggaaaaataaaaaaaattaaaaagtaaaaaa

SEQ ID NO: 88597 - DNA, 1615 bp, Homo sapiens
agcggccgcgggccagagggccggggccggggccgcgacccgcatcgggatcgcacccgctcccgctcccgctcgcggtcccctttgtcgcccaggtcccgccgcggctctgcgcgggagcgcagagaggccccagagcgcccgagcctggaggacacagagccgtcggattccggggacgagatgatggacccggccagcttggaggcggaggccgaccaaggcctgtgccgccagatccgccatcagtaccgggcgctcatcaactccgtccaacaaaaccgtgaggacatactgaatgccggtgacaaattaacagaggtccttgaagaggctaacactctgtttaatgaagtgtcccgagcaagagaagcagtcctggatgcccactttcttgttttggcttcagatttgggcaaagagaaagcaaagcagctgcgctcagacctgagctcctttgacatgttaagatatgttgaaactctactcacacatatgggtgtaaatccgctagaagctgaagaactcatccgtgatgaagatagtcctgattttgaattcatagtctatgactcctggaagataacaggcagaacagcagaaaacacctttaataaaacccatacattccactttctgttgggttcaatatacggagagtgccctgtgccaaagccacgagttgatcgtccaagaaaagttcctgtgatacaagaggagagggcaatgcctgcccagttaagaagaatggaagaatctcatcaagaagcaacagagaaagaagtagaaagaatcttgggattgttgcagacatattttcgagaagatcctgataccccaatgtccttctttgactttgtggttgatcctcattcttttcccccgtacagtggaaaacatctttcatgtttccttcattatacgggatggttttgcaagaataagacttgaccaagaccgactgccagtaatagagcctgttagtattaatgaagaaaatgagggatttgaacataacacacaagttagaaatcaaggaattatagctttgagttaccgtgactgggaggagattgtgaagacctttgagatttcagagcctgtgattactccaagtcagaggcagcagaagccaagtgcttgatgctagctgaaggactcaaatggatagtgaagtccaaaacggaaagcggcatgtattgtacatattgtatgattcaacatttttaaaggcagattgtttttagtaaaatgtagcttttgatagttaataaatttgtcatggttgtctttgattaaaggaaactcaccgccatattcacaaataattgtagttgctctttattttctaattattggagagtgcctcctttgtctattcctgtcccagtgaaagttttacttaggttgttaatgccctgcggaccattatgattccttttacttcttttttgccacgaagctagctagtcaagtcaacaaataggttgtatcatatgaaactgctgcttttataggtaaaatacggccaaatatgagtaatttcctatgattcagcctctgatttacacacaagaaactattaaatcctctggccagccaggctggactactt

SEQ ID NO: 88598 - DNA, 1733 bp, Homo sapiens
ttaaaatcgagatccctagtctagagtggcggaattcgcttcccatcagcatctgcatatgttgctgtgcatcgtccgtgcgttcagtccttcccacatttgtcaattactttgtgccaggctctgtgctaggcttaactgagcctggactttggtatctgatgtttaaatgttgaccctgccatttagcagctctgagtggatcacactccagtcctttctaagcctcagtgtttctcatcagtaaaatggggagctacattatcagcccgctcccaaaagacttcaggcattgggcgcctgatggtgcatgtcattgaagctacagaattaaaagcctgcaaaccaaatggaaagagcaacccatactgtgaaatcagcatgggctcccagagctacaccaccaggaccatccaggacacactcaatcccaagtggaattttaactgccagttctttattaaggatctctaccaagacgtgctgtgtctcaccctgtttgacagagaccagttttcaccagatgatttcctgggtcgtactgaaattccagtggcaaaaattcgaacagaacaggaaagcaaaggccctatgacccgccgactgctgctgcatgaggtccccaccggggaggtctgggtccgttttgacctgcagctttttgagcaaaaaactctcctgtaggggttctaaaggacagcaccagcgggacagcccacaaggctggggctggagaatgagagactgcgctctcttggggctgagggagcaccatgcagcttcacccctcacaaagccatgcacgctgggggctctgttttcctgcacactaaatagctagcaatctatgcaaacacctttcccataaagaaaccaaaccccatagtacagtgccttgtcctagtgttcacatgttcagctctgtttgtttagatgccaaggtttccattttcagggctataaaaagtattacttggaaatgaggcatcagaccaccagatgttaccgctcggttgaatgtgtccaccgtggagtggtttggtgacgctgtaaccattccacgccagtgacctctgctgggtcacagccactcaggaggggaagggtcaggatgagaggctgcagcctcgacacttggcgcggcctgatactgaaatagcgtctactcgtgcactgaataaaaacagaaacttgatcattttattcctgattagattttatcactctctgctaagacaatatagtctggagtataagtgggaaagcttgatttaaatactgtgaactctaataatgtggaaaatatttttcaactttaattttctgaagtataaattatttatgtaaattcattgtttttgcatatttcttaggacatgcatctttaagctttatcattgcccatatgtacagaaagagaataaagacatatgtttatggatggaaaaaaaaaaaaaagggggggccgttttaaaggatccttgggggggcccaagtttacccgggcttgcaaggtaaaatttttttccttatagggggccgaattaaaacctacttgggaatttttggaaaggacccttatttttggggggggacatattgggccaacctccctccagaaatttaaggctttagggaaaaaaaaaaattttaaggggaaaaaggggtaaaacaacctccatatccttgctgttggaaagttttctttacggagtttgattaatgaaaatttt

SEQ ID NO: 88599 - DNA, 1800 bp, Homo sapiens
ttttttttttttgcttttataaacattcaaccaacatgttctttaataatctcttctttaaagaacaaaataatcaagcacatggcattaagttaaatgtctctgcacatgaatttccaccttataaatctggtatattaaattgggctgcaaatagatttgcatattttcttttttgagtactatgataggtgaaatggtatgactataaaaaggatttgtttctttttgtctcctggaatgacatgatgcctttctagagaaagaaaaattgcaggctacaggaaaatgataaaaactactggattcatttagactattcgatttaggaaggtacaaccacttctttaacatcaagctaaaagtgggggaaagtctcagtctcccaggtaggtctcctctcacactgtcctgggtggcaggcgctgtttatacatgcctgctatcgctctggctgcactgtagatcatctgccgacgggacatcccagtaaatgccatgtgccaatcagtccggctgacattcagtaaactcttttccaggacttcacccactgtcaccaaaaggcctgaccacctcagattatagtcctggggagttagactttgagcctgctgtacaaattccaaaggcactggtgtggcttgtgtaaatgtttctagatgaatgccatggacaggatcttcaaccaccaaacaaccaatgtcaaaccatttgtcaggcagcaattctgcaatgaagttttctactgacacagctgtctgtttttcatggatcaccccagttcgacgcaagctatctatccgttcctgagcaccttttaatccagctgcatagcccactggttgtggggcaatattggactgtccagcttcccctacaaccacagctaagccaaagacctcctggaaggcatctcggacagcagcaacttttacttctttatttgaggtcactacaatatccagttcacctccagatttgatatagggagccatgccagggtccagcgttgtaatcatgctttctactgaatgttttgtcttatcaagcacagacttcaccataggattcccagccacacccttaataaaaccccagattccaccagcagatgcttcatcctgacctctagtaattctagggtcttcttgctcctctgggaaagtaatggctgatgtggttccagttccctgtgccagagatgtcaaactggcttgctgagtaataggagttggcaaaagacctgttcctgaaggtgcagaaaatgatggcatcaggggtgtctggggagctctcccagcatgtccccttgtaatgtcataagttgaaccaacagaaaatcctgatataggaggacccgaagggggtgcaggtaaaagagtgtttggggcagaagttgaaggtgggaagtgagatacaggaggattaccgaaggcagcagcagttgatggagaaacaggaggtggcatagaagtaacaagtggtgggacagaaggaactgcaggaggaggcacaaaaggtaatggtgctgaaggcctcacaggaggaaggggcggctgaggagtagagtatgcgagtggtgggaaggactccatggaggatacatttggagaagaaaaagaactggttgccgctaatggaacaggggtagaagacatagcagtagcagccagccctgcaggatttggtggaggagtcccaggtggtgttgtctctattccactctcttccatcatttttcttcaattatggtatactggggaccgggaaagtgcctgcgtggtcgctgaagagtgt

SEQ ID NO: 88600 - DNA, 1534 bp, Homo sapiens
cccacgcgtccgcccacgcgtccgcccacgcgtccgcccacgcgtccggagccttctaggattgatcccaggctctatcttacccagatcagtaatgctaagccagtgatagcctttttatcttgaagataagggaaaaggagactatctcctactgggccaaatggttcgatttgattcaaccctctatccccaggaatgctgaaatacttttaaagctgataaacctagggaaactgcctcctgatgccaagccccctgtcaacctgctttacaacccaacctccatctacaatgcctggctcagtggccttccccagcacatcaaaagcatggttctccgcgaggtgactgagtgcaacatagagactcagtttcttaaggctagcgagggcccaaagtttgcattcctgtcctttgttgaagccatgtccttccttcctccgtctgtcttctgggcttttatcttcttcctgatgttgctggccatggggctgagcagcgcaatagggattatgcagggcatcattactccactccaggacaccttctctttcttcaggaaacatacaaagctgctcatagtgggagtctttttgctcatgttcgtgtgcggcctcttcttcactcgaccttcaggcagctacttcatcagactgctgagtgactactggatagtcttccccatcatcgtcgttgtcgtatttgaaaccatggctgtatcctgggcctatggggccaggaggttccttgcagacctgacgatcctgttgggccaccccatctctcccatctttggttggctgtggccccatctgtgtccagttgtgctgctaatcatctttgtgaccatgatggttcatctttgtatgaagccgatcacctacatgtcctgggactcaagcacctcaaaagaggtgcttcgaccatacccaccgtgggcactgctcttgatgatcaccctttttgccattgtcatcctccccatccctgcatactttgtatactgccgcatacataggattcccttcaggcccaagagcggagacgggcctatgacagcctccacatccctacccctaagtcaccagctaacacccagtaaagaggttcaaaaggaagaaattctacaagttgatgaaacaaagtacccatcaacttgtaatgtgacttcctaacttcattaatttggcttcacataacatatcccttagaacagatccaatagacaactcttaatatcagcttgcaactgttgatctccctggatccaagacccacttttatttccaagaggaggggcattctttgggggtgttcatggggcctggacttgcaatcccttcctgggtcccatcttacctggtgaccaccatcattgttttccccatcctcttcctcaacacacatacatgcacaacacatatacaatactagtgatgtctaccagtcctgctacttctggggtgcctgtctcctggatggagctggaggagcaatgctgttggtgaataaatcaaaataaaggaactcc

SEQ ID NO: 88601 - DNA, 1060 bp, Homo sapiens
tttttttttttttctatttttaaaatctattttattagacaaattataaacatcaaatataaacaaattataacaacagtgattaaagagttgaaatacttaatgtaatatctcaacagctttgaaaattgaaaagcaacagttattaaacatgattttttcatccagttcaatgaaaggagatttcaattcagaatagctacttctttaaatcaattaagaccttaaggaatatttttttctgcaatgtttaatgaagtactgaaaatgagataaggatttatcacaaagtatatggcaagggagaaaagatgcaacattattttatttcgagctactagatggttctcacaaattacacagggagtgatttaatgattatagacaacgtaaaatacattatctcattctgttttagagtttaaaagaaactttgagactaattcaatttcttcatttcttaattgaggtaatgggatttgagagtccccttgctataagtacctcttcttgcgggagctcatccttacggtgaaataccctcaactttctaagaaaatcacaaccacttatattttttctatggatatcttatggggcacaacaattaccatattggaaatctgcatttcctaaaatccaaaccatggcattctgctggtatgcacaatcatgtgcagtgtctctgccatggggggtgcttttccttaaccaatcttccagctataaaagggcatgaatgaggaaaccttgggaaagggataacatctttgatattgtcaacacccaagatgcactgcaggtagcgttcaaatcccatcccaaaacctccatgtggcacagatccaaatcgacgaaggtccagataccattggtagacttctgtaagtcccgatctggctaagcgctcctctaagaaatggtatcgttcttctctgaggcctcctccaaagagttccccaactccaggaaccagaagatcaacagcagcaaccgtgtgctgagggccatcttcattatccctcatgtagaaaggcttgagtgttaatggataattaat

SEQ ID NO: 88602 - DNA, 313 bp, Homo sapiens
gcagcagcagcaacccacttgggtccccttccacactgtggaagctttgttcttttgttcttcataataaatcgtgctgctgctcattctttgggtccacaccaactttaagagccataacactcaccgtgagggtctgcggcttcattcctgaagtcagcaagaccacaaacccactgggaagaacaaacaactctggatgcaccatctttaagactgtaacactcactgcgaggtccacggcttcattgttgaagtcagtgagaccaagaacgcaccagaaggaataaagtccggatacattttggcgacc

SEQ ID NO: 88603 - DNA, 693 bp, Homo sapiens
  misc_feature (1)...(693): n = a,t,c or g
agcggccgccctccgtggaccaggttaccatgtccccgcccgcacgcccggccgggcagcccgagctcacgcgcgcccgcccacgtccgccggggtccctgctgatgctcggggggagtcctgtaaaagccacactgaggtcgcggcggcgagtccctgcaaggtcgcccttctgtgcgaacaggctttggtggttcttgttctaggaaacatccagcgcttcaactggccacggagttactaagtatcaaccgaacaaggtagttttaaaaggaagggaaatattgcgacacgaatgaagggacagattaacttgctcctcggatccgggcacacagctcctcctacttcttcttcctcttttcctggacacaccgtggacagaaccattttcctttgggtttcgtggtaaggtccacgcaggcaaagtgaaaccactcaattggacagtctggattgtcacagccaatcatctccccataggagacctggtggcacaggcagtacgtgggttcgtttgggtccacgggcatgtccagcacatcagaggggtgcacggacaggatggtgtcagtgaactcagaccctcctttgtgcttctttttctttggtgtgtcttcctctgatgtcctcctgcctcggccccgggaccctcttttttcctcgtgccgaattcgtcatcgcaagntcaat

SEQ ID NO: 88604 - DNA, 3060 bp, Homo sapiens
ttatatttaaatgtttttactaaaaacaaatatttttactggaagctaacagatcaaatcaaatacctttaggaaaatctaaagcaatgtttaaatattccttcctgcctaaaacctaagaggattttctgatctaccatgctacaaatttctacaagaatgcacctctatagaaggaaatgcagcctaagccctttgtaaagaactccacagcaataatattactaatcaaatctattgcttttattgtttttaagtaagtggtggtatatgtcatctttttaaatgtttcttttgggaagatcttatagaaaatggcaccctgaaactttcagctctatgtcccaaaaattatctttcaacaatctgatgaagtttcttaaagaaactcttaaaaatgaagataatatacctggcctaaatcaaaacaatctgaaaaatggatgtgtcccagtggaaagactcaagtcttttcaagtttatcagaaatgccactatacaccactgtactataagtcgaggaggatggatatccaaaggtatcatttgttgacagttcctgatggtctcaggtatatcctataatcactggttactatgcatcatttcttgtagataaatggtattcatgtgataagctgccatccaacttggatgtctctgagcattccaataatatgaatgagaagcggcagcataatattcttgccatgccctgtagtaagctctccagtactcctcataatcctgataggtatcagaaaaactcagacgtatttccctatgacagtcataccaatcatcttcctgggcttcagtctgcaatctgaaggaagaccgcctgggtaggtttctccggctctgcttagctctctggctagccccctctttaagtcttgtcttcatctggattccaggtgattcttgatatttctctggattgggggtgtcacttccatttggtggttgttccaaagaaatacgatcatccacaggcgtagattcagagtctttcagctgattatcagaagagccttccaagtatgacttatttcctttgctctgggaagaggttcttgagctgtaagaatcactgtcactctcagagtctccagattggctactacttgccaacacagggactctctgttcaataactttatttctcacaaaaccattttgaggattcacagtctgatccccagggcctgtgtagtgcctgatgatttccacaggtttctctaacccctctttaatataatgttcataatcctctaccaattcagcaaaagtcaacgtgtatggctgatggattttaaaggaagacagacaaggaatctgggggagtgacacaggtaaagcttctttgacctggtgctgactgttggtggagttttcaacgggagtctgaacagaattcttcatttgctcttcggattgcctgtcacagcccagttcttttggtgacgttgctttttctatgattccacattctgagtggcttttcacaggaagcttttgtttggtattattttttgatttgactgatagtccagatacagaattatttctagaggaagccatgtggtcaccatgagctttctgaatttgaagggttctctctattttctgaatttgcttttttaagggttggttaggtacacttgctataccatatgtatgcacagcagctttaacttccacatcccaatccacacattcttccatcagaccagaaggaatgggatctggtaaagggagaaggttgatattacatttctgggcaattctcatcatcatattttcttcctctccccggcaacagtaggtcactgtcagccccaatgtaccaaaacggccagctctcccaatccgatgcatgtatgtctcccaatccaatggtacatccagatttacaaccagattcaccttctcagcatcaatcccacgagaagtcaaatctgtggaaatgaggactctgcaatgaaagtgcttcagtttagccatagcatcaagacgctgattctgattcatattgcctgaaatgcactcagcaggaaagcctttagaagaaaggatatcagccaaatgttgtgctctgctgtgcaaattagaaaagactaaagcttgattaaatggaattctgctgaacagttcctgtaaatgctgagtcttttcctcaaaaaccttatgtgccaaagggtatgaattgacaactttgtaatactgcttcaaacctatgagacttggatcactggaattcagtcttacaaaagtgggatctctcatgtactttgtcaaagcattagccaaaaattcgggataagtagctgatactgccagcatctgtttactggcaggcaaggaagaataaatccaatttatttgctcctggaagctgccttcttctaaaagcttatctgcttcatcaagaataaagaggcgtatactgcctgggttcaagtagtcaagttctatgagttgcttaattctgccaggagatccaacagcaatatgacactttttaagtctggttttgtcttgtgataatggggtccctccaataaagacatgacactctaagccttccatttttattccaatggctgtaataacagaatgtatctgtacagcaatttctcttgtaggagccaagatcaaaatctgggtacttaagttttcaagaacaagagagtccaaagctatggtggagaacacacaggttttcccggtgccagatttagcttgaacaattaaatcgagcccgcagcgccccaacgggatggccttgagctgcatcggcgagggcctctcgaagccggccgcccgcagcccctccagcaccggccgcgaaagcagcagtgactcgaagtcggccggctccgccaacagcacatcccccgtgcgggtccgcgggctgctgagatcctgagcggtccgcaggatcctcacaggcccgggtgttggctctggggccgggacctgcacggccacatgctcagccggcatagcagtcgccactgctgctaaggctcccgaggcttcaaatgccgccgccat

SEQ ID NO: 88605 - DNA, 5206 bp, Homo sapiens
gagctgcgtcagttgcgtcgccgctggttccaccacttcatgagtgactcccagggaccgcccgccctgggccccgaggctgccaggcccgccatccacagccgaggcacctacattggatgcttcagtgacgatggccatgagaggactctgaaaggagctgtgttttatgacttgagaaagatgactgtctcccactgccaggatgcgtgtgctgagcggtcctatgtctacgccggcttggaggccggggcggagtgttactgcgggaaccggctgccagcggtgagcgtggggctggaagagtgtaaccatgagtgcaaaggcgagaagggctctgtgtgcggggctgtggaccggctctccgtgtaccgtgtggacgagctgcagccgggctccaggaagcggcggaccgccacctaccgcggatgcttccgactgccagagaacatcacacatgccttccccagctccctgatacaggccaatgtgaccgtggggacttgctcgggcttttgttcccagaaagagttccccttggccattctcaggggctgggaatgctactgtgcttaccctaccccccggttcaacctgcgggatgccatggacagctcagtatgtggccaggaccctgaggcacagaggctggcagaatactgtgaggtctaccagacacctgtgcaagacactcgttgtacagacaggaggttcctgcctaacaaatccaaagtgtttgtggctttgtcaagcttcccaggagccgggaacacgtgggcacggcacctcattgagcatgccactggcttctatacagggagctactactttgatggaaccctctacaacaaagggttcaagggcgaaaaggaccactggcggagccgacgcaccatctgtgtcaaaacccacgagagtggcaggagggagattgagatgtttgattcagccatcctgctaatccggaacccatacaggtccctggtggcagaattcaacagaaaatgtgccgggcacctgggatatgcagctgaccgcaactggaagagcaaagagtggccggactttgtcaacagctacgcctcgtggtggtcctcgcacgtcctggactggctcaagtacgggaagcggctgctggtggtgcactacgaggagctgcggcgcagcctggtgcccacgttacgggagatggtggccttcctcaacgtgtctgtgagcgaggagcggctgctctgcgtggagaacaacaaggagggcagcttccggcggcgcggccggcgctcccacgaccctgagcccttcaccccggagatgaaagacttgatcaatggctacatccggacggtggaccaagccctgcgtgaccacaactggacggggctgcccagggagtatgtgcccagatgataggcctggcccacgccgccgcccccgctgagtgacgcaatcgcaccacggggctgcgctccccactctgatgctcaggcccgtggcctcactgggacgaacggtgggtggggggctcaccctggtgcatgcctcccgcacaaggagacctggacacaacagacacacatcacaaggcgaacacaaatggacacacaatacctggccacgaacccacacctcctcagacactcagacaccactccaggctcatagccccgtcttgatgcagagaagccacccacgtggggtgtgccaggcacccccagatacaaatgcaggccacgcacagacgtaacacacaggtgccaaggccgtgtgctcctggaggctggctggctgtctctctcacacagatacacgtgcgctccctgggatccgggaggccctgggcttcctgtgtgtagccctggcatagacttgctcgtcagggtgttcgactctgggatgctgggccgggcagacatttatgctctgagcagcaaggaccattgggatggaggtgggcacaaagactgctgcttccagggtgtgcggccctggccgtgtgtctgacatcccataaatgtgtgtgtggtgtgactacgggcaccacaaactccgcagccttgcctctcttttctctgtggctgggctggctgcaccatgggcagggttgaggactgccccccaccccgcccaagccaatgcagacactgacctcaagaccagccacaccaagtctgtgcactgcccaccacccccttcgacccctcctacaccatgctcctgggcctggggcctccttgcctggcttcttcctccagctatcctcagggaagctggagattcaagtcatgccccagaagcaaggtgtaagcatgggggcgtggggaagagggcaggagctgaagttccaggggagcccaggacccctggggacctgtacactagcaggatgggtcttgggagttggcatggggagattgtaagggctgtatctccgcgattactggtactggtgctccacccataggggccctgttctctctggggtcccacactggggtcatgagagctagttctcatgagagcaggacccctaggtctggtcctgccagcctgggatgggggtcaatgtatgctacacatcttgggctcacaagtgaggctgtggaggccaggaggttcaagtatggagggtaggagtgcaacccaggagcaacgctcaaggtggccgagatgcagggaggattgtggcgatccggttgcacactggcctctgtggaggtcagggaggtgggaaggtgggtgggcctgaactcaggcagcccttcagtggcttcttcaggcctaggataaccctggccaggccccatggtcctgctctgggtcagctgtcagggagacctcccttcagcctgagccaagctgcattgggaggagaaggcagggtgagggatctgggagagcaggatgttgagatatcctgaccctctgcttcctagcctgatgatggggaacccagagccacccgctatgagcacaggccgggggtggaaggcccagtagagctgcccttccccagatggaagcttcctccaaccttcagtttggccagtgggtgggtttgggcatctgtgcccctggtggcctccaaatccttcctgggattcccccaaacccacactgatgcgaagctgttcttgaccctcccatagcatcaactcagttcagctcaaagctagaaacaccaaggtctttgaaaatgtttattggctcaggatagcttcagcatccaatctgcgaaggcccctgatggagctatttcttcctagtatcaggagcaattgagacccctcaggagtttccacactgctgtggacgggatagccagggcagacctgcatcccagagcaagcctagatccttgaaagcaatgtcaggcgtggcagtggggaagccatggaggctgggaagggcaaagtgtggagagaggagtgaccgggactggagccagggtctggggagagcaacagcaccaggcttttcctggtagttggattggtacattcactgctgccaggtacccagagatgtcatctctctccaggtagagcatcaccagctcctgtggccttgtagatgactctgtacctcagtgaagagtgcaggcaagtagagtgatggggtcagtgtccatccagtttacggttgagtcagtccatacagcaagacaactggcacttggcaggtactcctgggatgttgatgagcaaggaagagcaacggccctgtcagctggcagtggtcctcacagccttcatcccaggtctgcctacgtggggagatctcatccagaaacaggaacggggatctgtctgtgcttgcaggaaagtccatttgtttttctccaagttaggtctcatcttacagctcttagcttcttcagttaaagaggatactctcccaaccagccaaggaataaaagctgatctgtatgtagggcagaagtgtggcaaatgcatcaggaaccggttagaacagaacagagaaaccctgactgtctacagattccaactttaatagcaagcctgtggagttacacaaacctgtgttaaaacatgtaatttttatggatttcatctcccgttgtggatcaatttggaaaaaccaaaatatgtaattttaaaaaactaaaacacatcctgggtagtcccagtgatgtgtaaatgagagagaagaatagacaggcttccaaaccctgggaagaaagctgcttaattatgtgaacatcttataatgaagtctcttgcagctaaaattagattttgagtgcatgaatctgtgataatgtttgcatatcaaaatgcattctccccttaaaagtagcagtagccacttggttcttagggggccccaagaggagaggagaagtgctgaggttgatgttacgactgcaagaattcttgggacacaggtttgttttctgctgacttgctcggaaacccattggaggtatctgaaatgtgatgactccaaaggggttcatttcactatagggagaaattgattcgtctgacttcctatttatcaccactcaatattgggtgagttggtctgaacaaggtggggataaagtagagtggaaataatgtagagtcgtcagactgaaaggccaggttgtagtcccagctcttatctgccatcttggacaaagcttttcccatctccagtctcagtttcccatccataaaatgggggaagtggtaggtcttgctgattgcatccacattcattcctccatttcctttcccagcaaccccccatttctgtttgggaattcatatgatctgccagagcctctccaggggtggaatacatgtcctggactaagcccaatgaacacccttcccatcctttccccagcctatggtgactggggttagggtatggatccttgtgagttaagacaatgaagcccagagggaatttcaagacttatgggaatgctgggtagaagctgttttaattcccctgttgaatgtgaaaaaggtagtagtattccgggtctttatgatgaccaccttgggccttgggatcatgaccaggaatcacgtgaagctgacaccactgaagggagagttgagaggcagaaagagatcaagtccttggtgaaattgtttaagtacaggatcaagccttgcttgagattggccttacctctggactttttttgttatatgagctaataaattctgtttattgtttaaaaaaaaaa

SEQ ID NO: 88606 - DNA, 352 bp, Homo sapiens
  misc_feature (1)...(352): n = a,t,c or g
ggcacgaggagggctgctgaagcgtctccacggccgggattgggataggaacctgactggaactgggggctcccccatagaagtacgcccctcccggaagacccccccaccctttagggctctggggccagggagggggaagcaacagtacggagaatgacgccacagtttgcccccaccaggtgcctgagcagggctggtttggtgacatgggagacactgagccgctgaacctgatcccaatctttgaggagctgagcggaccagaggacgtctacaccatgcttgggcaagtgcgggccccttagtctgccctgcttccaagcgaccggcctctcggtaggtgactttn

SEQ ID NO: 88607 - DNA, 362 bp, Homo sapiens
gcgccccgagcctttagtgatgggctggctcacctggacaacctcaagggcacctttgccacactgaatgagctgcactgtgacaagctgcacgtggatcctgagaacttcaggctcctgggcaacgcgctggtctgtgtgctggcccatcactttggcaaagaaatcaccccaccagtgcaggctgcctatcagaaagagggggctggtgtggctaatgccctggcccacaaagatcactaagctcgctttcttgctgtccaatttctattaaagggtcctttgttccctaagtccaactactaaactgggggatattatgaagggccttgagcatctggattctgcctaataaaaaacat

SEQ ID NO: 88608 - DNA, 4115 bp, Homo sapiens
cttcttggggggcaggtgctactacattccaagaatatcagaaaactggggaactctcaacatccgatcacatatttcccctcactccaggccttgtttatagtatcccttttgatcacattgttctgcattcaggacaaagacctccagagctccctaaatctacagaaatccatgagcaaaaacgccactgcaacaccacacgccattctaagccaactgacaagcctacaggcaactccaaaactatagaccacaaaagctctacagataatcatgaggctcctcccacttctgaagaaaactccagcaaccaagggaaagacccaatgatccggaaccagcgctctgttgatcctgctgactccactaccacacataaagaatccgctggaaaaaaacatataacaccagcacccaagagcaaaataaactgtcgtaagtccacaacaggcaaatcaacggtaacaagaaaatcagataaaactggaagacctttggaaaagtccatgagtactttggataagacaagtaccagctcacataagactacaacttccttccacaactcaggcaattcacagaccaagcaaaaaagcacatcttttccagaaaaaatcacagcagcctcaaaaacaacatacaagaccacaggaaccccagaagagtcagaaaaaactgaagattccagaacaacagttgcctcagacaagctcctgacaaaaactacaaaaaacatacaagagaccatatcagccaatgagctcacacaatctctagcagagcctacagaacatggaggaaggacagccaatgagaacaacacaccatccccagcagagcctacagaaaatagagaaaggacagccaatgagaacaccacactatccccagcagagcctacagaaaatagagaaaggacagccaatgagaacaccgcaccattcccagcagggcctacagaaaatagagaaatgacagccaatgagaataccacactattcccagcagagcctacagaacatggagaaaggacagccaatgagaacaccacaccatccccagcagagcctacagaacatggagaaaggacagccaatgagaacactacaccatccccagcagagcctacagaacatggagaaaggaccccatttgccaatgacaaaaccacatcatcctcagcagagtctacagaacatggagaaaggaccccactggccaacgagaacaccacaccatccccagcagagcctacagaaaatagagaaaggacagccaatgagaacaccacaccatccccagcagggcctacagaaaacagagaaacgacagccaacgagaagaccacactatccccagtagagcctacagaaaatagagaaacaacagccaatgagaagaccacaccatccccagcagagcctacagaaaatggacaaaggaccccatttgccaatgagaaaaccacatcatcctcagcagagcctacagaacacggagaaaggaccccactggccaatgagaacaccacaccatccccagcagagcctacagaaaatagagaaaggacagccaatgagaagaccacaccatccccagcagagcctacagaaaatggagacaggactcctttggccaatgagaagaccacgccatctctagcagagcctacagaaaatggacaaaggaccccatttgccaatgagaagaccacatcatcctcagcagagcctacagaacacgaagaaaggactccactggccaatgagaacaccacaccatccccggcagagcctacagaaaatagagaaaggacagccaatgagaacaccacaccatccccagcagggcctacagaaaatagagaaatgacagccaacgagaagaccacactattcccagcagagcctacagaaaatagagaaaggacagccaatgagaagaccacatcatccccagcagagcctacagaaaatggacaaaggaccccatttgccaatgagaaaaccacatcatcctcagcagagcctacagaacacggagaaaggaccccactggccaatgagaacaccacactatccccagcagggcctacagaaaatagagaaaggacagccaatgagaagaccacaccattcccagcagagcctacagaaaatagagaaaggacagccaatgagaacaccacaccatccccagcacagcctacagaaaatggagacaggactccattggccaatgagaagaccacaccatctctagcagagcctacagaaaatggaaaaaggaccccatttgccaatgagaagaccacatcatcctcagcagagcctacagaacacgcagaaaggactccactggccaatgagaacaccacatcatccccagcagagcctacagaaaatagagaaaggacagccaatgagaagaccacacaattcccagcagagcctacagaaaatagagaaagcacagccaatgagaagaccacaccattcccagcagagcctacagaaaatagagaatggacagccaatgagaacaccacactatccccagcagagcctacagaacatgaagaaatgaccccattggccaatgagaagaccacactatccccagcagagcctacagaaaatggagaaaggaccccatttaccaatgagaagaccacaccatcctcagcagagcctacagaacatggagaaaggaccccactggccaatgagatcaccacaccatcccgagcagagcctacagaacatggagaaaggatagccaatgagaaggccacaccatccccagcaaagcctacagaacatggagaaacgacagtcaatgaggacaccacaccatcctcagcagagcctacagaaaatggagaaaggaccccactggccaatgagaacaccacaacatccccaacagagtctacagaacatggagaaaggacagccaatgagaagaccacaccatccccagcagagcctacagaacatggagaaaggacaccatcagccaatgagaagaccataccatctccagcaaagcctacagaacacgaagaaatgaccccatcggccaatgagaacaccacaccatccccagtaaagcctacagaacatggagaaaagactacattggccaatgagaagatcacactatccccagaagggcctacagaacatggagcaaaaactacgtcggccaatgagaagatcacaccatccctagcaaagcctacagaacatggagaaaggaccacatcacccaatgacaagatcacctcatctgcagcagagtctacagaacatagagatagggctacatcagccaatgtgatcacaccagccccagcagagcctataaaacatgcaaaaaggaccacattggcccatgagaagatgacacaagtcacagaaaagtccacagaacacccagaaaagaccacgtcaaccacagagaaaaccacaagaaccccagaaaagcctacgctatactcagagaagaccatatgcaccaaagggaaaaacacaccagtcccagaaaagcctacagaaaacctggggaacaccacactgaccactgagaccataaaagccccagtaaagtccacagaaaacccagaaaaaacagcagcagtcacaaagactataaaaccttcagtcaaggtcacaggagacaaatctctcactactacctcttctcatctaaataaaactgaagttactcatcaggtgcccactggttctttcaccctcattacatctagaacgaagctgagttctatcacatcagaagccacaggaaacgagagccatccatacctcaataaagatggctcacagaaaggtatccacgctggacagatgggagagaatgattcattccctgcatgggccatagttattgtggtcctggtggctgtgattctcctcctggtgttccttggcctgatcttcttggtctcctatatgatgcggacacgccgcacactaacccagaacacccagtacaatgatgcagaggatgagggtggccccaattcctacccggtctacctgatggagcagcagaatcttggcatgggccagatcccttccccacggtga

SEQ ID NO: 88609 - DNA, 601 bp, Homo sapiens
cgctaggccgctatcgagcagggtccgagggctgtgtcagaaggctgggcagccatggcgtcctatttcgatgaacacgactgcgagccgtcggaccctgagcaggagacgcgaaccaacatgctgctggagctcgcaaggtcacttttcaataggatggactttgaagacttggggttggtagtagattgggaccaccacctgcctccaccagctgccaagactgtggttgagaacctccccaggacagtcatcagaggctctcaggctgagctcaagtgccccgtgtgtcttttggaatttgaggaggaggagactgccattgagatgccttgccatcaccttttccattccagctgcattctgccctggctaagcaagacaaattcctgtcccttgtgccgctatgagctgcccactgatgacgacacttatgaggagcacagacgagataaggctcgaaaacagcagcagcaacaccgactggagaacctccatggagccatgtacacgtgaggaggttggggctgagtgctggccctctgcgtcttccttattaaccttgaatcctcattaaaggtttctttacccaaaaaaaaaa

SEQ ID NO: 88610 - DNA, 454 bp, Homo sapiens
cgacccacgcgtccgcccttgtccttggggatcctggatagaagttgccagtgttggagtcttggggcggtgctgcctaaaggatacctcccaaccattccagctccagatgctgatcatccctatgccccctcccccagtagtctctgttggatcttacaggtagggtgcagcctgaggcttgttcagcagaacaggtgcaagccacattgttgccaagacctgcctgaagccggattctccccactgcctccttcaaccccgcctcttcctcctcctgtgggactgctcccccctcctgtgaggctagatgtaggtccatatcttgtgttgttaagaacctgcatgaagggggagggactgatgggggttgatccggatgtgggacgtccaggtggagaaacaggatttgaataatgcaggaacaagcgcccagttctgcccaactgctgtt

SEQ ID NO: 88611 - DNA, 406 bp, Homo sapiens
aacatattatattcatcattattgttactattcctttgttattagcgatgtcacccaggaacccagcactaaatcaatttgattcattctactctgggacagagaatgtcttgttccctggtgtctggaaatggggttttcttcccatactccaggtaacttagggaaaagcacgccaggtttcacagtgtggttctaggctagccctgctggggtacagaatgcttccaggctagtccccagcagagtctgaactcagagctgtgaatcagacactcttccattacttctgggggcctgaggaccttccccttcctttttaggaccctcacgccaaaggctgtttgggcctgagccccattttctaccccatttctccagctgagatgaagctcacaagcattct

SEQ ID NO: 88612 - DNA, 396 bp, Homo sapiens
ctgttttgcagcttccattctttatattttggcttactggtagtgtgtatcacagtaggaccatgtacgttttgttttcctgcataaattagataaagtattgtgtagtgtcaggcaggcagtcctaaaaaggaatgccattatctccaacatttgttttgcctctcactgtagctaccacaaataaaagagattgtattattcctaggactttccaccttagaataataagctataatagtaagaattttgaaatagttttatcagaaaattgctagttgaatagcatcattcttacggtgtctctggttgggaaattatataattggggaaaataaacattattgaactctattataaaagacccactgacagagacatgttttaactttgtgt

SEQ ID NO: 88613 - DNA, 1156 bp, Homo sapiens
ctgcccgcacgggtatcctgtatgaggcccggcgtcgggggacccggaagcagatgttccggccgggaaaggaggagacgaataactcgcccaaccccgagctgctatcgctggtacagaacctggatgaaaagcctcgggccgggggtgcagaatctggtcctgaagaagatgctctgagcctcggggctgaagcctgcaacttcatgcagccagtaggggccaggagttacaagaccctgcctcacgtgacacctaagaccccccctccaatggctcccaagaccccgccccctatgactcctaagactccacccccagtggctcctaagcccccatctcgagggctccttgatgggctcgtgaatggggcagcctcttcggctggaatccctgagccaccaaggctgcagggcaggggtggggagctgtttgctaagcggcagagccgtgcggacaggtatgtggtggaaggtacacctggtcctggtcttggccctcggcctagaagtccttctcctaccccgtctctgcccccttcctggaaatattcacccaacatccgtgccccgcctcctattgcttacaacccactgctctctccctttttcccccaggcggcccgaactctccctaaggcccaatcccaggggcctcgggcaacacccaagcagggcatcaaggctctagattttatgcggcatcagccctatcaacttaaaactgccatgttctgttttgatgaggttcccccgactcctggccctatcgcctcagggtcccccaaaactgcccgagtccaggagattcgccggttttccactccggcaccccagcccactgcagaacccctggctcccactgtgcttgccccccgagcagccactacactggatgagcccatctggagaacagaactggcctcagcccctgttcctagcccagcccctcctccagaggctcccaggggccttggggcttctcccagctcctgcggtttccaggtagccaggccccgattttcagccaccagaacaggattgcaagctcatgtgtggaggccctggggaagggcaccagtgaacaggcacaggtcccaggaccaaggagaggtggaacatccagttcctaaaagttgcttctcctaccctatccc

SEQ ID NO: 88614 - DNA, 396 bp, Homo sapiens
  misc_feature (1)...(396): n = a,t,c or g
ccgacgcgtgggcaaagacattagattagataattggtcctaaaatttcttccaaagagagcaggaaagatagctccctgctctaccctctgattgatgccatcagtgcttcactgacaccccaaaggctatgataggctcctgtgctctctggcgggttaccaccaactacacttaccacaatccggagatcaaactgcaccatggagggattctcaaaaacattcctcaagatgggggacaaggtaaagaggacctccgggatccacgattctcccattttgggaaaggagttataaacaggcccatcatctagccctgccacaaaagcccctcgattccaaggtgaatggcatttattaaggtgagaggaagaagagaaccaatactagttcn

SEQ ID NO: 88615 - DNA, 878 bp, Homo sapiens
atgatgtcactgccccagtgaagagtccttcaatcatgggcatcctggctgctaacaggcacttcctgggagagatcgggtctctggatggtggaatgctcatctatggaggagagaacgtggagcttagcctgagggtgtggcagtgtggagggaaggtcgagattttgccctgttcccggattgcccacctagagagacaccacaagccctacgccttggatctcaccgctgccttgaagcgcaatgctctgcgagtggccgaaatctggatggatgagcacaaacacatggtctacttggcctggaacatacctctccagaactctggaatagattttggagacgtttcttccagaatggcactccgggaaaaactgaaatgtaaaacttttgactggtacctgaaaaatgtttatccactcttgaagccactccacaccatcgtgggctatggaagaatgaaaaacctattggatgaaaatgtctgcttggatcagggaccctttccaggcaacacccccatcatgtattactgccatgaattcagctcacagaatgtctactatcacctaactggggagctctatgtgggacaactgattgcagaggccagtgctagtgatcgctgcctgacagaccctggcaaggcggagaagcccaccttagaaccatgctccaaggcagctaagaatagactgcatatatattgggattttaaaccgggaggagctgtcataaacagagataccaagcggtgtctggagatgaagaaggatcttttgggtagccacgtgcttgtgctccagacctgtagcacgcaagtgtgggaaatccagcacactgtcagagactggggtcagaccaacagccagtga

SEQ ID NO: 88616 - DNA, 367 bp, Homo sapiens
  misc_feature (1)...(367): n = a,t,c or g
ttgaaacataaatgggggaaccagacaataaacacctttattacatgggtgaagacaaaacacggatttatttgcctttgcggaccctgagtttcctaagatataacgccaactttttgccctctagcacatacccatctgttcggccacactgttccggacttgaagcgatgcacgcaagaagctcgccctgctggaactgctcctccaggagactgatgattttggcatacgttttactttcataatattgcttctgaattttttagagncgcnnnnnncngacannctataaaaagatctcactgaagattatttgctttactatggactgttggcttaacaattttccatttacctgaaaccg

SEQ ID NO: 88617 - DNA, 367 bp, Homo sapiens
aaacatccatagagggaactcattgatgttgggttattttcaggctcggttccagtgggtagttttcacagttgagagggagcaatttggatggattcagatgcagagaaagcagaacaagaaaacaagtagtgatactgttgtcatagaccaggcaacatgaaaaggacatgaattaggatggaaactgtgggattaaaagaaaaaagaagaataaagcctttagattaaaccattagactcagcggtgttttaaattttttggttgatggctgaatgaattaatagcaaccgaggatgtagcacctggaagtttaagcatttgagatttaacatcacaaagccataaaacattaaatatttactt

SEQ ID NO: 88618 - DNA, 336 bp, Homo sapiens
gcaagatattgcagataaaatgaaagaagatgaaccatggcgaataacagataatgagcttgaactttataagaccaaggtattctcttctgcttccttttcattaatcttttatataataaaagacatgaaaaccaagaactttaatttgatataggagggtcagttgtataaatgaactctactttaaaatagatttatttgaggttagtggaaagcatttttaaaaaaaataaaaatagagaacagatatttttattacacgaaaattcatttcagcttctttttgtctccttatagctttatgaaccatgctaaattcttatttccacatgg

SEQ ID NO: 88619 - DNA, 341 bp, Homo sapiens
tatagggatttctcactggtaaaaaactatactcaaaataaacctttcaaagaagctttgtgtagtaggtttaccactgtatctgtttggactagtggcagtaggtttacctctgtatccgtttggactagtgccagtgttaggtttgcaagagtttccctgttacctgttttccctgtttttcatgccaggaaagcttttccttcaaatagtcccatggctagttccctcacttccattttatcctctgttctacccagggcaccccagctaatttgcagcatgtctccccctttcctttttgcttttgtttctgttgggatttgtcactgtctaacata

SEQ ID NO: 88620 - DNA, 344 bp, Homo sapiens
gtaaaacccagcgataggtaccatcttatgcctatatttacaccagcatacccacaacagaactccacgtacaatgtgcccgtttcaacacggatggtcatggctgaggagtttaaacaaggtaagtggttatccttatgctctgatttatacaggaaggatttacgtaccattgtagacccagtagtcagctgtgcaacttaaattgaagaaagattcactgaagtggattttggagttcatttatttattacagaatatatttgagaactgacttcaaaaaattaattgcttttaggcaatgcgttttttataacaagtcggaagagtaaccaacagctaat

SEQ ID NO: 88621 - DNA, 1112 bp, Homo sapiens
gaaaatatttttagcatattatgttaaacattctttcttatttatatttccattacctaaagtctttctactcacaaatactaactccattatgtaaggcatggtaaccagtttgataatgaaggtattattttggttttgaacatatgtgagttgatgtgttgaaaacttcaatcacattacaatcttgaaaaaaaaatctcagtgccagcccctcctccccccaggttgataccaccgcaatacaattcaacaatatgcaacatgccctcaattttattttgttttgggggaaatgtgctgaagaacctagagctttttttgtttagcaccttatatcaaagtaatgaaaatgggtatgatgattacatgtgcaaatgtacaaaatcattaactctacaaagatacatcattccaaaattacagaaaaaatttaaagcatgcatttaattctttttctttaaagggttgctgaatgcttcccctgaaaaaaggtggctgttttcaaaatcagcaactgctggtgaggatttcttggcacagttatgaccagcatgttattgctgcatcttcctgataatctcagccgacaccgggggatggaaattgattgtgtggtgccgcaggccctgagctgtcttgtaactcttcccacagcgacacttgaatggtttgcggacacgaatctgtgttctgtgaccattcttagcgtgatactttatgccattcacattcttgtatctctttttacatccaggaactgggcaggcaaaaggcttctcttcccctccattcatgcacatggagctgaggatggcttcggagctgatggcactctctgtggtccaggactcatcgctgtccgactcctcatagtccacctcctcctcgtcatactcgctgcctgtcggagtgctgctgcggaatgaagaggagggggtgatgggtggggtcacggggggagtaaggcttccactgctgtggcgtgggggagtggacacattccctcgagacactgagctggacagagtcagcgagagcttcggctgaatcttcttctttagggactcctgctatcggcgggcagcatctgtcatgaacggacgcgtggg

SEQ ID NO: 88622 - DNA, 351 bp, Homo sapiens
gaatcacctgtggcttttcctcctgctggtagtagctcccagatgggtcgtgtcccacgtgcaactgcaggagtcgggcccaggactggtgaagccttcggagaccctgtccctcacctgcactgtttctaattattccatcagtagtggatacttctggggctggatccggcagcccccagggaagggactggagtggattgggagtgtctatcctggtgggaccacctactacaattcgtccctcaggagtcgagttatcctatcggtagacacgtcgaagaatcatctctccctaaagatgacgtctctgaccgccgcagacacggccgtctatttctgtgcgaagaa

SEQ ID NO: 88623 - DNA, 358 bp, Homo sapiens
attttcaccaagatgaataaggtgtctgaagtgtacgcgcataaggaggaactgaaagagcttccacctgtaacttgggaacagtgactttatagaggaatccagcggtgctggtctgtcaggggcttgccactttggcttaattttctgacttatagctgtctgagaatatcccgaattaaaacagctccgatgtggaatgcagtcctcatctacaggctccctaccccagtgctaactgtgcatagggctgacttgctgttcttgaagctgggctgtctctctccatgttggcctgtcaccagacccgagtcaattaaacagctggtcctccactttgctggttcagccttcgtgg

SEQ ID NO: 88624 - DNA, 644 bp, Homo sapiens
  misc_feature (1)...(644): n = a,t,c or g
gacagaatgagaaaattatgctttttattatagtcacataaaataaagtcagttacatcaagttgtccaaatgcattggtgaattaatgccgctaacgcttacaaatttttatacatatatctatgcatttataaatacatacatatgtaaaagatatatattttctactaaaataaagtacccaaatcttgatatatataggggcataatgggggagactgtctgtatgctaggaaaagcatacaatagatgttctaaaagcttcaaagagctgtcttaagatcactatgtcaaaataacacagcaacattaatcgccaaacaactctttgaagcttttagaacatctattgtatgcttttcctagcatacagacagtctcccccaaccccatccccaccccgctctgcattctacaagtaatgtgtgtcctctgcccacagggggtgctgcagaatgtgaggtttgtctttggaaccacaccagaagacatcctcaggaacaaaggctgctccagctgtgagtacccctctatttttagggcacatagggaatcagggggaattccaccaaaaacaaactgaggaatttagcaatagtggttatacatanaatacccccagtgagatcattcagaggcatac

SEQ ID NO: 88625 - DNA, 508 bp, Homo sapiens
tttgtttttaacatctaggttgcttgagtactactataattttgatggtaatgtagttgactgtggaatttatttatagtcaacattagcctgatttctgataataaactataaagattcgtattcctctacttgctagcttgttcccaaagagtccaatttcttcctgttaataaaaataaactttttgttgggaagataatgttcatttgctgaatatttatgttgtagataagtaattgattgaactttatttcaacagggaaaatcatgaatcagaaaagccagcactgaacaacatagcagacaacacagtagcgatggaggtgacgtagcttcctccgagtggaactgcagcctggggacttgattaggtgctatgcatcagtagcattttgaatgcaagggatgatggaaagcagcacatgcgtttctgtggcagctgtggggacttgacagcaatgctcatctctcatgcttcaattttttttttcttactgttaatagg

SEQ ID NO: 88626 - DNA, 833 bp, Homo sapiens
  misc_feature (1)...(833): n = a,t,c or g
ggctgctgcagccccctatgtgtttctgtggaactgggagattgttcagggcaactgataagtcagtcctttggaccactgatggcatggaaactatttaaaggcattttggtctttctttcttggagtcttacttccaattgtctaggtgggcttttaaattatttttcgataaagcccatgcatcattttggctgcttcagctgcaagtgatggaagacccagctcatttaaatgatatggagattcattatttcatttatcaagaaccctggcacaagggggactatggggttaattcattcagtggctcagcagcataatctgaaattcatattcctgccacttctctgtacttaaatgtacatgtacagcatgtactccccaggttaaagtttctcatcgccccaagatggctggtgcagttccagacatcacacatagacactgaaacctccaggatggatcactggacaaaatcagagttctgttaggaaggaggagggggttagagtgagaaataaccaccagagtcgctcaatctaggtgtcaatccttgtgagaaacatttaccccatctctgctgcttaaaaggatacaaacaatttgtcctgacatcatttgactttcacaagaagccctgacttcttagtttttaatttctcccatatcctctgcatatagccattggcacaagcaaaacagggataatcttgctattgccaagaatttgccacaacgcccgggttcttacttttcttgccttgcttaaggnggggcccctggaactgggaaaaaaccctggtcatgaaaccctggcttcaccacaaaaa

SEQ ID NO: 88627 - DNA, 343 bp, Homo sapiens
tgaaaataaatgttttttattaagcataattcagatgctcaaggcccttcataatatcccccagattagcagcgtggacttagggaacaaaggaacctttaatataaattggaccgtttgaaagcgagcttagtgatacttgtgggccagggcattatccacaccaggcaccactttctgataggcagcctgcactggtggggtgaattctttgccaaagtgatgggccagcacacacaccagcacgttgcccaggagcctgatgttctcatgatccacgtgccgcttgtgacagtgcagctcactcagtgtggcaaaggtgcccttgatggtgtccagatgt

SEQ ID NO: 88628 - DNA, 1429 bp, Homo sapiens
ggggacagcctgtgtgtcccccagtataacaagtacagggaggagagggtgatcctcttcctgaagatggcctccgggcacgccttccagcctgacttggttaagaggatccgtgacgccatccgcatgggcttgtctgcgcgacacgtgcccagcctcatcctggaaaccaagggcatcccgtatacgctcaacggcaagaaagtggaagttgccgtcaaacagatcatcgctggaaaagccgtggagcaaggaggtgctttctcgaaccccgagaccctggatctgtaccgggacatccctgagctgcagggcttctgagtcagactggctggcgtgtcactcagccgcacccgtgtgcactgtaacttttgtgtgctcaagaaattatacagaaacctacagctgttgtaaaaggatgctcgcaccaagtgttctgtaggcttggggagggatcgtttctctgttttgttaaatctggtgggtacctggatcttccacacgagtgggattctggccttcagagaccaggagggagtgtctgggccgcaggtgtggcactgtggtgagagtgtgtgtctttgcacacacagtgcagcgggaacggtggggctggctggtgctgaagacagacacactcctgagccaaggtcttgtcttcaacctccccgtcccgttgtcccattttgctctgtgaaggtgcaaatccctttcttcccttcccatctcaggctctcctgttttccctcagggtccagtatgcctttgagctttagctgttagaaaggaacccccgtgacttgacacagctttcacagctggctgctaggaccggcgggctgggtgttcacgtgtgtctgtgtcatggatgcaatgcaggccctggaggactgtgcgtcacccgtcaaccagagcgtgcctccgggccagcttccctccaaggaatgagtggatttcatacaggatctctttattgcacagactgaatggctttacatgtttctaatgtgaattaggcatgtgaagcagtgggtgtccacccgtgtccctcatgggtgagccctccagctgtgagcccaggcagtgtggtcaccgagtgaggaccctcctcaccaggaaccgcatccctgtgctgcctccacctgagagttgctagggggttcttgtcgagatcatgtcatcagcacccctaagtcaagtcacgggtttccatagccaggcagttggtatgtacaattcagttcagcgtatgaacttgtatctctaatctgatgtccatttttatattttttgaaactgagcacaatgaaatcctttcttgaatcattttccttttggattataaaaatatgggggaaagtgctatgatgaattttatgcaataaatgtatacatgtgtgcacatgcacccatgctgtgaaaaaaaaaa

SEQ ID NO: 88629 - DNA, 422 bp, Homo sapiens
ggctcacataagcgctgctgcggtggcatatcccatgacaataatttccagagactttaaatgagtttctttatatttttcatcagttatggatgttttctgggaaatggtccatggaacaccttattctgccattctggaaataaaactccaagaaacttctctttaagcctctgagacttaaaggttgcttattactgcaggaaagcctagtttagcatgatgaaagccgtgtctagtattaaagcagaattaaagtcaactcaaggaaagtaaaatgattttccaactctatctttctctgataggttcttgtcccttaaagctgagtagccgtcactggccagattctagaataatgcccttcctgtttttcttttgttctgatggccccacttgattgctttaatggatctaggtag

SEQ ID NO: 88630 - DNA, 883 bp, Homo sapiens
ttaattgagacctttgaacacgtttacgccacgcttggcacgaggatcgggacctggtgacgatggtggagcagctggccagattcctgggggtgtcctgtgacaaggcccagctggaagccctgacggagcactgccaccagctggtggaccagtgctgcaacgctgaggccctgcccgtgggccggggaagagttgggctgtggaaggacatcttcaccgtctccatgaatgagaagtttgacttggtgtataaacagaagatgggaaagtgtgacctcacgtttgacttttatttataataacagaaacaacaacctgcatgctcacaatacccagacagtctactagccaaaagtcctgtatgcattcatttattccttgctggacaaactctggaagcagcgtgtgaaacagcgggggaagggaagagcggcgtgagcggagggagtgtgatgattcccaaccgaaagcagctgtctcgcctttagaacgtgcagcctctccatgtctgattacaaacagtctccacattgcagttccaatggcctggaccgtaaggataaagcctgtaatatatgcaactagaatgtctgccttttcaaccccgtattatttattgtattttatagagcttttcacttggaaatctacataaatgtcagtaaaccaaataaaagttcatttccaaggggaatcaggagcgagccacacccgaatggtagaaagatctcagggttaactctttatttttgtagttttattatctaagggcacagccatttctgttcttcacttgggttctggggatagtgggtgaggaccagagggtggagttggggtctgttggggggggaatctgggacacttgtttattctgacg

SEQ ID NO: 88631 - DNA, 676 bp, Homo sapiens
ttgattttggacacgctcagcttggcacgagggcctgcagcagatgaaagccaatgatcctagcttgcaagaagtcaacctttacaacattaagaacattccaattccaaccctgagggaatttgcaaaggctctggagaccaacactcacgtgaagaagttcagcctggccgcaactcgcagcaatgaccctgtggccattgcttttgcagacatgctgaaagtaaacacgaccttgacaagtctaaacatagaatcccattttatcactggaactgggatcctggccctggtagaggcactgaaagaaaatgacaccttgacagaaatcaagattgacaaccagaggcagcagttgggaacagctgtagagatggaaattgcccagatgctggaggagaattcaaggatcctcaagtttggataccagtttaccaagcaagggccacgaacaagggtggcagctgccatcacaaagaataatgacctggcctggcaaaaggacacccaggagcagacatccatttggcaagtggtcagtcagtcaatagcaggcttcaatccccagtttgaggttcagggacagaatgccagatcttggatggaggaactgggcaaggcgttccaccagttcgtaagaagagagttgaagcagaccgaaggtaaacttccttga

SEQ ID NO: 88632 - DNA, 406 bp, Homo sapiens
ggaaagctgatgtgaaaaacctttctgggaaaaacagacctgtgaattcaaaaatacatgatatttttaaaggatgggctcttcaaccacttgatccagatggccgagtaaaaatttgggtttatggcgtttcaggtggcgcttttctcatcatgattttcctaatatttacttcctaccttgtttgcaagaagccaaaaccacatcaaagcacacctccccaacagaagcctctgaccttatcctacgatggagacttagacatgtaatctgaaaaagaaatccaaatgtagacatcaactgccttaaccgctttctcttttgtagctctcagacttctcagttttttgaggaatctcaagatgtgatatattgggcagaatacaaatattgcaaaagtaatatt

SEQ ID NO: 88633 - DNA, 403 bp, Homo sapiens
aggttccccaggttttctccccacggcctccacccccgttcaggcctcaccatcacctccttgggatgttgcggattcctagacagctgtcccttcttccagagcgatgcaggtccacagggctgttgtgcacaaatgcagggggcgccagtcatccagaactcacagtgaaaggccccctggagcaccagacacattgtactctctgtgagtgatgcccctggagtcgtacaaggcagaggctcgacaaagtagctgccaacattaattgtaatggccaacattaattgagctcataccaatattccaggtaattcactatgcccttgacatgcatttgttcaaacatttaatcctaaccaaaatcccagaagcaggtagtagtaccatggtcattttatcc

SEQ ID NO: 88634 - DNA, 397 bp, Homo sapiens
ggttaacccctattcttggcactggggagggtgccaatggcgcacagccagtcgaaaattttgggggccctggctccaggcataggccgtggttaccaacagccagcaggcctccatcttcccactcaacacataagcccctgtgtgccttcctcgaaaaagattgtacacacatgtgacatccaactgcagccagcgttgcagggtgggctccagctctgcagggggcagaggccccgtcttcagcacctctagtctggagtacaagttgcaatcccaggggccacaagaagtattgttggacctggaaaacctgaccttcactgctgaaagggaacataagggccggtgatgagatgggcctctaggagtcctacctaaacccccaagagtgcta

SEQ ID NO: 88635 - DNA, 428 bp, Homo sapiens
ggacctgtactactagaaaccccagtagaaatagaagcccacagagaaccaccgatgggacaatcacaagaaaaatcatcactaagacaagaagaacaaacacctgaggaacaagagtcctctgagcagccatgcctgggacagccacactgagagcagccacctgagatgccagagtcccccacgcagccatgcctgggacagccacacccagagcggccacctgagacgccggagtcccccacacagctgtcctcaggacagccacaccgagagcagccacctgagatgccggagtcccccacgcagccgtcctcaggacagtcatgccaagagcagccacctgagacgccggagttgcccatgtagccatgcctggcacaaccgtctcagaaacacatgattaaggggtaacaaaacaacaaaca

SEQ ID NO: 88636 - DNA, 383 bp, Homo sapiens
gtcctgcagaacaaccggcggctgtttgagcagaacgtgcagcgctccatgcgggggggctacatcggctccacctactttgagcgctgcctgaaatagggtgggtatgcgccacgggcacaagccctggcatcccctgcaaatatttattgggggccatgggtaggggtttgggggggcggacttagtaggaaccccctgccatgggcttgactcttcttgctgcgacgggcccctagcaaaccctctttttacatcacaatgtgcttattgctccggcgacgcggccgcgacatctcggggaggggaaaagaatttgcttggtaaacccccctgctggggcgttggtaaaccccccctttgggctgtgagtgggggggcag

SEQ ID NO: 88637 - DNA, 181 bp, Homo sapiens
aacccgggctgtcgcggccggactcatttacccgtggacagggagaggctcttctgagggtattgggtgtgcagagcctcatgcatcactgagcctgaaaagaccatgccatgatgccacctggttttgaccacggtgagcttgctataaacgaagaatgaaggcaaaacggccgcgactc

SEQ ID NO: 88638 - DNA, 350 bp, Homo sapiens
cgtgtcgtcagatataagggtccccaggtccatataaactgtagtcctggatgtgtcagcggtcagggtgactctgccctctatgtcctgtgcaatgtctgtctcatttgtgaaaccgctaatccatgccagccactcaagcccctgtccagggacctgtcgcacccagtgcaaaccgtaggtggtgaaggggaaaccagaagccttgcaggaaagcctcactgcggccccaggcctcttcaactcaggcccagattgcaccaactgaacctgggagtgggcacctgttgctgttgccaccaagaaaaggatgctccaggtccagtccatgatgagggtcgacgcggccg

SEQ ID NO: 88639 - DNA, 356 bp, Homo sapiens
  misc_feature (1)...(356): n = a,t,c or g
cttgaatgtgcatgagcgcgtgtatatgtttatgcttatttatatgcgaaatgcatgacagaaattatactacggatggatggaaggaattagcattattttgctattataagggattcatactactcatgaaatgatctataggcacttgaaggagggcctgaattaattgtacatgtatattgcaaactctagggcctgcacaaagaataagtaatgagagcagtataaccaatgtggcgagaaaggaagtgaagtaaaatcacgtaaaatgctcaactatatccacacaaggcagaaaaagggtgaatgacaaaaatatgaaccaaataatgaaaacaataaatatggtagan

SEQ ID NO: 88640 - DNA, 417 bp, Homo sapiens
tttcgtcctgcggacgggcccgcgggcgtttcgccggtggctcccctggggcgtgcgggttcgcgtctgggaggccaagaccgctgtgtggaggtagccgcagcgccagcaccagctcatttgatatagtcattgtcggtggtggaattgtggggcttgcctctgccagagcactcatcctgcgacatccatcactttctattggtgttctggaaaaggagaaagatttagctgttcaccagactggacataacagtggtgtcatacatagtggaatttattataaacctgagtctctgaaagccaaattatgtgtacaaggtgcacccctcctctatgagtactgtcagcaaaagggaatttcctacaagcagtgtggcaagcttatagtagctgttgaacaagaagatattccca

SEQ ID NO: 88641 - DNA, 2436 bp, Homo sapiens
atgaaatccaatcctgctatccaggctgccattgacctcacagcgggggctgcaggaggtacagcatgtgtactgaccgggcagccctttgacacaatgaaagtgaagatgcagacgttccctgacctgtaccggggcctcaccgactgctgcctgaagacttactcccaggtgggcttccgtggcttctacaagggtaccagtccagcactaatcgccaacatcgctgagaactcagtcctcttcatgtgctacggcttctgccagcaggtggtgcggaaagtggctggattggacaagcaggcaaagctgagtgatctgcagaatgcagccgccggttccttcgcctctgcctttgctgcactggtgctctgccccacggagctcgtgaagtgccggctgcagaccatgtatgagatggagacatcagggaagatagccaagagccagaatacagtgtggtctgtcatcaaaagtattcttaggaaagatggccccttggggttctaccatggactctcaagcactttacttcgagaagtaccaggctatttcttcttcttcggtggctatgaactgagccggtccttttttgcatcagggagatcaaaagatgaattaggccctgtacctttgatgttaagtggtggagttggtgggatttgcctctggcttgcggtatacccagtggattgtatcaaatccagaattcaagttctttccatgtctggaaaacaggcaggatttatcagaacctttataaatgttgtgaaaaatgaaggaataacggccttatattctggactgaaacctactatgattcgagcattccctgccaatggagcactctttttggcctacgaatatagcaggaagttgatgatgaaccagttggaagcatactgaagtgtcttggtgggcctgagccaagcacaggtgtttgaggactacagttcatctcagggtttcttggagtacaagaccagtgtgaagttattctgatttcttgggaattttgctttttgtcttcccttctaccctacatcttaaactttatggaagaacctctattttgcatcatatcatttctgtccataattgtactgaaatagaaaagtgaccgctcttgctcttggtaaaatatagagtggtcagtagccttatgcacctaattcaaaaggtggaatatagttctgtcagggcttttacgtaaacctccacttgtacatgcaatttggacagttatgtgttgagggaagtacagtttggtaccttgtttatttcaaatatcagaaaaacccagaggtgatcatttctcatgaagatgcttataaatggttgcttaacccattctagatgtagggtctgcttaatgtgtgtacttttctaagtggttgattattttttatttttttgatacggagtctcactctgcactccagactgggtgacacagcgagacttcatctcaaaaaagaaaagaaaagcaattgtacttcactatgccatatgtatgtattcactgaccaaaaattcactgaccaaccaaccaaactccacacttcatctgatcccccatagacttggggatggacagctgttctttggccatatggtataagaggatcattcttgtcactacttaagttagcctcatcattttgtgctgctccaacaccagcagggtatctcccaataaagtgttcctaagcagcctgtatactgagtgcaagcaggctatcaattttaataatagtccataccatgtatgtgtttctgtcagcagaatgtacatgttgtacaaaacctccaggttccttaagctttttgctgtccatgaatcctctgtggcaactgtaatcacagagccagaagccagagggccagggatatgagaggctgacaaacatcaggggacatctggggaggagatccctgtcatgtctcttgtgccatggagctattatggctggtcttccatttgctttttctttaagtgaaaaccatttttctactttgcttttctctccatacttaaatggtcagtagctactgagtggtgctttatctgaataggcctggatcgaagtaaaatagaaatgggactggctttccacaggaagtaaactgcttcagagcccacagtcccctgctcagtgtccggaaagaagtcagtcatccctgttggcagtaaatcttcccacaggccgtccattagagatttaactagatatgttcaatagaaagagtctgaggcaagtggaaatgaggaacggaaacttaggttgggagaatattttttttttattcattctgtttgcttaattcagagtacagtttgtgctatttcatatctgtactccaggcagaaatataacttgaaaatactgtgtctaaagaaatttcagtgttctatcattaaattatattacttaa

SEQ ID NO: 88642 - DNA, 447 bp, Homo sapiens
  misc_feature (1)...(447): n = a,t,c or g
ggtagacgatttcgtggtctgggggctggagtctggtggtggcaaggaccatgtttgctttgggacagtcaacaaggtcttctgagggaaagctcagagataggcagaacaatgactcatttgcaagccggtctctcccctgagaccctggagaaagctcgcctggagctcaatgaaaacccagacacgctgcaccaggacatacaggaggtgagggatatggccatcaccaggccggacattggctttctgcgcacggatgatgccttcatcttacgcttcttgcgggctaggaagcttcatcactttgaggccttccgcctcctggcgcagtactttgagtaccggcagcagaacctggacatgttcaaaagctttaaggccaccgaccctggcatcaagcaggcactgaaggatggcttccctggnggcctgccaatctggacn

SEQ ID NO: 88643 - DNA, 626 bp, Homo sapiens
ggtcgacgatttcgtcgcagcctcggcagcggcggcggcggagccctgaggcgacagcagctgcgggaggcgacgggctgcggcctgcggaacctgaggcagctggggagggccgggcgcgccggccggatagcgagccgcgctggcggcggcggtggccgcgatgatggagatccagatggacgagggcggcggcgtggtggtgtaccaggacgactactgctccggctcggtgatgtcggagcgggtgtcgggcctggcgggctccatctaccgcgagttcgagcgcctcatccactgctacgacgaggaggtggtcaaggagctcatgccgctggtggtgaacgtgctggagaacctagactcggtgctcagcgagaaccaggagcgcgaggtggagctggagctgctgcgcgaggacaacgagcagctgctcacccagtacgagcgtgagaaggcgctgcgcaggcaggcggaggaggcagctgcaggcaccggagggctgctccccagaagcctggagtgccagggctgccctcgctcagctgtggagctgtggctgccccctgtgctgggcaccgccctccactgctctcccacactcagtggcctgacctggatttcag

SEQ ID NO: 88644 - DNA, 317 bp, Homo sapiens
ttttttttgattcagatactccatgaagttttatttttaaaaaattgtttaccctgtacatgtttctattgaatcctaagtaagaatgcccaaggagataaagcaagtgcagttaagtatgcatgggaaagctaaaatgggtatgtacataagatcggcaaaggaaaccaagttctgtaaaatgagttctccctcccctccagggtagctgattatgaggaaaataagaaagagctttgcttttctccttagtagtaatggtctacaataagctgcacacacacatccctcatcacacctctctctcaaaaaaaaaa

SEQ ID NO: 88645 - DNA, 449 bp, Homo sapiens
gaagggataagctccggaaatcccgggtagacgacctcgtgccgagcgagcgagggagaggcacagtcagagggaacgcccgcgcggggagccaggggcgcccgaccccgcgcgccgccgcagcggcgcgcagcccccgacgcgccctgtggggacccggaccaggagggaccctgccccgggaaaaggctgtggagacctgggctccgaccccagttcatccccccacacccccgccgccccgtgccaccctggtccgcgctgggaaccctatcctgcccctcgtgtcagcccggcactggccagaatcgcgggcatggcggtgaccatgctgcaggactggtgccggtggatgggggtcaacgctcgcaggggcctgctcatcctgggcatcccggaggactgtgatgatgccgaattccaagagtccctcgaggctgccctgaggc

SEQ ID NO: 88646 - DNA, 782 bp, Homo sapiens; identical to SEQ ID NO: 67218

SEQ ID NO: 88647 - DNA, 700 bp, Homo sapiens
ccactgcgcagaaggagcagctgctccgcgccccgccgcgcctcgctgaggccgatgtccgcagggccgcggggaagccgagggctgccggagaaccctgcaggtgtcactcgggacgcggaagtgcgcttgccgaggtttgctttacaatacgcttgagactccccgacaagcgtaatttggtcgagttcgacgggaaagtactctccccaccccagcgccggccgcgtagtccgaggttactgtccccggcgcgtcctctgttgccccagtccagaggctgcccttgaacccgggcgcgcacgagcgcagggcatccgaggcgacagcccctggcacggcccgacctgtacccagcctggcaggaagactgtaatcgtgggaatacagctacctacccaggcaatatgaagattttatttgtagaacctgccattttccttagtgcatttgctatgactttgaccggtccactgacaacgcaatatgtttatcggagaatatgggaagaaactggcaactacactttttcatctgatagcaatatttctgagtgtgaaaaaaacaaaagcagcccaatttttgcattccaggaggaagttcagaaaaaagtgtcacgttttaatctgcagatggacataagtggattaattcctggtctagtgtctacattcatacttttgtctattagtgatcacta

SEQ ID NO: 88648 - DNA, 1795 bp, Homo sapiens
ttttttttttttattttatatatgatgcttcttttaatgcagccaaaagtgatatttgcttttctcagaaccataatcgatacaagatgcagtgaccaattcattccttaaaacacctgggctccttaagcggctagaagacacaagttacatccagcccatcagggagccagaggcgggaggggtccccagccaagctctggcaggcctgccatggggcagggcctgaccgtgcagccagaggctggcagaggcctggggaagggtgggcagaggcagctgggctctcagtcctggaaccggagaccaagggctgctcatcaagctccgtcaggcaagggcggcctcatctgtgcctggtagattctaactgcttccaaggtagaggaggacgcgtgcaggaaatcgtgtcaattgtcaccttctgcctgcctcccacagggacactctgggttgggagcctcttccagtccctgggggccaggggcatggggggccctggagtgtgcccacccccttccaccccctcggaggcatgagggaggtggtgtaatactgctgaaaccttcttgtttacaaatgcatcaggagaggcttgggcaccctttatccagtttgcaagcaaggggccaagacacatgagcactcactgcgtgggcagggatgagggccgggcaccccaagccagatcctgccacctggggaggtgctggcctgtgcttcccagaggcccccccccaccttctgtcggggtctcatgcaggccctgctcccgctggccccctgggtgggggtcattgccgattccggctgcccagcttcctgcggtccttgttctggctgcgctgagggtcatccatcttgtggacacggaaacattccttgaggttctgggaccggatcttgggattcaagatctcctcagtcatggagctggggaaccagcctctctcctggtcgtgcagacgctcgccaaagatccacccgtcgtcagtcttgtccaggatgttgaggatgtcggcgagctccagcgtcagctcgtctggctgctgagccacgtatgggtgcacgcactggacctgggggcagtccagcagccgggatgtgaacgaaacaaacttggtcctcctgttgggggccagtgaggtcatccaacgcttcatctcactctgagaggacgcctttagcatgtaggtggcctcccggtcatctgcgttctccagcagccgcaggatgaacacgttggccagcgtctggccctggtcctccagctcctccacacgcagcagtccccgcggagctgagtcaaatacctggtacttgtctcctggaatctgccggcagatcaccagcaggtcgttgaacaggaagaggtaaatttcgtggaagagcttcttggtcctcagggtccgggaggtcttggggcctgacatctgctgcagctcaccctgcttcagcagccagcgggagtgggagatgatgggcaccgacttgatcttgaactccatcttcttctgaatgctgatcatctgttccgtgcggctcattttcctgacgccctcgttgcatgcctttaccaccatttccagctccttgtgagcatccaaagcagtgcactcccgctcagacctctcttctaccctcttcaggatgttctggaccaacagcttgaggcgtgtgatcctctggaaaggcaggatgaggaaggaggagaagggcagccccctgcacttggggtcgagctctagctgcgcgatcagctcccggaaagctgccttctcctggagcagctgct

SEQ ID NO: 88649 - DNA, 420 bp, Homo sapiens
acagttgtccagtttatccagtcatctctgctagattgtccttaccagagtcaacagagggtttccatgagcctagccaagaactgaagttttctgtggagcaaagaaataccagaaacagagaaaactctccctcttcccaatcagctggtctttctagcataaataaagaaggggaagagccaaccaaaggcaatagtgggtctgaagcctgtaccagttcttttctaagattgtcttttgcttcagaaacccctttggagaaggaaccccactctccagctgaccagcctgaacaacaggcagaatccactttgacatcagctgagactaggggaagcaagaaaaagaagaaactccggaagaagaaaagtctacgggctgcccatgttcctgagaatagtgacactgaacaggatg

SEQ ID NO: 88650 - DNA, 404 bp, Homo sapiens
atttaccttgatatggtgtcaaatcagacactgagcttgttcttcacggttctgcaacatggcccaggaagagatcttaaaccagccatcgtgaaagtctatgattactaccagacggatgagtttgcaattgctgagtacaatgctccttgctgcctagatcttggaaatgcttgtcgaccacaaagctgaaaagggctttgctggagtcctgttctgagagctccacagaagacacgcgtctttgtatctttaaagacttggtgaataaacactttttctggtcacagcaaaatcaagcgcataaaaaagtgggcacgctttttcttagccccggccttgggcatcctctggaggatgttaaatagtaccgcgctgcccatccttaggagatggcctataca

SEQ ID NO: 88651 - DNA, 1091 bp, Homo sapiens
ttttttttttttatcaacattattggtagctttattaaatttgtttaccttctaaaaaaaacgattacaaaaaagaatacttcatttaagtgtaatactggctttatggacgtaccgtgatcagaaagtgaaattaaagctcatggatatgcgtgagaagagaatgggcgcagaggcacgagtccagtatcccacggagagaaggaagtgtagagagatgcgtggacccatctcaggggtcacgcattcctgggccaaggagttgcttctaagagcttaaaataaatgcactggctggctccagggctggacacacaggcacagaactcttgtaccgcttctcaaagctgcccaaagctgcgaccttccccctcagacacccacaattaattgtttccaatcagctttggttttgttttctctgcaatttacatgcaaacaccatctatctattcatccatacatccatccatccatccatccatccatcctgcttgtctcctttgaccagccaagccctattttgttttacgtacattcccttcactaaaaatcaaagcaagccagtctacatcaagccaagaaacctacttttctaaggagagaaaccagtgctttgccttctttaatgaacctgcgagctctcagcgctttctcttgctgaaatgtggctttaaagccttggaggctgagctcactggcctcgaaagggcagcgcgcgtatttggtttggagcgcactcctgatcacaaagcacatttttagaggcttggaacccttccctttctgttgctcaccaaggaaaaggcacaagaaagacaatgatgtggagattcttaggggaccaaaacaggccatgaaggaaactgagtgtctctggcaagccccgtttcccgcaggctctgttccaggcagctccggaaagtctctaggttgttaaaaagcccagctggcccatgtttggttttcagcaaagccctgtctctttaagtttgcgctgggaggcctggggacggccaacttttaatcgtacacacatggggtttttgggagccggccctgcgttttgccaacaagcgcatgccctgttt

SEQ ID NO: 88652 - DNA, 411 bp, Homo sapiens
accacgcgtacgttgacttgaaccctagccgggagcgctgtggggtgcccttctcctgctgcgtcagggaggctgcggaggaggtcctcaacacccagtgtggctaccacgtccggctcaaactggagctggagcagcagggcttcatccacaccaaaggctgcgtgggccactttgagaagtggctgcaggacaacctgattgtggaggcgggagacttcatgggcattgccctcctccagatctttggcatctgcctggcccagaacctcgtgagtgacatcaaggccgtgaaagccaactgttgaggccgccagaggccatggccacatgcctggcctacacaggcctctggggggccccccaggaccctcctactatactcctgacgggcaaggctgcaagagatgg

SEQ ID NO: 88653 - DNA, 482 bp, Homo sapiens
  misc_feature (1)...(482): n = a,t,c or g
ctagcccgcctgcaggaattctgcacgagcttatttccgtggtccggacagtgcgtggcggcgcgggtgaccacgggagaagtaggcataatggttatgaaagcttctgtagatgatgacgattcaggatgggagctcagtatgccagaaaaaatggagaaaagcaatacaaactgggtggacattacccaagattttgaagaagcttgtcgagaattaaagttgggagaactacttcatgataagctatttggtctttttgaagccatgtctgctattgaaatgatggatcccaagatggatgctggcatgattggaaaccaagttaatcgaaaagttctcaattttgaacaagctatcaaggatggcactattaaaattaaagatctcaccttgcctgaactgatagggattatggatacatgtttttgctgtttgataacgtggttagaaggccattcactggcacagacagtatttan

SEQ ID NO: 88654 - DNA, 486 bp, Homo sapiens
  misc_feature (1)...(486): n = a,t,c or g
gcggcntannaattgaccccctttgaccagcgctgcaggaattcggcacgaggccaccangctgttctcacgtgaacagctttaaggtgggagagaactggaggcaggaactgcgggttatctaccagtgcttcgtgtggtgtggaaccccagagaccatgaaaagcaaggcaaagtcctgcatctgccatgtgtgtggcacccatctgaacagactccactcttgcctttcctgtgtcttctttggctgcttcacggagaaacacattcacgagcacgcagagacgaaacaacacaacttagcagtagacctgtattacggaggtatatactgctttatgtgtaaggactatgtatatgacaaagacattgagcaaattgccaaagaagagcaaggagaagctttgaaattacaagcctccacctcaacagaggtttctcaccagcagtgttcagtgccaggccttggtgagatattcccaaccn

SEQ ID NO: 88655 - DNA, 501 bp, Homo sapiens
  misc_feature (1)...(501): n = a,t,c or g
attagaccnccgcgctgcagngannnnattgcccccgcgctgcaggttccaattgatttaaccaagacacggctccagattcaaggccagacgaatgatgcaaaatttaaggaaattagataccgaggaatgttgcacgcattagtgaggataggcagagaagaagggctgaaagcactctactcggggattgcccccgcgatgttacgccaggcatcctatggcaccatcaagataggcacttaccagagcttgaagcgactattcattgaacgcccagaagatgaaactctaccgataaatgtgatatgtggaattctgtctggagtcatatcttcaaccattgctaatccaactgatgttnnnnaaattcggatgcaagcgcaaagcaacaccattcaaggaggaatgataggcaacttcatgaacatttaccagcaagaggggacaagaggactgtggaagggtggtgtccttactgcgcagagggctgctattgtt

SEQ ID NO: 88656 - DNA, 1374 bp, Homo sapiens
tcagctattgatacttgtgtatgcttcatgaaattcttgggctgtgtttttcagcttcatcaggtcgtttatgttcttctctaaactagttattctagttagcaattcctctaaccttttatcaaggttattagcttccttgcattgggttagagcatgcttgtttagcttggaggattttgttattacccaccttctgaagcctacttctgtcaattcatcaaactcattctccatccagttttgttcccattcctggcaaggagttgtaatcctttggtctttgctgttggtgaccttaggatgaagtttttgcatggtcgtcctttttgttgatgttgatgctactgctttttgtttattagttttccttctaacagtcaggcccctttgctgcaggtctgctggagtttgctgggggtccactccagaccctgtttgcctgggtatcaccagcagaggctgcagaacagcaaagattgctgtgtattccttcctctggaagcttcgtcccagaggggcacctgccagatgccagccagaactctccttccaaacttcctagtggctttgtttacactgtgagaggaaaactgcctactcaagcctcagtagtagtggacgcccctcctgccaccaagctcgagtgtcccaggtcgacttcagactgctgtgctggcagcaagaatttcaagccagtggatcttagcttgctggcctctgtggcggtgggatccgctgagctagaccagttggttccctggtttcggccccctttcacaggggagtgaacagttctgtttcgctggcattccagatgcagaaaaggccttggataaaattcaacactccttcatgctaaaaactctcaataaactaggtattgatggaatgtatctcaaaataataagagctatttatgatgaaaccaaagccaatatcatactgaatgggcaaaagctaaaagcattccctttgaaaactggcacaagacaaggatgccctctctcaccactcctattcaacagattattggaagttctggccagagcaatcaggcaagagaaagaaagaaagggtattcacatgggaagagaggaagtcaaattgtctctgtttgcagatgacatgattgtgtatttagaaaaccccattgtctcagcccaaattctccttaagctgataagcaacttcagcaacgtctcaggatacaaaatcaatgtgcaaaaatcacaaacattcctatataccactcatagacaaacagagagccaaatcgtgaatgaacttccactcacaattgctacaaagaaaataaaatacctaggaatacaatttacaagggatgtgaaggacctcttgaaggagaactaa

SEQ ID NO: 88657 - DNA, 489 bp, Homo sapiens
  misc_feature (1)...(489): n = a,t,c or g
nggctggctttaaattgaatgccgaattgatcggcantcagnaannnggcacgagcaaagctcccctgcggccccgaggaagaagagcaaggttgaggacagcctcgggtcaccagagtagtttggaggcaggcctgcaggcgcgtccccgctcctcagctccaagctgacgtatctacacctgccggcgggcattaagatggctggttatgccactactcccagccccatgcagacccttcaggaggaagcggtgtgtgccatctgcttggattacttcaaggaccccgtgtccatcagctgtgggcacaacttctgccgagggtgtgtgacccagctgtggagtaaggaggacgaggaggaccacaacgaggaggaagatgaatgggaggaggaggaggacgaggaagcggtgggggccatggatggatgggacggctccattcgagaggtgttgtatcgggggaatgctgacgaagagttgttcca

SEQ ID NO: 88658 - DNA, 452 bp, Homo sapiens
  misc_feature (1)...(452): n = a,t,c or g
gggtannactagacctgatacttgnganncnnggannaagcagggacagccctttcaaactaacggggagggtgcctccgtattgactaaaaaggggatggacttactttccactgtgagagttacttatagtgtctgtgatggtcctgtatgcttccaaggcgatcggcagtgccagtcttcatctgctaagccaagaagatctgggaaggagtcagacggccttgggccagagttccaggggctctggaagtggctgccatgtgagttgaacagtccaattttcagtggggtcctgtacagatgggacatggctcatgaggaatcctgggctgtgggcacttgtagcaagctcctgtgggaggaggttctggaggaacccctggcagctgcggatcaggcgtttggagttcttgtgtgctggagatgtggctgtggtttgtctcacagag

SEQ ID NO: 88659 - DNA, 629 bp, Homo sapiens
aaaaaaggttgcaattttccaagcaagttagccaactatgagttactgaacttcaagaagtccacttttttgttagtgtttgaaggaaatatcagggcgttgaaatacaatctgacctcagaaggacaatatggtcttaacgctgaaatcaaataaatacagtaaattattagaaacaatactaagcaattgagtcaaaatttaagtttgtgacaaagattatagataccatctatgagggcattcttcacatgtttattttaaatattttgtttccttgttctagggttataaaattatacaccatggccctcctaaagacactctaggaaaaccatgtcatcctgatcttaaaacacctgcaagaaagagcacagtacttcaccattatttccagcaatggctttactaccggtgttgtttctggttactgtgctgcttccatctttacctgcagaaggaaaggatcccgcttttactgctttgttaaccacccagttgcaagtgcaaagggagattgtaaataaacacaatgaactaaggaaagcagtctctccacctgccagtaacatgctaaagatggaatggagcagagaggtaacaacgaatgcccaaaggtgggcaaacaa

SEQ ID NO: 88660 - DNA, 492 bp, Homo sapiens
  misc_feature (1)...(492): n = a,t,c or g
ctttgatgcgctcacttgcgccgngcaangcatcttatacgctggattcgtagaagtacctgaggaatcacctaagcaaccctctgaagtcaatgttaacccactctatgtctctcctgcatgtaaaaaaccactaatccacatgtatgaaaaggagttcacttctgagatctgctgtggttctttgtggggagtcaatttgctgttgggaacccgatctaatctatatctgatggacagaagtggaaaggctgacattactaaacttataaggcgaagaccattccgccagattcaagtcttagagccactcaatttgctgattaccatctcaggtcataagaacagacttcgggtgtatcatctgacctgcgtgaggaacaagattttgaataatgatccagaaagtaaaagaaggcaagatgacatgctgaagacagaggaagccctgcaagctattgataagttaacaggctgtgaacacttcagtgt

SEQ ID NO: 88661 - DNA, 1849 bp, Homo sapiens
cgctgttgccatggcagtgtggtcctggctgccgcggaggcaggtgccggggtctcctttgcctcaatgtgaagagcttaaaaagaggaggagaggagaactcccccggccatctctgtgatcccagccgccgcattttacacagaaaatgaatgaaaataaagatactgattcaaagaaaagtgaagaatacgaagatgactttgaaaaggacctggagtggttaattaatgaaaatgaaaaaagtgatgccagcataatagagatggcttgtgagaaggaagagaatattaaccaagacttaaaagagaatgagacagtaatggagcacaccaaacggcattctgatcctgacaaatctttgcaggatgaggtctcaccaagaagaaatgacatcatttctgtaccaggtattcaacctttggatcccatatcagattcagatagtgaaaactctttccaggaatccaaactagaaagccagaaagacttggaggaggaagaggatgaggaagtaaggagatatattatggagaaaattgtacaagctaacaagcttctacagaatcaagaaccggtgaatgataaaagggagcgaaaacttaagttcaaggaccagttagttgatttggaagttcctccactagaagacactactacttctaaaaattattttgaaaacgaaaggaatatgtttgggaaactgtcacaattatgtatttccaatgattttggacaagaagatgtgctcctgtcacttactaatggaagctgtgaagaaaacaaggataggacaatactggtagagagagatggaaaatttgaacttctgaatttacaagacattgccagtcaggggtttttgcctcccattaataatgcaaatagtacagaaaatgaccctcagcagttgttacccagatcttccaactcctctgtcagtggcaccaagaaagaagattctacagcaaagattcatgctgtcactcactcatcaacaggagagccgctggcttatatcgctcagccaccactcaaccgcaagacttgtccaagctctgctgtcaactcagatcgaagtaaagggaatgggaaatctaatcacaggacacagtctgcacatatctcaccagtgacttcaacatactgtctttcccctcgacagaaagaactacaaaaacaactagaagaaaagagagaaaaactgaaaagagaggaagagcgacgaaaaatagaagaagagaaagaaaaaaagagagagaatgacatagtatttaaagcgtggttgcaaaagaaaagagagcaggtcttagaaatgaggagaattcagcgagcaaaggaaattgaagacatgaacagtagacaggaaaacagagatccacaacaagcttttcgattatggcttaaaaaaaagcacgaagagcagatgaaagaaagacagacagaagaactaagaaagcaagaggaatgtttattcttccttaaaggaacagaaggccgggaaagggcctttaaacaatggttaagaaggaaacggatggaaaaaatggcagagcaacaagctgtcagagagagaactagacagctccgactagaagctaagcgttctaaacagttacagcaccacctatatatgtcagaagccaaaccttttcgttttactgatcattataactgaaagtttctattaaatatttcagtgggcagctgctatcaaaattttggatatgatttcttagggtctgtgtactttggttgtattctaaattatggaaatggtatttatcttttattgacagtgaatttgtttttttaatactagaacaaaataaatttttttctcacagtg

SEQ ID NO: 88662 - DNA, 896 bp, Homo sapiens
atgctgctccatgaggtggggattttgtctgcttgttcactgctgtgtgcccagggcccacgacagtgcccgatacagcaggcgctcaataagtggcgaatgaaagacagggcaaggcggagagagaagaaacagaaagggaaagagaaagcccgggccgccagagcgcttaatcacacctggctcaggctccacactggtcctccagctcccttttctcagcgatggactcacagccccacccggagcgctggagcgcggacgcggtcactgcgcgtgcgcctcaccgcgctggcaccccggcctggcagcctttggggacctgaaccagctgcgcctgcgcaggtggaacgggtggaacgggtgggggagcggacagtcgaacggcctgagagggctcagctggtccggggctgcggcgcctttgtgagcgcggccgccggccaggatcgagccctggcccgggccctggcccagccccggcctccaaggaccgcgccgaaggaggtgcccactggagggaggaggcgctcgactttctcaggatactgtccctctcccacagaggagctgaaggagtaggacagaagaactgtcaaattctggaatccttaaagccatgtccaaggatttggtgacatttggggatgtggctgtaaatttctctcaagaggaatgggaatggctgaaccctgctcagaggaatttgtacaggaaagtgatgttggagaactacaggagcttggtatcattgggtaaggacatgtccccttaattcagaatctgtacatgggactgagctccaatgtaatatttgggaaacctctgacgtgcttcactaaatttccttttcttgtgcttcccaaaataggttgaatttgtagaattggcagctt

SEQ ID NO: 88663 - DNA, 419 bp, Homo sapiens
ggacactgaaaaaaaatcctagaatttagaaaaagagaattatttgatttcttatttcctctttctgttcaggccttctgaaagtaaaggttcttcctttaactgttccctgttctttcttctattccttctttgtcctactcaaagggataagtttgttgaaattgacctaaagccagtctgcaaacactgttatgagaaaatgccagaagaatttaagaggcgacttgccaaacgggagagagaagcaaaggataaggacaagcagaaaaagaaaaagccagtctgtttgtaaacttttctatccctgtgtcatcattttcactactttctcctttggttagtcctttggaatatgtttttgttctgtttctgtcttttgctttcttccccccctgcaacttttgggcgtgtatttg

SEQ ID NO: 88664 - DNA, 448 bp, Homo sapiens
  misc_feature (1)...(448): n = a,t,c or g
attgaagaccatgagtgacngcggnggaattcgctggccatcgacctgtggctgtccaagaagctggtggtgtgcgcgggagagagctcgtcgtggggcagcgtgcgaccccttatgaagctgctggagatctcgggacacggcatcccctggctgctgggcaccctctactgcctgtgcaggagcgacagctgggccgggcgcgaggtgctgatgaacctgctcttcgccctgctgttggacctgctgctggtggccttgatcaaagggctggtccgcaggcgccgcccggcccacaaccagatggacatgtttgtcactctctcggtggacaagtactccttcccctcgggccatgccacaagggccgccctgatgtcgaggttcatcctgaaccacctggtgctggccattccactgagggtgctggtggttctgtgggccttcn

SEQ ID NO: 88665 - DNA, 2271 bp, Homo sapiens; identical to SEQ ID NO: 59270

SEQ ID NO: 88666 - DNA, 476 bp, Homo sapiens
  misc_feature (1)...(476): n = a,t,c or g
gtnccggggncgggnnaattgannaactgagatccctctccangtggtggaattcctgaacgtggagaccttggtggtggtcgacaaaaagatgatgcaaaaccatggccatgaaaatatcaccacctacgtgctcacgatactcaacatggtatctgctttattcaaagatggaacaataggaggaaacatcaacattgcaattgtaggtctgattcttctagaagatgaacagccaggactggtgataagtcaccacgcagaccacaccttaagtagcttctgccagtggcagtctggattgatggggaaagatgggactcgtcatgaccacgccatcttactgactggtctggatatatgttcctggaagaatgagccctgtgacactttgggatttgcacccataagtggaatgtgtagtaaatatcgcagctgcacgattaatgaagatacaggtcttggactggccttcn

SEQ ID NO: 88667 - DNA, 450 bp, Homo sapiens
  misc_feature (1)...(450): n = a,t,c or g
attgaggacatctgtgatagccctgaattcggcgnggaggcgcagacatatgagagagaggtgtgttacctactgtgacaacagatggaagactgttggcgacaggtgagggctctctgaaggcttcactgaaggagtgacagagccagacacaggagtgacatgctcagttctctgggttgaggcatcatcaccctggtggccatgtggaggatggactggaaaaggcattcagttagaagacctctgcaggagtccaaggaagaaacaggcaaatctgcaggaggcagattgcagccttcttcgctgagtctctgcccagtgtgggagggcagatcattccccctgctggctacttctcccaagtggcagagcacatccgcaaggccggaggggtctttgttgcagatgagatccaggttggctttggccgggtaggcaagcacttct

SEQ ID NO: 88668 - DNA, 468 bp, Homo sapiens
  misc_feature (1)...(468): n = a,t,c or g
ngatggcnnnttttnaattggctcgatggcatngtgcnggaattcatgagatggatattatacaaaactatgagaatgaatgaatgattttagcattgtggcaaaatataagatccaaaatgtaaaatacaaaatcagttatattttttacacctgcaacaagcagttgaaattgaaatgtgtaaagcaatacactgaaagctgtatattgaaaactgtaacacattgcctagagaaattaaagaactaaataaatggagagatacatcatggtcactggttggaaaactcattattgtcaagataccagttttcaccagattgatctatagactcaatgcaatcctaatcaaaatctcaacaggattttttggagaaattgacaaactgattccaaaatccatatggaaatgcaaaggacatagaataggtaaaacaactttcaaaaggaagaacaaagtanaaggc

SEQ ID NO: 88669 - DNA, 657 bp, Homo sapiens
cggggtatcgatgtactgcccaagcggcggaattcgcatcttgctcctctgatactcagaaaattgcaaatggagcagtaacggtcaccctcatgagcccagtcccatgacccggtcaggggagaccccagttttctactggggttgcctgtttggctttccttacttatcgcctgacccctggtctccttattttttgggataggaattatctgtatgaccgttcgctctggaactccgtctgcctggagccctctgcagctgttgtctggcacgtgtccctcttctccgcccttctgtgcatcagcctgctccagcttctcctggtggtcgttcatgtcatcaacagcctcctgggccttttctgcagcctctgcgagaagtgacaggcagaaccttcacttgcaagcatgggtgttttcatcatcggctgtcttgaatcctttctacaaggagtgggtacgaattataaacaaacttcccctttaggtatccctggagtaataatgacaacaaaattcactgcaggtcggtggaatgatagaatgcattttaaatcacattgtaaacttccaggtgatccatggataggataaataactaagttattataattgtttaggaatttatagtccataaaatatcctccagccaggg

SEQ ID NO: 88670 - DNA, 417 bp, Homo sapiens
caaaaaaagaaatatctttatcaaaagcagaatcccactcatagatgacacacacatggagaggttggagaggtggataaggcttgagcacgtagcagattcatacctcgtatctcatgcactccagacactttcactcactagtgggcagagttgcctgaactgtttatattgggttttctgttttggttggtgcttgctgatgccttataattaaatgatcacatttaatgattaattaccatcttggaattgtgaggattaagttgggtaatcattgtgacagatgctttgtaaactaagatcgctgtggtagtcattaatgctgttctccaaatatttctaatttcaggcatgtggtaggtttgcactgcccccttgaagttacatatagccaggtgagacttgcttaggtca

SEQ ID NO: 88671 - DNA, 402 bp, Homo sapiens
ggctagcgatttctacctgcgctactacgtagggcacaagggcaagtttgggcacgagtttctggagttcgaatttcggccggacggtgtttacgtgtaattgttcaccataggacgcatgaagagtaccaagcaagaggggagaggtaaagttccacaggagggagtcaggaagatcttcttagaggacggcactcttgagatgagtctcgaaatgagagacttggcctttgagagaaaaaaaacagacttccagagcagtatgagcagaggatgaggtgaaactgctacccaagtagtgtgcaacagtgtgttttctgacagcgctatccttagagaatgttacattgatcttgcctacctgcaacaagaaagttcatttggatatatattttttgggtt

SEQ ID NO: 88672 - DNA, 5798 bp, Homo sapiens
gaaacttcatggccacagccccaggccctgctggcattgccatgggcagcgtgggcagcctgttggaacggcaggacttctcccctgaagagctgggggcggcacttgccgggtctcggggctcccgccagcctgatgggctcctccggaagggcttgggccagcgtgagttcctcagctacctgcacctccccaagaaggacagcaagagcaccaagaacaccaagcgggcccctcggaacgagcctgccgactatgccaccctctactaccgggaacattctcgcgcgggtgacttcagcaagacctcgctgccagaacggggtcgctttgacaagtgccgcattcgcccctcagtgttcaagcctacggcgggcaacgggaaaggcttcctatccatgcaaagcctggcgtcccacaaaggccagaagctgtggcgcagcaatggcagcctgcacacgctggcctgccacccgcccctgagccccgggccccgggccagccaggcccgggcacagctgctgcacgccctcagcctagatgagggcggccctgagcccgagcccagcctgtccgactcctccagtgggggtagttttggtcgcagtcctggtactggccctagccccttcagctcctcccttggccaccttaaccacctcgggggctccctggaccgggcctctcaaggacccaaggaggctgggccaccagctgtgctgagctgcctgcccgagccaccacccccctacgagttctcctgctcctctgccgaggaaatgggagccgtgctgcccgagacctgtgaggagctcaagaggggccttggcgatgaggacggctccaaccccttcacgcaggtgctggaggagcgccagcggctgtggctggctgagctgaagcgcctgtatgtggagcggctgcacgaggtgacccagaaggctgagcgcagcgagcgcaacctccagctgcagctgtttatggctcagcaggagcagcggcgcctgcgcaaggagctgcgggctcagcagggcctggctccggagcctcgggcccccggcaccctcccagaggctgaccccagtgcacgaccagaggaggaagcccgatgggaggtgtgccagaagacagcagagattagcctcttgaagcagcagctgcgtgaagcccaggcggaactggcccacaagctggcggagatcttcagtctgaagacacaacttcggggcagccgggcacaagcccaggctcaggacgcagagctggtccggctgcgcgaggctgtgcgcagcctgcaggagcaggcccctcgggaggaagccccaggcagctgtgagactgatgactgcaagagcaggggcctgctaggggaggcaggaggcagcgaggccagagacagtgctgagcagctgcgggctgagctgctgcaggagcgacttcggggccaggagcaggcgctgcgctttgagcaggagcggcggacttggcaggaggagaaggagcgcgtgctgcgctaccagcgggagatccagggagggtacatggacatgtaccgccgcaaccaggcactggagcaggaactgcgggcactgcgggagccccccacaccctggagtccccggctcgagtcctccaagatctgaggccagcagagcgagctgacagcagcaacactgtcagaaggtgccctgagacggccggctcagccttcccttgcactggttggggtggaacctgcagaggccagcccggggctggggaggcgcaaggagaggagggatccagtggggccgtgggctgggtagggtgccttggcaggagccaggacaaggccctcctggcagaggagcacctaggcagggcccagccctgcttcctggagtggatgtggcccagagaaggaggctgggggatcaccagccccaaggtcccgaagggcaggtcagagggagagaggctggagacctgggctggggccttcctccagggaaggaggctggggtgggaacactggcctcccccagaataaaaccatgttttctaccagaggctcagaatacgctgagcctgtgaccagaggatgatggatggtcgggattgaggctgttgacctgggcagtagctcctcccatggccagtggtcagtgggagggtgtgccctgcgcctgtctgcatacccactgggcatgtgtgttgggagcagaggagtcctactccttgcctcagccccacacggttccttagctgccgtgtgggctgaaattcctttctttagcaccagtggagttttcagaaggaacaacaccagggaatgccaaaaaaacaaagggcaagtcaaccaaggcattttgagaacatgaaatgtcttcttggtgggaaggctgggccccaggagtatccacaggctcaggccatgcccctccccgcacccacctcctgtctccctccctccctccataggagtggggggcccctagaagtgctctgcctcattccctgttcgtaggaaggtgcaggagaggaggtgggcaagcttatgggtttcttggtaaagagcctttaccacagcaaggaatgggaacatttccccatcagcaacggggctctagggcattattaagtaggggtgaaatatgattgatttgcattctggaaagctctcccaggaggaagcattccccaccccaccttgcctctgtcctgcgctgggctccaggacggtcagtcctcccagatccctgctctcagctaaggctggtccctaaaacccacacctgcctttggtctctcagaggcctggcttgccctctgggcctttgctcccccgctgggtgcccggcctggaacacaggttctgtctggctgtgtgagtggcgtctctcccttcctttgagggaagctcagctttcttacgcgctcatcgttggacgggctgccatgcattgcgtgcttactgggcgccaggtgctgtgctgggcccttgtgagtgtgggggcacaggctgaattagatgagctcctgccgcagggggccctgcacactgatgtcagctcaccagtctcttccctgacagggcagctcagggaacttctgagaagttatctgcagagagccccccctcactccctttggctaccctggccgtgcctggcagcccctcaggccccacaggtgggtcctggttgtgaagtggagttagtgcacatggatgtcaggggacgggtgtgaggcatgagctgggggggccccctttttcagggcagagaatgaggcgtgtgcactgtctgctgtggggatggtgtgtttatggccatgtaagtggcaggtgtgtgtaaagatgtgcttgtgggtggtgggtgtgtctgagggggtgtgtttgggagcctggcctccaaaagccagtgtctgggttggagacagtgcaggccccttcttggccccaccctctaccccattccttcctgtcagccccagtctgtcttggcactggccaggcttgggtggagcctgtgtcccagacagatcccctaggcctatctgagacccatgcaggcccacacctgagctcctgtctgcctgaggagggaaagggggagtggccaggtcaggcaggccagtcgtctacacacccccttggtacccattcccatttcacaaactcctccaaaccccaaaccccaaacggaaatctctgggacaatggctcctccagagggcccctcagagccaggtgctggccagatgccttgatcacagcctccatggccaggggcctgtcaagccaggggcccacacacctggtgccagggcccacctcggtataccagctcggcagaacagttccccacccagcgattagggagctgggctggccagtacagccagtggggagtgggtgggaggcaccaaaacttggcagctgtgccagaaaccaaagccaggcccagatgtagggggagggcacgagagctgaacctgagcctggggcgtctcggagctggatccccgtcagctcatccaggctggacaaaccagttcctgggtcccccagccggctgggtggctctggggccaaccgaccacaggtgtcactgatcacaggtgtcaccgtagtggctaccacctcagggcagcccctccctccagctggcggggcctcagcttcccagctgccctggcttaaccttccctgcagcccctccccaacaggcttggtccgggcagcctgctctgcggaaggtggcagcctcctggtgctgggctccctgcctctggggcctccagtccttcactcagtgtcatcccttccagcagctccctgggcctcttggtccatcccttcaggcttctgacacactagtggcctcgagtcactgatagtggtgcctcctccttaccttggcaagcccttgtagccctctgagccctcatcctgcaggcagagcccctcagtgctctgagaaacctgccctgaactcaccgcctcccctgcctgggcactccctcctccctgcgcccacagcccccatgccaatctccgtcagctctttctgtgctgctgtaattgttggtttgcctgtctcctttgagctgtgggcattgccggggtagggtggtgtcttcaccacagctccagaaggcactggtgggatgtggagtcaggagcaaccagagaccccccaatactagaatgggtttgagcttggggtggggtggatggggaagacttactctgaatgttcgttcaccatccgtgggcaccaggtctgtgccaagcacagggactccaggggcagctgccattcgttccagtgatgtatttggggccttctcaggtgaggaagccaaggtggccaaggccctcggtcccctgccctgatagggcttacctgtgggtgggggagggagaccacacatgtcaaaggtagtgaaggccgctccaaatagtgactggggccaggcaggcggaaaagagaacagaagagaatccagaagtgttcagacagaactagggacaacagaggggcctccatggtggcatgggtcagcagagcatggagcaggcagaggaagcctatctgtggggctgggtacatttctctgagactcacggaatgtaagtgttgaggtttctgcaaagagggcgcaggccctgcagtgacggttcagatattgataacccatcccccttggcaggtgggggcttaggcatccatattggattcagaaaagaaaaagaatgatgcttcttgcaacaaaaacaaaagtgattatgtcacgagaggagaggctggagggccatgggagttcccagctggctcactcatccgtccaggaggtgggtctcatggtttcattttgctttgggcttacttagagttttggcaaatgcagagttatgtaacgaacccaacaatgaagatacagttctgtcacccccccagcattctcctgtggccctctagtccaccccccgccccaccccagcccctggcaaccactgatctgctttcacaataaccgtatggggttttttctctttccttttttgtgagcggtatttaattcctttgctctaatatgtaatattagaacatattacaaagtagcaagaaaaatacgacattggtgtaaaaataatctacacctcatggaaagaatgaagagccagaaatagattctattctgtagaaaatcttacacaataaaggacttcaaaataagggtaaggaaggatgctttaacaagcggtgctgggataactggataaaaatttgggaaaaaagtcatactatgtg

SEQ ID NO: 88673 - DNA, 367 bp, Homo sapiens
ggctcgagctatcactacaaggggcccgactggcttgattcgggcgtctcgggtgcctagtgttgttctagaaagggtaccttttcttttattacgaccctcacatggggccagggaaatggccgatcatggcttatgccgctctctggccgagagcatggcacagcccctgcgtgggatcctgttaagctgacctccataccctccccacttatattaagagctggaagctatcaaagcttgcgtcagggagatggaggaagaaactgataaacttaaggagcttcagaaccatgtcaagaagcagatgaatatgattccacctccaggccatgctggcccggtgatcatgtccattgatgagaaa

SEQ ID NO: 88674 - DNA, 1648 bp, Homo sapiens
tttcgtcccggggcgagtgggcctctgctcgtgggtggttctcgtggaggtcagctcccgcgtgtctccgctcgacagggtgcttgggcagagcccatcgggtaggcgcgggccatggcgcagtacaagggcaccatgcgcgaggcaggccgtgccatgcacctcctcaagaagcgcgaaaggcagcgggagcagatggaggtgctgaagcagcgcatcgccgaggagaccatcctcaagtcgcaggtggacaagaggttctcggcgcattacgacgccgtggaggccgagctgaagtccagcacggtgggcctggtgaccctgaacgacatgaaggcccggcaggaggccctggtcagggagcgcgagcggcagctggccaagcgccagcacctggaggagcagcggctgcagcaggagcggcagcgggagcaggagcagcggcgcgagcgcaagcgcaagatctcctgcctgtcctttgcactagacgacctcgatgaccaggccgacgcggccgaggccaggcgcgccggaaacctgggcaagaaccccgacgtggacaccagctttctgccagaccgtgaccgcgaggaggaggagaaccggctccgagaggagctgcgccaagagtgggaggcgcagcgcgagaaagtgaaggacgaggagatggaggtcaccttcagctactgggacggctcgggccaccggcgcacggtgcgggtgcgcaagggcaacacggtgcagcagttcctgaagaaggcgctgcaggggctgcgcaaggacttcctggagctgcgctccgccggcgtggagcagctcatgttcatcaaggaggacctcatcctgccgcactaccacaccttctacgacttcatcatcgccagggcgaggggcaagagcgggccgctcttcagcttcgatgtgcacgatgacgtgcgcctgctcagcgacgccaccatggagaaggacgagtcgcacgcgggcaaggtggtgctgcgcagctggtacgagaagaacaagcacatcttccccgccagccgctgggaggcctatgaccccgagaagaagtgggacaagtacaccatccgctaacacccgcctgccagagcggaaaccgggggtggggggagacactcatttctaggccccatcaccagtcacttgatttcgtgaccttgatttcttcccccaaatttaataaagacagagggttctcatgattcacattggttgtgctattgctgatgttatgctttggttgcttggttggtcttttctgagtattttagtgttgccacctggatttgcctgccattgctcctgcctgaagcctgtaattgaaaacccatgactgggccccactgtccagacagaaattagaataggaggccacattttttaccctggtggttatgaagccatggacttgggggcccacagtgaactgagtttgattccccgacacagcctcctccttgctgtgtagttttgggtaagcttattaaacccccatgcctcagtttggtcacctgtaaaaggaaataacaagagcacttactttataagattgatgtgagtattaagtgaattaatatttgtaaaacgcttagctcttaataaatgtttctgttgttattaaaaaaaaaaa

SEQ ID NO: 88675 - DNA, 1928 bp, Homo sapiens
cgcgctgcagaattcggcacgagtcgatggaagccctgcccatactgagccgtaacccaagcaggagcacagaccgagactgggagaccgcgtcggcggcatcttccctggcctcagtggccgagtacacaggtcccaagctctttaaggagcccagtagtaaatcaaacaagccgattattcacaatgccatatcccattgctgcctggctggaaaagtgaacgaaccccacaagaattccatattggaggagctggagaagtgtgatgccaatcactacatcatactgtttcgtgatgctggctgccagttcagggcgctttactgctactatcctgatactgaggaaatctacaaactcactggcacggggccaaagaacatcaccaagaaaatgatcgacaaactgtataaatacagctcagaccgaaaacagtttaacttgatcccagccaaaaccatgtctgtcagtgtggacgcactcacaatccacaaccacctgtggcagcccaagcggcctgcagtgccaaagaaggcccagactcgtaaatgaccccggtgcagctggcgtccaaagggtgacccagactcgtaaatgatgcccttgtggctggcatccagagggtgccacggggtccttatttattgttttcatctatttgggtacgaagtgtgcaaagtcacagaccttttgcaaagaggtttctagacagcagaagaaaacccctctctcagcgctcatctcacgcagaggatgccaggcagggtgaggatgggggagtagatgccgcttttgcagtggctcgcactgctgtggccactgctgaccactgaggctcccagcggagggtgttcacagccaggtcccgggccacggagctcccttacttgaagttctccttcagcatagattagacgtgatccactttgctttcttgcttctcacctcgcccccttgcacattgcctgacaccctcatattggccagctgtaatctcgtgactatgggactgaggctcaatcttggcttggggtgtttgaatgtctatagcaaaggaattcataatgggaaatctttttcatttgagaaattgtatgatatttattggttgtgtctactgccaacatttatatccaattctaagatttctgaaaaaaaattcttatcccttgctgctcagaaaaagtttacggaaaacaccagttcactaaaagcaccgaaatctgcaaagcctgtcttccgctagaacaacgtctacaaatgtgaagatgatgacttctggcacgcggtcatgagggtggggaatggcactaggagctgatgtttgcctcatttaaagtaggcaagccgagccaactgcagccatcattcattaagttttgggtagtgctctaatggtttgttcactttaataaagacagattttggtaaagtagaatatttttcattctgagcatgtttgtcccaaaaggtgatgcacttaagctgacagtcccttcagtggttttgttaggtcacggcttgtcctgtctggattctgcatctggaagcgctgcatgctctcagaggagcgtgccgtttcccctgtagatggatacttttgttttgttgcctatttaaaaacaattaagtggttatttgcagttatttcagaactccaagtaagtggatggctttgggttctttctgccttggtcccaatggtgttgatgcttctgtggagcgcggacattcccaggagcaggtgcgtgccagccatggctgccagacactgctgcaactgaccagctgccggaagattctggagccactaacattagttttgcacatattttcttgggagtgttacttgaatctatctcaaactgcagaaaaaatcaaaagatcaataattgggagaaaaagagacaaatttaactgttacat

SEQ ID NO: 88676 - DNA, 1199 bp, Homo sapiens
gcggccgcgcggcgctgcagccagccgtgcggagcttcgtggagaacgtggagtggcgcgtgctgggcatgccggcgcggcggcgcgtgctcacctacggctgctgctccgagccctaccccgacgtcaccttcacgctgctgctgcgccgccgcgccgccgcctacgtgtgcaacctgctgctgccctgcgtgctcatctcgctgcttgcgccgctcgccttccacctgcctgccgactcaggcgagaaggtgtcgctgggcgtcaccgtgctgctggcgctcaccgtcttccagttgctgctggccgagagcatgccaccggccgagagcgtgccgctcatcgggaagtactacatggccactatgaccatggtcacattctcaacagcactcaccatccttatcatgaacctgcattactgtggtcccagtgtccgcccagtgccagcctgggctagggccctcctgctgggacacctggcacggggcctgtgcgtgcgggaaagaggggagccctgtgggcagtccaggccacctgagttatctcctagcccccagtcgcctgaaggaggggctggccccccagcgggcccttgccacgagccacgatgtctgtgccgccaggaagccctactgcaccacgtagccaccattgccaataccttccgcagccaccgagctgcccagcgctgtcatgaggactggaagcgcctggcccgtgtgatggaccgcttcttcctggccatcttcttgtccatggccctggtcatgagcctgctggtgctggtgcaggccctgtgagggctgggactaagtcacagggatctgctgcagccacagctcctccagaaagggacagccacggccaagtggttgctggtctttgggccagccagtctctccccactgctcctaagatcctgagacacttgacttcacaatccacaagggagcactcattgtctacacaccctaactaaaggaagtccagagcctgccactcccctaattccaaaaaaaagaggaactctacaaaggccaagatcacagagtacagtcttggagggacagaattgtttgtgctgggtattggagctctcagtggggagcacatgggttataatgagaaactgaactgtactgctgcatttcctgtcttccttcctaggtggctgctttgcagggctttggctgtta

SEQ ID NO: 88677 - DNA, 471 bp, Homo sapiens
  misc_feature (1)...(471): n = a,t,c or g
atttgagaccctagtaagagngcnggaattcctggcgcttagaatccagcacgggttccacggaaacgtggcatcatccataggctctctggagaggccgcccggccaggccctccagccccctgtgactccccacacggcccttcggagacagaagtatgccggttcagggtgtgtgggttgaccacagagtggggcaccgtgtgcctgccaggcccacgtgctctggagactgctgtccacacgcgtgtcgtcaaacgctgtccaggccttgggcccagaacagagcctgggggagccgtcgcagtgccccactcctggtggaacggagcctgggggagccgtcgcagggccccactcctggtggaacggagcctgggggagccgtcgcagggccccattcctggtggaacagagcctgggggagccgtcgctgggccctgctcctggtggaacagagcctgggggagc

SEQ ID NO: 88678 - DNA, 782 bp, Homo sapiens
cactgagtccatcgtgcgggcggaggaagacctccgcggacagacatgcgagacacccctgctcctcgttggcaagccgccccatgatgaaggcctacacctgggcacggagacttttggatgcagcctttaacgaaggacgcaggcatgagcctgtcctctgtgacgctggccagcgccctacaggtcaggggtgaagctctgtctgaggaggaaatctggtccctcctgttcctggccgctgagcagctcctggaagacctccgcaacgattcctcggactatgtggtttgcccctggtcagccctgctttctgcagctggaagcctttctttccaaggccgtgtttctcatatagaggctgctcctttcaaggcccctgaactgctacagggacagagtgaggatgagcagcctgatgcatctcagatgcatgtctattctttaggaatgaccctctactggtcagcagggtttcatgttccgccacatcagcccctgcagctctgcgagcccctgcactccatcctgctgaccatgtgtgaagaccagcctcacaggcggtgcacgttgcagtcggttctggaagcttgtcgggttcatgagaaagaagtgtctgtctacccagcccctgctggtctccacatcagaaggctggttggcttggttctgggtaccatttctgaggtcagtagagaaccgtgcttttcaagcagtagctgctggtcatgtgtggctattaaaatttgaattagttatattatcattaactaaaataaaat

SEQ ID NO: 88679 - DNA, 1839 bp, Homo sapiens
  misc_feature (1)...(1839): n = a,t,c or g
gagattgcaaacctcatcttggctgagaactgcgaggctgccctggctcttcatctctataggggaggcaggcttttgcaaggccaccgaatcccttttggagtcatctttggtggaactgatgtaaatgaagatgccaaccaggcggaaaaaaacacagtcatgggcagagttcttgaggaagccagatttgctgtcgctttcacagagtcaatgaaggaaatggcacaagcgcagtgggtcgatccagtgtttacaagggaagtgaaagccaaagtgaaaagagccgctggggtacgattgattggagagatgcctcaagaagatctgcacgcggtggtgaagaattgcttcgcggtggtgaatagctctgtctctgaaggcatgtcagctgcaattttggaggcaatggatttagaagtaccggtattggccaggaacatccccgggaatgctgccgtggtgaagcatgaagtcacagggctactgttttccaatcctcaggagtttgttcatctggcaaagagactggttagtgatcctgcattagaaaaggaaatcgtagtgaacggaagggaatacgtgagaatgtatcattcatggcaggtggaaagagacacctaccaacagctcatcaggaagctggaaggaagcactgaagattgagggccccgcctcatcaaacacctgctctctgacacacagctctgggtgcacactcagagacagagttctggatcacgtgggcccagtgcagttcaaataaaaccagcctcagcggaatcctagaaaatgttagtcgtgagtccccagagccactgcattcatcccatatccttctgtgcgttcagatgctgtcccaggcgtgttcaccagccagtcctgatggaggtgcatgagtgactgggttgactgggacagggaaaggggaactggttttcagggaatttgggagagaatttgattacctgccttagggctttggtgtggacaatagaggcttattttcaagcagtcatggttcagactcctcccgcctgccttctgaccaacctctccccatcgttgccagtttgaaaggcaaaagcaaaacagacgtgtcagctgagccgagtcctcgcaggatttttgttgtgatctcaggactctgacaggcacgtgggtgacccgaggcttctctgaacactagaaagcgctgtgagtgagctcacgcccggcacagctcacttttcaatggtggaattgaaagttgtgctttttagaaaagtggccaggctgcccgcaggccccgcccacctcttggctgaatttgagtggaaaaccaggaaggaacaagcgccacgtcacgcatagcctgcaaatcgcccgcgtgaccctgagatggaggcctgaggctttgggtccagggtgggctcttccccttcccacatcagggacccggggatggatgtcggaagggtcaccagcctccagcctttggcaggatggagcttgggtctgcagggctttgcagccacacagcgaggtcagtccggggccagccgcgccatcatggtaatggtggcctcgccccatccatgtcatccatgtcacatgaggacgtgcagtctttccttgttccttttccttagtgggaattttgcctggggagaacctccacttgaataattgaaatttttttgcattgcctgttgggatttcctttacggacaatggggggaacgcggtgtttcccacctcttgtgggtagaaagcagtctgctttgaggaggcgagaaggcaaagcanggggcaggggctttgctgtgggaagcgttcggtgaaagcgggtttcgacgc

SEQ ID NO: 88680 - DNA, 1826 bp, Homo sapiens
ataaggagaaaagcccagaaagttaccagcatgagaatgaagacggcgaggtggtgcgcgtgcgggactcgtacgtggccatagccaacgcctgctgcgccccgcgcttcccaacgctgggcggccgagtggtgaacgtagcgcagatcatcgagctggtgatgacgtgcatcctgtacgtggtggtgagtggcaacctcatgtacaacagcttcccggggctgcccgtgtcgcagaagtcctggtccattatcgccacggccgtgctgctgccttgcgccttccttaagaacctcaaggccgtgtccaagttcagtctgctgtgcactctggcccacttcgtcatcaatatcctggtcatagcctactgtctatcgcgggcgcgcgactgggcctgggagaaggtcaagttctacatcgacgtcaagaagttccccatctccattggcatcatcgtgttcagctacacgtctcagatcttcctgccttcgctggagggcaatatgcagcagcccagcgagttccactgcatgatgaactggacgcacatcgcagcctgcgtgctcaagggcctcttcgcgctcgtcgcctacctcacctgggccgacgagaccaaggaggtcatcacggataacctgcccggctccatccgcgccgtggtcaacatctttctggtggccaaggcgctgttgtcctatcctctgccattctttgccgctgtcgaggtgctggagaagtcgctcttccaggaaggcagccgcgcctttttcccggcctgctacagcggcgacgggcgcctgaagtcctgggggctgacgctgcgctgcgcgctcgtcgtcttcacgctgctcatggccatttatgtgccgcacttcgcgctgctcatgggcctcaccggcagcctcacgggcgccggcctctgtttcttgctgcccagcctctttcacctgcgcctgctctggcgcaagctgctgtggcaccaagtcttcttcgacgtcgccatcttcgtcatcggcggcatctgcagcgtgtccggcttcgtgcactccctcgagggcctcatcgaagcctaccgaaccaacgcggaggactagggcgcaagggcgagcccccgccgcgcttctgcgctctctcccttctcccctcaccccgcccccaccagcccagtgcgccctgccgccgcgcttgggaggccaagctttaaacatctctggttcctagtttctgattattcggggatgggggggatgggaggggacagggattcacgatccatcgcgtctgcgtttctgttgtcctttcttttccacaacaccctggttttggggggaggcggggtgcatttgcgggcagggttctctgtccttccaagtggggccccgacactttggttccagtcatcgagggggttgggaagggagggagagggggcgcagctcgcaggcgtggcaacttgaccttgggggaatatttcacatccatccagagctcggaatctacagcgtccagccatttccagcaagagcgcttcccattccggagacgtttcaaccctgcagcgggaaaggctgactgggaaatccattttgggtgggcaatttccttcaacgaagccggaaggcgagaagccgcggcggggccagcttgcctgccggttttcaggaatctaaactctcatcttgtgcaatttatcaggtgtggaactgttctactgtgcgtgtggtgtgctcgtggtgaataagatgaaatgtatatcagaaaaaaatctatctctaatttagagtgcggtacataattatatccgcaaataaagaagagacaaaggc

SEQ ID NO: 88681 - DNA, 1880 bp, Homo sapiens
ggaattccttttaaccggaagccatcacctgcagcgtccccagccacaaagaaggccaccaagggatccaagccagtgaggccacctgcccctggacacggctttccactcatcaaacgcaaggtccaggctgaccagtacatccctgaggaggacatccatggagagatggataccattgagcgccggctggatgccctggagcaccgtggggtgctgctggaggagaagctgcgtggcggcctgaatgagggccgtgaggatgacatgctggtggactggttcaagctcatccacgagaagcacctactggtgcggcgagagtccgagctcatctatgtcttcaagcagcagaacctggagcagcgccaggctgatgtcgagtatgagctccggtgcctcctcaataagccagaaaaggactggacggaggaggaccgggcccgggagaaggtgctgatgcaggagcttgtgaccctcattgagcagcgcaacgctatcatcaactgcctggatgaggaccggcagagggaggaagaggaagacaagatgttggaagccatgatcaagaagaaagagttccagagggaggctgaacctgagggcaagaagaaggggaagttcaagaccatgaagatgttgaaactgctaggaaacaaacgtgatgccaagagcaagtcccccagagacaagagctaacagcacgagaagccagttggggactgccccctcctggagcagctcctgggctgtgctctgtttgaagggggcgccctgctcccctcagatcagtcaggaggaagatgactaaggggagggatcctctgggtgatggcctcttcctcctcagggacctctgactgctctgggccaaagaatctcttgtttcttctccgagccccaggcagcggtgattcagccctgcccaacctgattctgatgactgcggatgctgtgacggacccaaggggcaaatagggtcccagggtccagggaggggcgcctgctgagcacttccgcccctcaccctgcccagcccctgccatgagctctgggctgggtctccgcctccagggttctgctcttccaggcaggccagcaagtggcgctgggccacactggcttcttcctgccccatccctggctctgagtctctgtcttcctgtcctgtgcaggcgcccttggatctcagtttccctcactcaggaactctgtttctgaagtcttcagttaagtttgagtttatgactgagtggcctgtactgtcagacgtgaatgggcctgacgggcaaatccatccctctctccctcacagttccaggagcggcttccctcgtctccccttactccacagggagcctcccttgccaggaccagggctgcgacggccatgctggggcaggtgagtgctctgttagctgctcccagtgctgtccccaggctgcagttctggtccctggttgtcaggtaggaagggtgcacttgaagcaggtgctcatctcggttccttaacgtttatagtctgacccctcacttaggctttcctctgccaccccggtccagggaagaggctcgctcccgcccatggtcatcactggtctgtctgctctgttgtctgttctttccctgactccctcccaccgaaggcctgatggctactcacccctctgggatggctatgggagaggaggagtgatggggaccgccaccttttctgcaggaaatgtgcccagcagctcttggtcaaagcactgttgctataagctatctctgggatgcctctaggcccccttccctctacacacctctgggaaaagattacactgtattaactctcgaggagtttcctcaccaataaacagacaacctcaaaaaaaaaa

SEQ ID NO: 88682 - DNA, 1024 bp, Homo sapiens
ttttttttttttcgagggggtaaaaagctctttatttgaagctccagggtggggcagggcactggcctctcaccagaggtcctcacagttcagtttccctacagctcagtgtcaggccccagccacacagtccagctgtgctccgattggcaggcgggtcagacctgcaggttgacaaaaggtgcgaagcccgccatatcctgcagcagcaccagggcctggtgcagcggcggctccacgtcgatgtccacgccgcgcttccgcaagcggctcaggctggactccgccacatggtggcagtgccgcacccgcagcgaacgcagcacggggcagtactcggccaatgtcctgacaccgtcgcttccgacgcggaggcagccggtgaggtcaaggtggtggagttctgggcagttccgagccaactcttgaaccgcggcgtcccccacgttggcgttgacggccagagagaggctgcggagaccagcgccgcgcctctgcgccaggtacacgatggcctcgtccttgagctggcggcaggcggtgagatccagctcctccagggccgggcagcgatcagcgaggccgcgcagcgccagcccgtccacccagtcacagtgcgcgagcgacaggcgctgcaggcgtgggcagccctcggccaaagccccaagcgcccggcgactcagttgcccgcagccgcccaacgccacactccgcagctgcggattccgcgccagcaccggcaccaggtcctcgtctgacagccattcgtgacacggcgccagtgccagctcctgcagcccctcggcatcccgcagcagccgggccaatgcggcccgcgggatctgcggacccacctgcgggcggggaggcaccccaactctcagcccgtcccgcactcctcagccgcctatgcacccctgacctgagttcttttctggcagcctcctgctctcccaggagagaccccactttccctttgagtcgctaccgagtatttgccctttggtgcgtggatcccttccgg

SEQ ID NO: 88683 - DNA, 725 bp, Homo sapiens
ttagtagtccctagtccatgtggtggaattcagaccatgcatttcattcttgcctccactgctctgcacccctgactcactcctcactatttctatgacctcttggttacccactctacgcccctccattgcaccaaccacacattccctggcatcatttctagtcctgactttttcaaaagagcttttactctttgactttcaaatgcacaatgacaacttgaaaacaaggagaagcttagctgacaggtcacacacccagcagttttaaaagaccgagagaactttcggctgtaggggagtgaagaagttgataaatcctttctctgaaacaactataaaactggacaaaactgtcaaaaacaaccattttggagctccagaaattggccaaaggcaaacaacaaattgagaatagtttatttatgataaacttctgaatttcaggtaagagcagagggagtctagggcatttttgctgcccatgaaaaccaacagcttcactgccagagggggctggcttgattgggagcacaaagcacttgtttgagcgcaagtgctgggtaggaatgggagtggctcccacaaagctaggctaaaatataaataatattttaagaaactgagcagagatattaaccgctgcacaacacaaagttcaaagggtctggcaaataaacccccaggcaatggaccacagattaccagactgattcgaaaaaaaa

SEQ ID NO: 88684 - DNA, 5205 bp, Homo sapiens
ggaacctcaacccggtgtgggaggagaatttccactttgaatgtcacaattcctccgaccgcatcaaggtgcgcgtctgggacgaggatgacgacatcaaatcccgcgtgaaacagaggttcaagagggaatctgacgatttcctggggcagacgatcattgaggtgcggacgctcagcggcgagatggacgtgtggtacaacctggacaagcgaactgacaaatctgccgtgtcgggtgccatccggctccacatcagtgtggagatcaaaggcgaggagaaggtggccccgtaccatgtccagtacacctgtctgcatgagaacctgttccacttcgtgaccgacgtgcagaacaatggggtcgtgaagatcccagatgccaagggtgacgatgcctggaaggtttactacgatgagacagcccaggagattgtggacgagtttgccatgcgctacggcgtcgagtccatctaccaagccatgacccactttgcctgcctctcctccaagtatatgtgcccaggggtgcctgccgtcatgagcaccctgctcgccaacatcaatgcctactacgcacacaccaccgcctccaccaacgtgtctgcctccgaccgcttcgccgcctccaactttgggaaagagcgcttcgtgaaactcctggaccagctgcataactccctgcggattgacctctccatgtaccggaataacttcccagccagcagcccggagagactccaggacctcaaatccactgtggaccttctcaccagcatcaccttctttcggatgaaggtacaagaactccagagcccgccccgagccagccaggtggtaaaggactgtgtgaaagcctgccttaattctacctacgagtacatcttcaataactgccatgaactgtacagccgggagtaccagacagacccggccaagaagggggaagttcccccagaggaacaggggcccagcatcaagaacctcgacttctggtccaagctgattaccctcatagtgtccatcattgaggaagacaagaattcctacactccctgcctcaaccagtttccccaggagctgaatgtgggtaaaatcagcgctgaagtgatgtggaatctgtttgcccaagacatgaagtacgccatggaggagcacgacaagcatcgtctatgcaagagtgccgactacatgaacctccacttcaaggtgaaatggctctacaatgagtatgtgacggaacttccctccttcaaggaccgcgtgcctgagtaccctgcatggtttgaacccttcgtcatccagtggctggatgagaatgaggaggtgtcccgggatttcctgcacggtgccctggagcgagacaagaaggatgggttccagcagacctcagagcatgccctattctcctgctccgtggtggatgttttctcccaactcaaccagagctttgaaatcatcaagaaactcgagtgtcccgaccctcagatcgtggggcactacatgaggcgctttgccaagaccatcagtaatgtgctcctccagtatgcagacatcatctccaaggactttgcctcctactgctccaaggagaaggagaaagtgccctgcattctcatgaataacactcaacagctacgagttcagctggagaagatgttcgaagccatgggaggaaaggagctggatgctgaagccagtgacatcctgaaggagcttcaggtgaaactcaataacgtcttggatgagctcagccgggtgtttgctaccagcttccagccgcacattgaagagtgtgtcaaacagatgggtgacatccttagccaggttaagggcacaggcaatgtgccagccagtgcctgcagcagcgtggcccaggacgcggacaatgtgttgcagcccatcatggacctgctggacagcaacctgaccctctttgccaaaatctgtgagaagactgtgctgaagcgagtgctgaaggagctgtggaagctggttatgaacaccatggagaaaaccatcgtcctgccgcccctcactgaccagacgatgatcgggaacctcttgagaaaacatggcaagggattagaaaagggcagggtgaaattgccaagccactcagacggaacccagatgatcttcaatgcagccaaggagctgggtcagctgtccaaactcaaggatcacatggtacgagaagaagccaagagcttgaccccaaagcagtgcgcggttgttgagttggccctggacaccatcaagcaatatttccacgcgggtggcgtgggcctcaagaagaccttcctggagaagagcccggacctgcaatccttgcgctatgccctgtcactctacacgcaggccaccgacctgctaatcaagacctttgtacagacgcaatcggcccagggcttgggtgtagaagaccctgtgggtgaagtctctgtccatgttgagctgttcactcatccaggaactggggaacacaaggtcacagtgaaagtggtggctgccaatgacctcaagtggcagacttctggcatcttccggccgttcatcgaggtcaacatcattgggccccagctcagcgacaagaaacgcaagtttgcgaccaaatccaagaacaatagctgggctcccaagtacaatgagagcttccagttcacgctgagcgccgacgcgggtcccgagtgctatgagctgcaggtgtgcgtcaaggactactgcttcgcgcgcgaggaccgcacggtggggctggccgtgctgcagctgcgtgagctggcccagcgcgggagcgccgcctgctggctgccgctcggccgccgcatccacatggacgacacgggcctcacggtgctgcgaatcctctcgcagcgcagcaacgacgaggtggccaaggagttcgtgaagctcaagtcggacacgcgctccgccgaggagggcggtgccgcgcctgcgccttagcgcgggcggtcggccgagcggcactgcgcctgcgcggagggcgctgggcggggagggacggggcttgcgccttggtgggacctccccaggggcggggctcggggggctccacgccaagggtgggctgcgcctacgcccttgactcagctttcccttttggggaattaggaatggaggatgccccgccctctcgggaggccacgcccaagggcgcgacgaaggaaggagccacatccccaacttgaggccacgcccccagcacctagggggcattttgagccgggatgggggaaacctcgtccctatggaggaggccacatcccggggctctggtaccgggaggcaccacctcatgtcccctggaaaagccataagatgggacccagacccctgggaccccagaccaattgccaagtatggaaatctcagctccctcgagggggggccctgggcaaggggtagggctctctggagcgcccctctaggtggcctggggactggagggaccaggatgctggttggagggtcccggaataccggagtccctttagatatttgtgcaaaaaataaatggggggaggggggaggatgggatttcaaaagcacatgcgcccttgggcgcccaaaccctgggggccgaggggacggctctggttccccacgctgcccctacttccctttgggagtttgcctctccctctcccccaacaaacccagtcctcatatcatagagttcaacacacccatttgacagatggcaaaactgaggcttaaagagctgcttgagacttggccaaggttccaggtgccataccctctgtgcccctcccttaggcctgtgtgccccatggaagggtgggctgagatcgggatgacctgacacagctccctattgctgctaattccccctcggcctcctccaaggggggggaattccaggccaagacccctacttcgcctttccttctccggctgccaagcaggacctttgccctcagccctttctcctgggatctccatgggggatgccatgagggcctcccaccacaaaagagaatttgggatcccctgggcccagggttctccatcccttcttccttttccagaattttccaaataggaaagaacagaaggagaccagaaactctaggggggagaaagagaatgagagaaagagaatgagagagagagaaacacaaacacagtgacacagtgagagcttagtctccaagagcctattcattgattcaaacacccaagccacaggatacctcagatggccctcttgccagctggaagctctttctccaatgagcaaagttacagtgacctggctggagttacctggtgcacataggaccttaggggaaagttcagcgtggactacacttgctctgggatctgcttttccacatgtgtgtatggcacgcctttttctgctggattgggaaggacaagattttgctgtgctagggagaaatgaaaacggggtgagctgagtagctgggtttctggaggatagaacatcagatggggaggctttccgaggtgaagaatgagagggaaccacttactagagagaaaagagctccaggcctggggaacagcacgtgcgaaggccaggagagaagaactgttgaaacaacgagaagggtggcacggctggagctgagccagcaagggggatcgtgaggagccttggggttggggagatctgcagaagcatcagaccaggcagggcctcgtacgcagtcctgaggagttttacttttattctaagacagttggggagctccaggagctgttttaagttggggagagactggattccagcctgcaaaagctgttttgtgaagactaaaaccagtgaggagaggtggaggtgctttggggacactgaaatggattcttggaaagattctgaaggctgtgttgaaaagacacctatagctgtggggacatgactataatcccagcatttggggagaccgaggctggcagatcacttaaggtcaggagtttgagaccagcctggccaacatggcgaaaccccatctctgctaaaaatacaaaaattagctgggtgcagtggtgcatgcctgtagtcccagctactcaggagactgaggcgggagaattgtttgaaccctggaggcagaggttgtagtgagtcgtgatcacacaactgcactccagcctgggcaacagaacaatactccattccctcccctctaccccacca

SEQ ID NO: 88685 - DNA, 478 bp, Homo sapiens
  misc_feature (1)...(478): n = a,t,c or g
natcgagatccctagtccagngtggaggaactcatcctggtgtcccggctggacccccacctccacacccccatgtacttcttcctcgcccacctttccttcctggacctcagtttcaccaccagctccatcccccagctgctctacaaccttaatggatgtgacaagaccatcagctacatgggctgtgccatccagctcttcctgttcctgggtctgggtggtgtggagtgcctgcttctggctgtcatggcctatgaccggtgtgtggctatctgcaagcccctgcactacatggtgatcatgaaccccaggctctgccggggcttggtgtcagtgacctggggctgtggggtggccaactccttggccatgtctcctgtgaccctgcgcttaccccgctgtgggcaccacgaggtggaccacttcctgtgtgagatgcccgccctgatccggatggcctgcatcagcactgtgg

SEQ ID NO: 88686 - DNA, 693 bp, Homo sapiens
gggttgatcgccgcgctcgccccggccacggcgccgcccctgttctcccggccccgctccaccggggctgacggactgacggccaacacagccggctccgggatgagcgcacggacggtattctgaagtctcaggaaactggaccatttaaatgtgcatggcccatgagaaaggcttataagaagccatggcactcccctttcaaaaagagctggagaaatacaagaacattgatgaagatgagcttcttggcaaactctcagaagaggaactgaaacagttggaaaatgttctagatgacctagatcctgagagtgccatgctgccagctggatttcgacagaaagaccagacacagaaggcagccaccggcccctttgaccgcgagcacctcctcatgtacctggagaaggaggctttggaacagaaagacagagaggactttgtgcccttcactggagaaaagaaagggagagtctttatccctaaagaaaagcctatagaaactcgtaaagaagaaaaagtgacccttgacccagaactggaagaagctttggccagtgcctctgacaccgaactctatgatcttgcagctgtccttggagtacacaatttgctcaacaatccaaagttcgatgaagaaacagccaacaataaaggtgggcaaggcctgcaatcactagtgcggactga

SEQ ID NO: 88687 - DNA, 578 bp, Homo sapiens
aactgataatcatatccatgtcgtggaattcgttttagaggcccaggattcttgctattagctatagtggtgttatggaggataaattctttatctctcacttttggaaccccatcttgaacgccagcttggagtccaaaaggaagcaattgttttaagtaaactagttgctgtgtgtcttttctgttgtgctcagcttacagttatagaggacctcaggatttcaattcttttgtcctcgagcagcatgaatatacaggtaaaatatttccaaagtgtcatggtaagtaacacgtgattgcatccatgcctgtctaggtaatgtagaccaagctaggttagccacacttggcaatgaatgaatttcataaatttaattcatataatctaaatttttcccccaaaccaaaagttgattctgaactttgctgcgttgttcatggcctttggtttggtggtacttggctatgctaatgtgtatgacgtgacaagttgtcaccagctgcaagctttatccatcagccacttaagtttctgacctgctgtctatcaaatagactcttaacaagcttactgct

SEQ ID NO: 88688 - DNA, 1090 bp, Homo sapiens
ttttggcagctacattaaaacatgttttgaaaagcattaaaaatatttgctgctataaaacctccgccgcaggcaggagtttattgggaaccacgagtgtgcggtgctgggggcatctcttaggcgggcaggacggcccccccaggctcaactcaggacaaccccaacgggactgagcggccccatggccctcggcctgtggccactgagctccgccttccccgggctccctgaggaagcagagtcctgacttccaggaaggacaggacacagaggcaagaactcagcctgtgaggctctgggtggctcctgaggccagaggacgccttccgcgatccatggctcagcatcgtccttctggcttcccagccccgggccgaacgttcgggttaataagcagagcagttattcggctcctggcaggagctcccccgttagtttccacgttgtgagcacattcatacttaagactgtttctctttgtgttttaagcgtctgtctctgtagtaaactgaaatgttaacagaaatgcagctgggcccctcacagcatggggcaggaggtgggccccctggtgggtggggctagaaggtggccttggagtgtccgaagatgcagatggggaagtgcttcacgtgcgaggaccactgcgcggccagctggaagaacttgacgtcgctgcactccacgccgtcgatgaggactgtgggagagggctgcctgaccgcctgcccccctgcccggcctgcccaccctatccacctgcctgcctggcccaccaggctgggtggcagccgggcgtacaggatgagaaggagccccatgctggagggcatcaacactttcctcagggactcgggggctccagggccatgctggctcctgagggacgccattcctgcccctgccctccacactcagagccctggggggtggggagggcagcatttcccccagggctgcctgcaggtggaaggagcagaccccaccaccttccgccaggcgctgctcgtccacatccacttccacctgcacaggtggggaagaagacagtgggagttccaccacacggactagggtctcatttccc

SEQ ID NO: 88689 - DNA, 461 bp, Homo sapiens
  misc_feature (1)...(461): n = a,t,c or g
agcggntgnnnnnnccttggctacagtagcctaggccagggacgtggaatgcctcggccgctgggccgaactactgtctgccctggacgagtcccgtgccagcatcacctctgtcaccagcttctctccggacgacgtggcctccccgcagggtgactggaccgtggtggaggtggagaccttccactgagccagaccacagccccgcctgctacaccccacccctgccttaggatccgcccctccgggtacgccgtttgttttagaccccgcctccactgccctggagccccgctgggtggattagtcttagctccctagagcctgagcctttggcctcggaggctcgggacctacccacagctttgacctaggcccgcccctcgagctccgcccctttggcctaggacacgccccgtttccccgagtcccgccccgtgtgcagtgtattgcccaccccc

SEQ ID NO: 88690 - DNA, 474 bp, Homo sapiens
  misc_feature (1)...(474): n = a,t,c or g
nggggaggccggcctnnnnnnnnnccttgacctgcctagcatcgngcaggaccnnctatattgnccttcactggtgcatcatgaccttctggatcgtccactgtgagacagaattctgtatttccaaatgggaagagattgtgttcgacatggtgggggggattatctatatcttcagttggttcaatgtcaaggaaggcaggacacgctgcaggctattcatttactattttgtgatccttttggaaaatacagccttgagtgccctctggtacctctacaaggctccccagattgcagacgcatttgccattccagcgctgtgtgtggtgctcagcacctttttaactggcgttgtttttatgctgatgtattatgccttctttcatcccaatggacccagattctgtcagtcaccaagttgtgcttgtgaggacccagccgctgccttcactttgcccccagacgtggtcc

SEQ ID NO: 88691 - DNA, 466 bp, Homo sapiens
  misc_feature (1)...(466): n = a,t,c or g
cacagagaccacttcgcatnggcgnccaatncctgcaaggggaggaacgagagctgaggagcccatacacaggacctgaagccctaaagaaaggccctctgctcatcaagaaagtggctaccaaccagggtcccaaagcccaacctcaggaagaaggccctacagatttgccatgtcccccagaccctgcttctgatactaaggacgtatccaggagtaccacaaccaccaccagtgctaccaccgttgccactgagcccacatcccaagagacaggcccagagcctaaaggcaaggacagtgccaaaaggttctgtgagcccatcggggagaagaagagtccagccaccatcttcctgactgtcccaggtccccactctccagggcccatcaagtcacccagacccatgaaatgccctgcctccccattcgcatggccgcccaagaggctggctcccagcatgct

SEQ ID NO: 88692 - DNA, 469 bp, Homo sapiens
ttttttttttttaaggtaagaagatctaatgcatcctatatccagtaagtagaattatctcttcatctgggacctggaaatcctggggcagatccaacacatcctccgctgcggcgtcaggaaggacgaccgcacgggcaccggcaccctgtcggtattcggcatgcaggcgcgctacagcctgagaggtgacgccgcgggcccctgcgggacgggtggcgggaaggagggaggcgcggctggggagagcgctcgggagctgccgggcgctgcggaccccgtttagtcctaacctcaatcctgccagggaggggacgcatcgtcctcctcgccttacagacgccgaaacggagggtcccattagggacgtgactggcgcgggcaacacacacagcagcgacagccgggaggtaagccgcgtcccagcggctccgcggccgggctcgcagtcgccccagtgatgccgtgg

SEQ ID NO: 88693 - DNA, 493 bp, Homo sapiens
  misc_feature (1)...(493): n = a,t,c or g
natcgagaccctaggcagtgtggngcaattcgtccatattggtgtgaaaataatataataggaataggaaaattgtccacggctgatggtaaagcctttgcagatcctgaagtacttcggaggttgacatcgtctgttagttgtgcgttggatgaagctgctgctgcacttacccgtatgagagctgaaagcacagcaaatgcagggcagtcggacaagtaagtacatttttgctgccatcagtatgaaatcattttcttaaaaataataacaaatagctaacatttactgagcatttattttgtgcctggctggcactgtgctaaccacttaacatgtgatgtcttatttagattcacaaaaactttataaggtatagattttgtttttactcccattttacagatganaagttaaagagagatgagtaacttaatcaagatcaaatagataataagtggcagagcaccagtgtctttccgactggcaggcg

SEQ ID NO: 88694 - DNA, 403 bp, Homo sapiens
tccacgtggagttgcaccaacagccccgcgccgtcctcctccgtgtcctccaattccacctccccctacagctgcactttatcgcccgccagcccggccgggtcagacatggactattggcagcccccacctcccgacaagcaccgctatgcacctcacctccccatagccagggattgtatctagagctgccatgtctgctacccacgccaggccttagtgggttccctttcctgtccccagacgagccctcctcccttcccctgcccctcctttccacgccctggaaaccatctcacttcacagggcaggtgtagcctttctgattcctcggttgtttcttgcatttcttggctttgggtatccttcattcagacgggctctgatttactgaaggtgtgag

SEQ ID NO: 88695 - DNA, 436 bp, Homo sapiens
ggaattcggccttcctgccattggagtggaatgaatggagcaggaaaagaaagtctgggatctgatatgtaaatgaacttggcagccatccggcagcagggaatgtcattggtacactttgggcccacctccagggtttgcagccaatgacggtgttgtctcagcccactctccccttcttgtttctcctggctttccgcacacccctgaggcccaggacccatacctatgagtctcccattcagaagtcttaagaaaggggggtctaccacattgcaaaccctcagtcgctaagagcccatgatggggacaggactcaccagctccatgcaccgccggctggcctctgcctcccgctgcaccagctcttccatgtcggccttcagctcttccaggcgccgctggtagtactggctgctctcccgctgctgggact

SEQ ID NO: 88696 - DNA, 567 bp, Homo sapiens
  misc_feature (1)...(567): n = a,t,c or g
tgtactccttgctagggacagccagtatcctcaggcctgttctcttttgcccacatgtccctttttaaatgcaccaccatcacagtggtgacaatgtgacttacggacagagccccgtttatcttgtaggtgacataagcgctctgcggcccagtggactgcggctggtgaccccagcactgacgtcccgaggacttttggaaaaagactttcaaaaagtatcccactttattcacagaggtaaggataaaagtttggaagttgccacatcttattgtgtgtatttagattctgattgtgatgagtagctgagaccctgccactgaaagacaattctgcaccaaggctgagtgttggggtgggagacagcaaaaaacacatgtaaatcaccttgtntgagagggttataaatttgggctgcccaggacatctgtccaagggtgggtgcatctctagagtaattgaggtaagcatggagaccttgtgccctgccacactccccagntgggggacattctgacatttgtgcctcggcccccagccattgtaccccctttggtgtgtagt

SEQ ID NO: 88697 - DNA, 641 bp, Homo sapiens
gtacttgactgccgagatcctggagcttgccggcaacgcggcgcgcgacaacaagaagacgcgcatcatcccgcgccacctgcagctggccatccgcaacgacgaggagctcaacaagctgctgggccgcgtgaccatcgcgcagggtggcgtcctgcccaacatccaggccgtactgctgcccaagaagacggagagccaccccaaggccaagggcaagtgaggccgcccgccgcccccggggcccctttgatggacataaaggctcttttcagagccacctaccatctcgagaaaagagccgcactgatcctgcagttctttataggccggaggcctgatcaccctaggctcatgaatgagcgcagtggccatggggaagggcgcaacgggaaccgagaccctggggactgattgggctgcatacttgcgaggtgggcaacgtgttctgttaacaacagggaaccctcgtccacaggtggccaccccttgctcttgagtcccacccaaaacctctagtagggttttaataacgctcaccgtaaaggtgtcttcataattactagtgacaagttctcttgactctagcaaggttcccgtgtggtcatcaagtacagaatgcaatttcttaatgatttatc

SEQ ID NO: 88698 - DNA, 1240 bp, Homo sapiens; identical to SEQ ID NO: 64420

SEQ ID NO: 88699 - DNA, 779 bp, Homo sapiens
ctggaccacatgcacctcaaatgcaagtgccacgggctgtcgggcagctgtgaggtgaagacctgctggtgggcgcagcctgacttccgtgccatcggtgacttcctcaaggacaagtatgacagcgcctcggagatggtagtagagaagcaccgtgagtcccgaggctgggtggagaccctccgggccaagtactcgctcttcaagccacccacggagagggacctggtctactacgagaactcccccaacttttgtgagcccaacccagagacgggttcctttggcacaagggaccggacttgcaatgtcacctcccacggcatcgatggctgcgatctgctctgctgtggccggggccacaacacgaggacggagaagcggaaggaaaaatgccactgcatcttccactggtgctgctacgtcagctgccaggagtgtattcgcatctacgacgtgcacacctgcaagtagggcaccagggcgctgggaaggggtgaagtgtgtggctgggcggattcagcgaagtctcatgggaagcaggacctagagccgggcacagccctcagcgtcagacagcaaggaactgtcaccagccgcacgcgtggtaaatgacccagacccaactcgcctgtggacggggaggctctccctctctctcatcttacatttctcaccctactctggatggtgtgtggtttttaaagaagggggctttctttttagttctctagggtctgataggaacagacctgaggcttatctttgcacatgttaaa

SEQ ID NO: 88700 - DNA, 1937 bp, Homo sapiens
aggagaaccccaaagcggcgaagggaagcatggcacaccaagaggacgccccagagaagaaccccataagggggtcacttaaggaggaggtagccctggatttgagtgtgaggaagcccacagcagaggcctcccctgtcaagacttcccgttctgtggagcatgccaagcctactgcagccatggatgtgtccagatgtgggcaacatggtgtcagatctgccagggcctgaaaaagatagacacagaaggcaccagggcttgcctggggtgccagtgaccacagatgccatgccaaggaccaacttccacagctctgtgggccttcatgttccgaaagttcaagatcctccgtccggcacctttgcctgcagccgtggtcccgtccacgcccacctcagctcctgctcccacacagcctgcacccacccccacatctgggcccattggactgcggattctcgctcaacagcccttgtctgtgacctgcttcagcctggcactgcccagccctccagccgtagctgtggcctcccctgcccctgctccagctccatcccctgctccggctcgagctcaggctccagcttcagcccgggatccagctccagctccagctccagttgcaggccctgctccagcatctacttcagccccaggggactccctggagcagcattttacaggactacatgcgtccctgtgtgatgctatttctggctccgtcgcccactctcctccagagaagcttcgcgagtggctagagacggctgggccctggggccaggctgcgtggcaggactgccagggtgtgcaggggctgctggccaagctgctgtctcagctgcagcgcttcgatcgcacccaccggtgccccttcccccatgtggtgcgagctggcgccatcttcgtgcccattcacctggtgaaggagcggctcttccctcggctgccacccgcttctgtggaccatgtgctgcaggagcatcgtgtggagctgcggcccaccacgctgtcggaggagcgggcactgcgggagctcgccctgccaggctgcacctcacgcatgctgaagttactggcgctgcgccagctgccggacatttaccccgaccttctcggcctgcagtggcgcgactgtgtacgccgccagctgggtgagcatggggcagccccagtggccaccggagctgtgtgagcaagtgacaggtgtgtgtgctgtgtgagtgcgtcacagctggggctgagtgattccaaggactcctgcccgggtagggggctttaggatgagctctaggtacccccaccccttgaccctccagacaatcagtgagcaccttcatagcctcttttgtaggcttctgaacatgccagctgctctgtccccatggaaactcctcggcctcccctggtgctgcaccttcttggattccctcctcctctgcctgtgccttctccatctttggtgcagtgtttccggcactctggttaggccctgttttctagctgagataatttccctgatctccagcctagcatcccctttgtgagctctagccctaaataacccactgcatgctgggcctcagccccctgggtcctctctccccacactgaaactcatccccaaatcaacactccccgagccttccccctcagctcacttccccacaaccagttcttttcccatgtcagtgaagggcaccccctttcacaaagctcctcatgctctagacctggtgagggccacagctgcctttttgaacgtgtagttttgcagtcctccccggcccttgcatacacagaagtgtgcgcataagtcgcattgttttgtggtttgcttttcctctactaaatgatgtgcctgctgttctccagcttgttttcttttaatgtcctggaggaccacacaactgccgaagtgttgtgtggcgtgt

SEQ ID NO: 88701 - DNA, 2304 bp, Homo sapiens
tggcgccggaaccccgggacgacccacgcgtccggcgaggtggggtaggcgggcaaggcgggcgccgaggtttgcaaaggctcgcagcggccagaaacccggctccgagcggcggcggcccggcttccgctgcccgtgagctaaggacggtccgctccctctagccagctccgaatcctgatccaggcgggggccaggggcccctcgcctcccctctgaggaccgaagatgagcttcctcttcagcagccgctcttctaaaacattcaaaccaaagaagaatatccctgaaggatctcatcagtatgaactcttaaaacatgcagaagcaactctaggaagtgggaatctgagacaagctgttatgttgcctgagggagaggatctcaatgaatggattgctgtgaacactgtggatttctttaaccagatcaacatgttatatggaactattacagaattctgcactgaagcaagctgtccagtcatgtctgcaggtccgagatatgaatatcactgggcagatggtactaatattaaaaagccaatcaaatgttctgcaccaaaatacattgactatttgatgacttgggttcaagatcagcttgatgatgaaactctttttccttctaagattggtgtcccatttcccaaaaactttatgtctgtggcaaagactattctaaagcgtctgttcagggtttatgcccatatttatcaccagcactttgattctgtgatgcagctgcaagaggaggcccacctcaacacctcctttaagcactttattttctttgttcaggagtttaatctgattgataggcgtgagctggcacctcttcaagaattaatagagaaacttggatcaaaagacagataaatgtttcttctagaacacagttacccccttgcttcatctattgctagaactatctcattgctatctgttatagactagtgatacaaactttaagaaaacaggataaaaagatacccattgcctgtgtctactgataaaattatcccaaaggtaggttggtgtgatagtttccgagtaagaccttaaggacacagccaaatcttaagtactgtgtgaccactcttgttgttatcacatagtcatacttggttgtaatatgtgatggttaacctgtagcttataaatttacttattattcttttactcatttactcagtcatttctttacaagaaaatgattgaatctgttttaggtgacagcacaatggacattaagaatttccatcaataatttatgaataagtttccagaacaaatttcctaataacacaatcagattggttttattcttttattttacgaataaaaaatgtatttttcagtatccttgagatttagaacatctgtgtcacttcagataacattttagtttcaagtttgtatggtagtgtttttatagataagatacgtctattttttcaaaattcatgattgcagtttaaatcatcatatgacgtgtgggtgggagcaaccaaagttatttttacagggactttattttttgatctttatttgagattgttttcatatctatctaaattattaggagtgtgtgtatcagaagtaattttttaatgtcttctaaggatggtcttccaggcttttaaactgaaaagcttaattcagatagtagcttttggctgagaaaaggaatccaaaatattaataaatttagatctcaaaaccactatttttattatttcattatttttcagaggccttaaaattctggataagagaatggaggaaaatactcagagtacttgattattttatttccttttattaaaaaattacttctatgtttttattgtctcttgagccttagttaagagtagtgtagaaatgcatgaacttcatcctaataaggataaaacttaaggaaaaccacaataaaccatgaaggtgtacacatcttataacacagataaagttttggtgtgctacctattcttgagagagtgagtgagtgtatgtgtttaaaggaaacaaaatgggagaaataagttttaaaaaaatcctcattttgttaatattcaaaagatggactgagcttccacttgggttttatcttgttttaattgtttttgtatcaaaacttgaaattcctctatttctattgggatataaaagccttccccttcagtgaagaaaacatttattttttatttgattcctaggatttagtaaactctagctgtctatttaaaatgtactgaggcacaacaagtattatactggaagacttgccaaactggcaaagct

SEQ ID NO: 88702 - DNA, 1050 bp, Homo sapiens
tttttttttataaaagcccttgtaatgttcaacacttcttatgaatacaagcaaattaagttgtttagattcaatgacaggctgtcatattgcaccatacaaaaacaaatttcatcaaagctttcagtcttacagtatatacagcaatgcattcatattgtaaaagggtattttttgtgtacagatgaagcaaaacaatatttttactggctgaaacaaaaagtggaacaaagtctccaacaatagaggtcagtggcacctactcctgtgtggcttttgtctctttactgagcaagaggcttgttttaggttttctttgtcctctgttctagttcatgctggtgtttaataagacgttctatttctgttccaagtgtttgtagattttccttcaaagtaatattttttagtaacgtatcctccaaaacagcctgtaattttcggttgatttccaaagagagctccaatgttaatccattgtcagctggatgggatgtatataaagatgccatgatgccaccccgtctacttaaatgaactttgttaaaatcagatgcctctgaagaaagtgtgcctgattcttctcgtaaaatataactttgaattatttttgtttttttcctaatttcttccaccagttgtttgatgtggtcctccataaattctatcttttcatttttccgggcatgtgctttttgcagcctaactattctctcaatcaacatggccttatctacttgtggaaagttatccacagctactgaggacccagtattttctggagatcgatcttctgcactgcttcgagcattcagggaccctgatgaactagaacgacttcccatgctgctgacttctttgtcatagcttccactctcaacctgatctaattttcttcgtgcttgctgaagttgtttggtgagatccttgatactagaggcatgtttacgtctctgagttactaactcatcttttaattcttctacctgggtactcaatgctttaacttctgtttgtctacaagcgagttcagcttgcagagtttggact

SEQ ID NO: 88703 - DNA, 908 bp, Homo sapiens
gaggatcgatcgcgtctgcagtttagcctggcttggaataggcgctccccagccatcagtcttgggatggagaggtcgcggccgcggcggaggccgagaggccgagggcgggaagtttgctctcctcccgcacttggcaagcagcgccgctagttctgattgagtcatcgggctccaatgcgtggggatgtttaccgccgtttatccgggatagagactccatcgtgctgacagcatccttttattcaccgcctccgaatttgcaaagaggaggaaggagggacttcttggcttctcccagcatagccccaggtacctgctcttgaacgcactttgttgttccattttctgtcctttcagttaatcaagtttccgtcactcagtaagttactactgaaaaatgatgaaatatttgttgaataaatgtgagagtgggtaggaaaactacttggaaatgagtattaccaataacatcttaccactttgattttaaggcattcgtctgtggaccatagctattgatgaagtaggtcttgttattttgttatgaggaaattaggcagagtttatgttattaaatactttcccgaagttattcaactgatagtaagaggtggatttgggattgaacccaagcattccttttcagactgtgtgatcttttttgtttgtttttggttctttggtttttggtggtggttattttctattcctttttctgagtctgtggtcttaatctcaatgatacagtcgtcttcagttatcttaaatagtaatccatatggctaccggggagtcgttggaatcagccttgggaatgtaggtatggatttactgtggaagacctcaaaaactgcactgatgaatttgaatttttagaaaaaatctacacatctccttactaattt

SEQ ID NO: 88704 - DNA, 1950 bp, Homo sapiens
  misc_feature (1)...(1950): n = a,t,c or g
tttcgctcggctgcacgaattcggcacgaggaaaaggccaagatgatgaagtgagaacgttgatggcaaatggcgccccattcaccacagactggttttccaaattgagagtctcctgtggatatataggtgataattgtaagaatggtgcagatgtgaatgccaaggacatgctgaagatgacagctttgcattgggccacagagcgccaccatcgagatgtcgtagagttacttatcaaatatggagctgatgtccatgctttcagcaaatttgataaatcagcctttgacatagctctggagaaaaacaatgctgagattttggtcatcctccaggaagcaatgcagaatcaggtgaatgttaatccagagagagccaaccctgtgactgaccctgtgagtatggctgctccattcatcttcacgtcgggtgaggttgttaacctcgcaagccttatttcttcaaccaacaccaaaacaacctcaggtgacccccatgcctcaacagtacagttttcaaattctaccacctcagtgctggctacccttgcagctcttgctgaggcatcagtccccctctccaactcacacagagccacagccaatacagaggaaattatagaaggaaattccgttgactcatcaatccagcaagtaatggggagtggaggccagagggtcatcaccatagtgactgatggagtccctctgggtaatatccaaacttcaatccctactggaggcattggccacccatttattgtaactgtgcaagatggacagcaagttctaactgtacctgctggtaaggttgcagaggagactgtaattaaagaggaagaagaagagaagttgccactaacaaagaaaccaaggataggagagaagacaaacagtgtggaggaaagcaaggaaggcaatgaaagagagctactacagcaacaactccaggaggccaatcgaagagcccaggaataccgacaccagctcctaaagaaagagcaggaagcagaacagtaccgtcttaagctggaggccatagcccgacagcagcccaatggagttgatttcaccatggttgaagaggtggctgaggtagatgctgtagtagtcacagagggggagttggaagagagagagacaaaagtgactgggtcagcaggggccaccgggcctcccactagggtttccatggcaactgtttcatcttaatatgcaagggccacaatttgcactgtgttcatattaatcctcttttaaaaaaggaaatatacagaagacaaacattgtataaaaactaagagtgtctttaagaagaaaactatagcagggtacaatgcttgggctcaggaagtttctctgtgcaactagaaaattcaaagccatatttagggaacattttttctgaggggccaaaagaataaaggaccaaatttcttagctcatatcattgctttaaacatagaagtaaaagaatactgcatgttgtgggttgannnnnnnnnnnnaaataactgactttctcacaaaagattttaagataacatttctaatatatatgcaccaatatatatgcctttaataattataccatcaagtgacctgaaaatgccccttagatttatgatgcgtatctgttggaaaaaccaattggaagggaagttagacaagctttggggaagagaaaaggaatatagtccatttccaaaggagcaggaactcccaaccttaagttaatttcactgaagagaattttcccnnnnnnnnnnnnnnnnggaaacaaaggggattttaacttcnnnnnnnnnnnnngggggggnnnnnnnnnntttttttaaacttgggccggggggtaaaccccttgatctcgaactttttggatggcaaagggggggggaatctctttctaggaaattaaccctctcttttgtaaattcttatcactcgg

SEQ ID NO: 88705 - DNA, 1909 bp, Homo sapiens
gcaaggtgaccgccccacggcggccccagcgctacagcagcggccatggcagcgacaacagcagcgtgctgagtggagagctgccgcccgccatgggccgcaccgcccttttccaccacagcggtggcagcagtggctatgagagcctgcggcgcgacagcgaggccaccggcagcgcctcttccgcccctgactccatgagcgagagtggggctgcctccccaggcgcccgcacccgcagcctcaagtcccccaagaagagggccacaggtctgcagcggcggcgcctgattcccgccccactgcccgacaccactgccctgggccgtaagcccagcctccccgggcagtgggtggacctgcccccgcccctggctggctccctgaaggagccgttcgagatcaaggtgtacgagatcgatgacgtggagcgccttcagcggccccgccccaccccgagggaggcccccacccagggtctggcgtgcgtcagtacaaggctgcggctggcggagcgcaggcagcagcggctgcgggaggtgcaggccaagcacaagcacctgtgtgaggagctggccgagacccagggccggctgatgctggagcctggccgctggctggagcagtttgaggtggacccggagctggagcccgagtcggccgagtacctggcggccctggagcgagccacggcggccctggagcagtgcgtgaacctgtgcaaggcgcacgtcatgatggtcacctgcttcgacatcagcgttgcagccagtgctgccatcccggggccgcaggaggtggacgtctgaggctgggcgccggacaagaggagggggcgtgcagcgggctggaggacgggacgtgggacggagcgaggatgtggtgggggctgcggggggaggatgcggaggggtttctgtgcaggacgggagtctcagagaggagacggagtgtgggggagggagggccggccacgcggtggacagagcgagggtgccagggtgacccgaagaccgtcaccacccgacagcaacgcaagtgcctttgaccttgatttggacttttctcccttttgcatttggtgctacagacttgagacaccagcagaagttgtgttcagcccggccccgctgcgcctgtccgggccggggctggcgccggttgtgtttgtgtccaccttgccttctttgcagccaagcagtttttgtggagtgggacttacctgcacgccccaggggtctttcaggattcaggatgacttttcttttacaatggtttcctctcggcagagcccgggttgtgggggatctgtgtggggttctcaacgcagatccatcctggggtctcccgggcagggatggctgacctcgagtcccctcccttcccgagaacccgctctgtcccgagggcagctaacaagggctgagccccaggtacaggttgcctcctccacggcaggaatttttaccaaaaccacaagcaaaaaacaaaacagaccaccacgaccaacaacaaagatggggggtagggttttgtaaaggttctgttaggttcatatttttatatcattttgcccataaatgcggaatttgccgtgggaatttgaagacaaatgatctatgtttttatggttttctagggaaggtgttctgggggccgggctctctccagctgtgggaggcctgctccctctggggggcaccctgggcagggtgggggggccttgggaggcgcttcttgccaaatgcagacgaggggtgagcctgccagcgtttgcgacgtccccgcacgacaggctcatactttctgaggatcgtgcatagcataggacgtctgaacctttgtacaaatgtgtagatgacatcttgctacagcttttatttgtgaattaaagatgcatcgatggtta

SEQ ID NO: 88706 - DNA, 2211 bp, Homo sapiens
  misc_feature (1)...(2211): n = a,t,c or g
cgttcaaaataaaaatgtttttaaaagtgtaatttcctttttatttgcatctgtttatgactgaaaaaatgactagttattatgaagacactactgttgaagatggatattttaacatggagtttcaacaaaattacttcttgagacagagctgatgtgttttttaaataacgtgattttaagcatatatttgaacaaaactaaaacatttagtattatgaatatgaaaaaagatcagtaaatcaatgtactcttctaggctgaattaaggtagactatttaaggtttcaaaaaagtttggctggggcagaataagttttacaaaacccatgccatccaaaattaagatgacatgtagcagcaagaagtattccaatgtctcataaccagttctcgcaagcaatgtgtattccttactttaaggaagtgtcaaacaaatagaaaaatctggaagaatttactaagtgtaataaattagaggtaaatcgtaataaaagaatttatgtctcacaaaaatattcacaagtgggagttttcttctaccaacttctcagagtccttctagccccctcttcacttctgaaagatgggatttaccaaaatctggtttacatttaacttttcagggacacatgacctgaaaagaaagatgtcagataatactgacattgcctcatgcactttctttgtatcagtccttcttctgtaagtaatcagaattgggtccaaatggcatagaatcaaacattatgtatcatgccaaataccacttcctgcccaacaaaatttcatttttctccagtaatgaagaggtggacattcttgttggactgtagcatctgtgccgcccgctccacaccaaccacggcagctaacctctgggcatcatatttggagtagagaacagtgcaggtccacgtggcctcttctcctctgttggtggctctcagcatattacagatttcactgtaaaagtgtggatatgtcggcagttcatagaaaatcaggttcctgatgccttttattgtataccttttgtagaaatggaagcgctctgtgaaaagtagaaactgtttctctccttgaaggaagaagtgtctggccctggagacaccagacttctgcgtgtactcgcagatgtgggtaaaattcaattcctccttcttgaagtaatttcgaagacgcacgaagtcaaagtaggaggggatatagatgagcgtgtgagacatgactgcatcacgatactgtggcaaaatcttgttcacaaaaaagttaaacctggcatcaatcactgaagctaggttttcagcttccatcctctggaagacatgtgggagctgcaccaggacatgactgatagagcctgtcattgggacattcctcacggccacctggccttgcatgttgacacagtacttgttgaacactgagttgatctgggcatcctgaagggccccaaatagcagtgtctggcgatagtacttggaccaattattgaggctccacatccgcactcgagaaaagtctaccccatgtgagtccaggggtagtaggttcatgtgattcatcaaatgcaggacatgctcccagttctgcatcaggtaaatgtcagcttgatcaatgatgagaagctcgatagaagacagaaagtcaaaatctctcttcttctctccttctccaccaatgatggtcctcaagcccaggggggaagcaatgaggatatccgaggagtaaaacggggcatagagtcggatgcttctctgaagtattgccactccaatcctgaagtggtcatcaatattgcccacaaatacggcttcataatcctcaggcctcttcaagttgggtggtctctcctcgggatctgatccatattctccctgaaacctctttttgttgctcacaatgattttcttcttgctgtcaccctcgaggaggctgatgaagagctgcaccacccgcaaagcagcttcccggaatggcaccactatcagtaccttgggccttgttaacccttggtctctgaagtcatcatcatcacccactccaaacttctggcttcggcgtctgctattgttgccaagcacctgggcattgaaattgagaatgtgatttatcacatgcaggcaatacacatggcggatctcttctccgttcgaattccnccgctctggccgagtggtcatcaaagnnntctatnccctccttttg

SEQ ID NO: 88707 - DNA, 1404 bp, Homo sapiens
  misc_feature (1)...(1404): n = a,t,c or g
aagcagactttcaatctaaatccaaatctgatacttcgaggtggaatgaagttctatgaatgtaaagaatgtgggaaaatcttccgatataactcaaagcttattcggcatcagatgagtcatactggggaaaagccctttaagtgtaaggagtgtggcaaagctttcaagtccagctatgattgtattgtacatgagaaaaaccacattggagaagggccctatgaatgtaaggagtgtggcaaaggtttgagttccaacacagccttgactcaacatcagaggatccacactggagagaaaccctatgaatgtaaagagtgtggaaaggctttccgtaggagtgcggcatacctgcagcatcagagattacacacgggagagaaactctataaatgtaaggaatgttggaaagctttcggttgtaggtcactttttattgtccatcagagaattcatactggggagaaaccttatcaatgtaaggagtgtggcaaagccttcacccagaaaatagcctccattcagcatcagagagttcacactggggagaagccttatgaatgtaaggtgtgtgggaaagccttcaaatggtatggaagttttgttcagcatcagaaattgcaccctgtggagaagaagccagtcaaggtccttgggccatccctggtcagtccccagtgctcctctccagccatacctcctgttcttctccagggatcctgttctgcttcagccgtagctgtgccttcactgacctttccacatgctgtgctcattcctacctctgggaattttttcatgctgctgcctacatctggaataccttcttcatctgcccaaatagtgcgtgtcttccagggtcttactcccactgtgaaaccttccccagttattctcaccccttcttctcactcctcatgagctttatcttggcagtcttacggctcttatgcctagcaaatctccagcctaattttatatatttttttgagaaagggtcttgctctgtcacccagggctagagtgcggtggtgtgatcttggctcactgcaacctccccctcctgggttcaagcgattctcctccttcagactctcgaatagctggggattacagggcacgccttcaccacggcccagcttaatttctgtatttttaggaaggagatgggggtttcgccatcttgggccagggctggtcttcaaacacctgacctcaagtgatccgcctgccttggnccccccaaagtgctngggattacagggagtgagccactgtggcccaggcttncaacntaatttggagtttnatttgtattnttttttcatcacctttacagtgttaacagctgttttnaacattaaattccattataaattataatacatttnaaggacntgt

SEQ ID NO: 88708 - DNA, 1664 bp, Homo sapiens
  misc_feature (1)...(1664): n = a,t,c or g
taacttatttaagctgaactggtgatatctattataagcagaagtagtcttttcttggtaaataatccagttagcaaacctgaatagtatttatgtcttatgaatcctgccagttgtttcccaagttatggtaaagtaacatagattagatatcaaaaggactagaccagaatcagttgttttcttcttttcctgtagagtacctaacagaaatagtgagaatatatggcaacaagattagacacaaatgtgtggaagtctcccagaaaaatggtagcaccagatcagcaccaggaggccagtgttgagtaatagaaccagaaggccaacatccagacaggcagattagtctgaggctattttaagtgctagaaggtgtgacttcctttcatcttcctggttctatcttaagtgacataaaaaatgttataatagcttttctctttctggtttttattctcctggatatggagaaaacaagtttactgtcactagtanaaatattgcagtacctctttgtgaaatgaacaagatttattcctattattctgattcctccagcagtgaaaggactatggatctggttttggaaatgtgcaataccaattccatccactggtgtggaatttcaggaagacagctgggaaagctgcatccaagttcttcgctctgtcttgcccttactctgctttcttcagtacagggactgcaaagcatctctggcttaagactaacagacacattcttaaagagaacatatgaatatgatgacatcgcacaagtctgtgtggtatcttctgccattaaagtggaaagctgaaggaaacttccaatgttaggcttttcatttagtttcacagaactgctctttttgttacctttgtaaaatgatgacgtcaacaacgaagtaaatatgttacttaaattttctttcctgtaaaatggttaaaatattaaatatttgttttgaagagatctgattttatcttgtaatttatatttgaaatgaacatgtgtatattttctacacctattatttaatttcatttcattttagatgaccattggactttgttctccaaaagctgtgtatctgagaccatttgtccctagcaagttatctagaacacgagtcagcacactttttatgtaaggtacaagatactaaatattttaggctttgcaggccgtaaggtttctgtcacaaatactgaactctgccatcgtacttcaagagcagccagtaggcaaaaaaagtacagtggtgtacacaaaaagaagcagttggactcgggaagctgaggcaggagaatcacttgaaccggggaggcagaggttgcagttaagccgagatcatgctactgcactctagcctgagcgacagagtgagactctgtctcagaaaaaaagaggcagctgggcagatttggcctgcagggtatagttggctgacctcaatctagaagatagagttgttcttagactttgtaatattttggttagaaatattcagttantccagtttttnctactatcggncacagaaaaagtttcttaaancaaaggggtagtcctcttatacctgatattgncacacagtataanttctagttgtttcaaaattctgtaatggttgtgctgattgatatatcctcaacatcata

SEQ ID NO: 88709 - DNA, 519 bp, Homo sapiens
tttaattgctattctttatgttgctctctcaaaataattaccaaaaaaaaaaaatcttaaatgataacaaccacaactatcaaggaaaaagagaacagggaatggctgactctgcataaattggccgaagattatccattatcttaaggtttgacttcaggttacagcacacagacaaacatgcccaggaggctctcaggaccgctcgatgtcttctgaggaggctgcggcggggagatccaggaggcggtcgagggcaccggcctctttgagatgcaagaaagacagaaactcaatgattgtgcgcatgatattgttttcaggtatggacctgtcaaagcttcctggtttcatgtcatcttcgggccgcagctcccgcttgctggtgaggccattcttgtcgctgaatgacctgtggttgccaacggcatgtgggcccagcaggtagcccgcgctgttcagggtccagcctcgtttttccttggccggcgaccagagccccgcagaggcagaaagggc

SEQ ID NO: 88710 - DNA, 620 bp, Homo sapiens
ggaattcggaagatctgctcaagtacttcaatccagagtcatggcaagaagatcttgataatatgtatctggacacccctcggtatcgaggcaggtcataccatgaccggaagtcaaaagttgacctggataggctcaatgatgatgccaagcgttacagttgcactcccaggaattactcggtcaatataagagaagagctgaagttggccaatgtggtcttctttccacgttgcctcctcgtgcagcgctgtggaggaaattgtggctgtggaactgtcaactggaggtcctgcacatgcaattcagggaaaaccgtgaaaaagtatcatgaggtattacagtttgagcctggccacatcaagaggaggggtagagctaagaccatggctctagttgacatccagttggatcaccatgaacgatgtgattgtatctgcagctcaagaccacctcgataagagaatgtgcacatccttacattaagcctgaaagaaccattagtttaaggagggtgagataagagacccttttcctaccagcaaccagacttactactagcctgcaatgcaatgaacacaagtggttgctgagtctcagccttgctttgttaatgccat

SEQ ID NO: 88711 - DNA, 645 bp, Homo sapiens
ccctcactctgtggtggccattactctccattcaacactgttttggaaagctgggcctctcctccaccaagagcagaaactaacgacatcacccccaaactcaggcaatgctggcagataagatattatctcccccagggaggaccaagactcagtattaggggctcacctggttctgtaggcctggctgtgggagggtccatcacttgggagctctgatttggatttcgaacccctccacagggtagacgccaggtgtattccggctgcgacaaaactggtgcttaataatcaataatcacacccaaaaattacaatagcacctactgtgccaggacaatactaaatctgtattagtcaagtataattgaatctttataacaacccaggctggcactcccatttcacaggtaaggaatctgaggctcagaggggataacttgctgaaggtcatctagcaaagagaatggctaagcttggatttgaatccaggtctttgtaaatccagagccaatctcttaagcgccatactatatactctggtgtttaaagatgtgtaccaagaagggtcatatgggagaagctgaaaaagaggccagccaggaggtttctgtaatggtccaggggagagctgggatgcctaag

SEQ ID NO: 88712 - DNA, 1899 bp, Homo sapiens
catgggaataaagaagaattctcctgcagaggaatacaacttgctgtggattggtttctagataaaggccataaagatattactgtatttgtgcctgcatggagaaaggagcaatcccgccctgatgcaccaattacagatcaagatattctacgaaaactggagaaggaaaagattcttgtcttcacaccatcccgaagagtccaaggcaggagggttgtctgctatgatgaccggttcatagtcaaactggcttttgattctgatggcatcattgtgtccaatgataactaccgagaccttcaagttgaaaagccagaatggaagaagtttatagaggagcggttgctgatgtattcttttgtgaatgacaagtttatgcctccagatgatccattaggacgccacggcccaagccttgaaaatttcttaagaaagagacccattgttcctgagcataagaagcaaccatgtccttatggcaaaaaatgcacctacggccacaagtgcaaatactaccatccggagcgggccaaccaaccccagcgttcggtggctgatgagctccgcatcagtgccaaactgtccacagtgaaaactatgagtgaaggcaccctggccaagtgtggcacagggatgtctagtgccaaaggtgagataacctcagaggtcaaacgtgtggcccccaagcgccaatcagatcccagcatccggtctgtggctatggagcctgaggaatggctgtccattgcccgtaagcctgaggctagttctgtcccctcgcttgtgactgccctaagtgttcccacaatcccaccccccaaaagccatgcagtgggtgcactcaacacccgttcggccagcagcccagtgccaggatcctcccatttcccccaccagaaggcctctttggagcatatggccagcatgcagtatcctcccatcttggttaccaacagccatgggacccctattagctatgctgagcaatacccaaagtttgaatccatgggggaccatggctactattcaatgttaggtgacttctccaaactgaacatcaacagcatgcataaccgagagtattacatggctgaagtagaccggggggtgtatgcccggaatcctaacctctgttctgacagccgtgtgagccataccaggaatgtcatctattcctcttacaacaacgtgtatttggctgtagctgatacccatcctgaaggcaatttgaagctgcaccgctcagcatcccagaaccgacttcagccttttcctcatggttaccatgaagccttaactcgagtgcagagctatggcccagaggattctaagcaaggcccccacaaacagtcagtcccccacttagctctgcatgcccagcacccatcaactggaacacgttccagctgtcctgcagactaccccatgcctcccaatatccatcctggggcaaccccccagccaggccgtgccctggtgatgactcggatggatagcatttccgactcccgcctctatgagagcaaccccgtgaggcaaagacgacctcccctgtgccgggaacagcatgccagctgggacccgctgccctgtacaactgactcctatggctaccactcctatcccttgagtaacagcctcatgcaaccatgttatgagccagtcatggtacggagcgtgcctgaaaagatggagcagctttggaggaatccttgggttggaatgtgcaatgattccagggagcatatgatcccagaacaccagtatcagacctacaagaacctctgcaatattttcccttctaacatcgtccttgcagtgatggagaagaatccccacacagcagatgcccagcaactggcagccttgattgttgctaagcttagggctgcacgt

SEQ ID NO: 88713 - DNA, 1972 bp, Homo sapiens; identical to SEQ ID NO: 63952
  misc_feature (1)...(1972): n = a,t,c or g

SEQ ID NO: 88714 - DNA, 668 bp, Homo sapiens
  misc_feature (1)...(668): n = a,t,c or g
aatgcttcctaactagctagaagattttataattaggcattcctgattctgtagcctgtaaccgtgagtgcataagtaaacttgatgtacttcgtgcacggctcttgttgtgggtcttcataactgcctcccagcagtccataaaacagaacaaaggccatgtggtttatttcttgacccctcctttaatagtgttttggagagccatttccagtctcagaaggattgctatgaaaaggagattgaagctttgaacttcaaagtggtgcatctcagtcaagaaatcaaccacctgcagaagttattcagagaagaaaatgacatcaatgaaagcatccgtcatgaagttaccaggctaacatcagagaacatnnnnnnnnnnnnnnnnnnnnnnnnnnnnnnnnnnnnnnnnnnnnnnnnnnnnnnnnnnnnnnnnnnnnnnnnnnnnnnnnnnnnnnnnnnnnnnnnnnnnnnnnnnnnnnnnnnnnnnnnnnnnnnnnnnnnnnnnnnnngatcccagactttaaacagcaaatttcagaattggagaaacagaagcaagatcttgaaatccgcctgaatgaacaagctgagaaaatgaaaggaaaactagaagaattgtctaatcagttacatcgcagtcaagaggaggaaggaacacaaagaaa

SEQ ID NO: 88715 - DNA, 302 bp, Homo sapiens
cttaggcaacagaaattaaattattttaacttacatggccattcacaataatagaagatgttttgcttcgtaattgtgatgagtttacaaagagttagatggcttcactcagagaatttcacattagaaaacgagggtgaatcaggacatttctcaatctgtggctctgggggttaggccaatagtttttgagcatgaccacacccgggaaacttaaaaatataagcttcctgatgatacccacgtcccaccctggaccaaataagttaaatttgggggatggtggttggtcgacgcggccg

SEQ ID NO: 88716 - DNA, 655 bp, Homo sapiens
atttcaaagcatatatgtataaacagcactacgtatatgtcaacaaattaataagattcattttgccaatgtattttgtgactgttttaaaacaaatgaaaaaatgttttgttctttttctgctttcatgttactattgttaagaaaagtatgtagctaaagaattgacacattttgtacttagagaaaacaagctacacaagttagatgacagtctatagggtaagactccactatgaactaataaataacttcgttaagaaattcttggcctaactctgtaattttgacataaacagttcttccaacatatagtggaagattgatgattaattatataatttccttatcaaagattaaaatgggcaaatagttgtgtttaaattttacctactttcaaaaaacaatacatgacattgcccattgggtacaggttactgaaaaggcatctttcaaagacaagaagataatggacttgattgaaatagttgaactacgtaacgccaattcaagaacaaatggtttttcagagcataacggagaaagaacaatttactatagtacagtttattcttcttacacaatggcaatgatttatttgaaatggcagaacaaacatagtagatatacaaaaacaaccagtgggcattttatg

SEQ ID NO: 88717 - DNA, 1335 bp, Homo sapiens
atgattgaagacaataaggagaacaaagaccattccttagaaaggggaagagcaagtctcattttttccttaaagaatgaagttggaggacttataaaagccctgaaaatctttcaggagaagcatgtgaatctgttacatatcgagtcccgaaaatcaaaaagaagaaactcagaatttgagatttttgttgactgtgacatcaacagagaacaattgaatgatatttttcatctgctgaagtctcataccaatgttctctctgtgaatctaccagataattttactttgaaggaagatggtatggaaactgttccttggtttccaaagaagatttctgacctggaccattgtgccaacagagttctgatgtatggatctgaactagatgcagaccatcctggcttcaaagacaatgtctaccgtaaacgtcgaaagtattttgcggacttggctatgaactataaacatggagaccccattccaaaggttgaattcactgaagaggagattaagacctggggaaccgtattccaagagctcaacaaactctacccaacccatgcttgcagagagtatctcaaaaacttacctttgctttctaaatattgtggatatcgggaggataatatcccacaattggaagatgtctccaactttttaaaagagcgtacaggtttttccatccgtcctgtggctggttacttatcaccaagagatttcttatcaggtttagcctttcgagtttttcactgcactcaatatgtgagacacagttcagatcccttctataccccagagccagatacctgccatgaactcttaggtcatgtcccgcttttggctgaacctagttttgcccaattctcccaagaaattggcttggcttctcttggcgcttcagaggaggctgttcaaaaactggcaacgtgctactttttcactgtggagtttggtctatgtaaacaagatggacagctaagagtctttggtgctggcttactttcttctatcagtgaactcaaacatgcactttctggacatgccaaagtaaagccctttgatcccaagattacctgcaaacaggaatgtcttatcacaacttttcaagatgtctactttgtatctgaaagttttgaagatgcaaaggagaagatgagagaatttaccaaaacaattaagcgtccatttggagtgaagtataatccatatacacggagtattcagatcctgaaagacaccaagagcataaccagtgccatgaatgagctgcagcatgatctcgatgttgtcagtgatgcccttgctaaggtcagcaggaagccgagtatctaa

SEQ ID NO: 88718 - DNA, 3093 bp, Homo sapiens
ttttttcaccaccttatcaaatttattattccaatggcactagtacagctggaggtgctcatggtgacaccgcacaggacttcctgcctgctagaaatcatctacccgcgtgttcctttcccctttctggggcaaaagccactgcgggccatgtacccaaataaacctcttaatgcgtttgttaaaattagtttggacatctgagtttccctctgaagaaatggaaaaagtgttgggtgtcccatcccgcctccccctccccgaccggcccattaagtccctactaagagggcgtgtctgctgcctccggactctggaaataaatattgaaagaaacggcatcaagtgttatggttgagtgatggcacgcagcgggccccagaaacctctcaggggagcgtcgctgtgtcgggacagtctccaggtgtcgtctgagaattcgaggacataattcgaggacgtggtgctgtgggtgctgcgagtccccggggcggcaggcgctgcaggaagggccgcctacaatttgtccaggaagttgtccagggcagggatgccttctttcaggcccttgcgcttgcgggtctccgccaccacctggctggggcggctgctgttgtcgaaggggtctccgggcaggatctgccagtggtcaaacacacactgggggaacgcctggccgcccgtgttggacctcaggtcagcggtgaagccaaaggactcgttgacgggcagataggccttgaccacaaacatgggggtgccggccacctgggactcctcgaacacgtggccccgcttcctgttcaaaaccccgtagatgccaccgaccacctgctctggacactggatctccacaaggtagatgggctccatgaggcgtggctgggcggtcagcacactggcgtagaggcagcgccgtgctgtggggatgatctggccccctccgcggtggatggcgtcggcgtgcagggtgacgtcgtggacgtcgaagcgcacaccccgcatgttctcctcacacagtgcgccctccttggtggcccactggaagccggccaccacactgtccttgatctcgttgaggtactgcacacccttggtgatgtcggtgaggatgttggggccggtgccgtcgggcccaaagcaccagatcttgcgggcctcagccacgtcccactcgtacttctcggccaggtagcgcgcccgctgcttgagctcctgacgggcggacacctcgcctttatcgatgtcctcggccaggccgtcggggaagggccgcgccttcatgtacagccggttgtgcttgttgggggacttggagaggcagagcacgttcgactcttcactgaccgtctcgcggtacgagacgaccgggtcagatttcttgatggggatgcaggcgtggtcctcctccaggtccttcaggcagatctccaggtgcagctcgccggcgcccgcgatgatatgctctcccgactcctcgatgatgcactgcaccatggggtcggacttggccagccgcttcagcccctccaccagcttgggcaggtcagccgggttcttggcctccacggccactctgacaacagggctgacgctgaacttcatcacccgcatgttgtgcgcgtgctcgaaggtggtgatggtgcccgtcttcaccaggaactggtccacgcccacgaggcccacaatgttcccacaaggcacatcctcgatgggctccacgtagcggcccatcatcaagattgttctctggattggcttcaggtagaggtcctccttcttcccaggggtatagttgggccccatgatcctgaccttcaggccagtggagaccagccccgagaagactcgtccaaaggcgtagaaccgacctttgtcggaggttggcaccattttggaaatatacatcataagagggcctttggggtcacagcttttaatgcccatggcagcctcgtcgtccgggggcccctcgtacaggagctcgcagcggtacttctgggccgtcacaggggagggcaggtggatggtgatcatctgcaacaaggcgtctccggcaggcagccagcggcgcatcacagccttcagcaggggtttgccttctttgtccttgtcctcgctgtccagtttgatgtccagtttctctatcagttttgctgtctcctctttcttgaaattcatgatcgcatcaaacaccttgaagatggggtccaggatcagctggcagaaggtgcgtggcagcttcttcccttcggggctggtggctgacttgctgaacttgccgttggctgggtcaaagtacctgtcaccccacagcttcttcatcatgtcctctactttcttggcccgctcggcaggccccaactggccctcccccttggcggcgaacttggccacatacatctcggcaaactgcttcagggtgaaggcccacccgtggaggccagacccaaagcccacggtaccgaggacaggatcgatcatgatgttgcccatggggccgctctcgccctcgccgtaggtggagatgatgacgttcacgttctccacgatgcgctggaaagtctggtagagctcctcgggctccagctgcagctccagcagggcgcggtccatcttgttcatcatcagcacaggcttgatgcgctcggcaatggcctgccgcagcactgtctccgtctgcacgcacacgcctgacacgcagtccaccaccaccaatgcgccatcggtgactcggagggcagcagtcacctccgaggagaagtcgacatgcccgggggagtcaatgaggttgatgaggaagccggcaccgtccttgctctgcttgatgaagttcaagtcattctccgagagctcgtagaagagggagatggcagttgacttgatggtgatgcaacgctcctgctcgtccttccgggtatcagtgaagcgtgtctccccggcccgggccgaggcgatgatgcccgccttgcacaccagggagtctgtcagcgtggacttgccatggtccacgtgggcgatgacagacatgttgcggatgttggccttcttgtccatgatggcgcggatctgatccaccgtaaaattaaccat

SEQ ID NO: 88719 - DNA, 394 bp, Homo sapiens
  misc_feature (1)...(394): n = a,t,c or g
ccaaattctaaaaactaaaggtgctttaattttaacttgatgtacctagtgtttgactcgcttctgtgtcactggcattgctggattctggatgttagaactcacagcttccttgtcttgaatattcttcgtgaaaggcagtatctctgaagagagcattgaccaccccgttgtccccacctctcatgagcaaacttgtttttttctaagatgaaaggcacacagaataaaatttagaagttgaaattgtgtgtttctaagctttgggatgtggcggttttattattatataaaaacatctgtgcgtctatgcacaagtatgtcttcccttttcctcatctctacacagngntatgtaagattatgctgtaatcgcatattttttttattacta

SEQ ID NO: 88720 - DNA, 184 bp, Homo sapiens
  misc_feature (1)...(184): n = a,t,c or g
ttgggatgaggaaaggaaattgagcagaaggtacaggagtaatagcaattccctgtagctctcaaagcaaattttgagctcatttttctttttctgcaagctnagnagcagaatgcccagagtcttccctggtagatgcaggttccatagcgacgttctcctgcaatgcacgtcgacgcggccg

SEQ ID NO: 88721 - DNA, 2306 bp, Homo sapiens
  misc_feature (1)...(2306): n = a,t,c or g
caccaacttaattcaaatatttaaataatatttgtgaacttatgcctaaatataactgtatttctttgctcatagccctactttcagactttgctattcgtttttgttctaagatgcatggaactaaaatgtggaaagaaaagaatgcgaaaagatcctgttttcagaatttccccccaaagtagagatgctaagccaaatccagaagaacccatagatgaagatgaagatattcaaacagaaagaataagaacagccactgctctgaccacttcaatcttagatgagaaacctgttataattgccagctgtctacacaaagaatatgcaggccagaagaaaagttgcttttcaaagaggaagaagaaaatagcagcaagaaatatctctttctgtgttcaagaaggtgaaattttgggattgctaggacccaatggtgctggaaaaagttcatctattagaatgatatctgggatcacaaagccaactgctggagaggtggaactgaaaggctgcagttcagttttgggccacctggggtactgccctcaagagaacgtgctgtggcccatgctgacgttgagggaacacctggaggtgtatgctgccgtcaaggggctcaggaaagcggacgcgaggctcgccatcgcaagattagtgagtgctttcaaactgcatgagcagctgaatgttcctgtgcagaaattaacagcaggaatcacgagaaagttgtgttttgtgctgagcctcctgggaaactcacctgtcttgctcctggatgaaccatctacgggcatagaccccacagggcagcagcaaatgtggcaggcaatccaggcagtcgttaaaaacacagagagaggtgtcctcctgaccacccataacctggctgaggcggaagccttgtgtgaccgtgtggccatcatggtgtctggaaggcttagatgcattggctccatccaacacctgaaaaacaaacttggcaaggattacattctagagctaaaagtgaaggaaacgtctcaagtgactttggtccacactgagattctgaagcttttcccacaggctgcagggcaggaaaggtattcctctttgttaacctataagctgcccgtggcagacgtttaccctctatcacagacctttcacaaattagaagcagtgaagcataactttaacctggaagaatacagcctttctcagtgcacactggagaaggtattcttagagctttctaaagaacaggaagtaggaaattttgatgaagaaattgatacaacaatgagatggaaactcctccctcattcagatgaaccttaaaacctcaaacctagtaattttttgttgatctcctataaactcatgttttatgtaataattaatagtatgtttaattttaaagatcatttaaaattaacatcaggtatattttgtaaatttagttaacaaatacataaattttaaaattattcttcctctcaaacataggggtgatagcaaacctgtgataaaggcaatacaaaatattagtaaagtcacccaaagagtcaggcactgggtattgtggaaataaaactatataaacttagaattttttaaaaatatgacttttttaccttttacaaaacattctcttgctgaaatatgtgaagggtatattcagtagccaagagttgcatgactacttcacaccagttcatgatacaacaggtatacaggttttcttttataaccaactacaactcaagagtcttctgaaagtgttccagaaattgctttaaaactcaaaagtaaggggccaggtgcagtggctcacgcctgtaatcccagcactttgggaggccgaggcaggtggatcacaaggtcaggagttcgagactagcctggccaatatggtgaaactccatctctaataaaaatacaaaaattagccgggcgttggcatttgcctgtagtcctagctattcgggaggctgagggaggagaattgcttgaacccgggaggcagaggttgcagtgagccatgtgctagtgcactccagcctgggtgacagagtgagactctgtcaaaaaaaaaaaaaacccccaaaaccaaacccaaaaaccctcccaggttttggggggccctgggacccacaagaaaacaacccctcttgtggaaaggaagtccctttttccttttggaaaataaggggggccccagnagatttggtccaaatttttaaaatttggcatactttaaacaaaataaactttttgttttaggggggggcaaattttccttgcatttttggaaaagattt

SEQ ID NO: 88722 - DNA, 873 bp, Homo sapiens
gtggcagcaactccaaccagcagcaacagatgcgactgcagcaactgcagatggagaaggagaggctgcggctgaaacagcaagaactgcttcggcaggtgaggccacaggcaatgcggaatatcaatcccagcacagcaaattctccaaaatgtcaggagttagccctgcgtagccagttaccaacactggagcaggatggtgggactcaaaatccagtgtcttctcccgggatgtctcaggaattgagaacaatgacgaccaatagctcagatcctttccttaacagtggcacctatcactctcgagatgagagtacagacagtggactaagcatgagcagctacagtgtccctcgaaccccagatgacttcctgaacagtgtggatgagatggatacaggttggtattctttattcctcttagtaacctgacttaacagtgggatatgttatcaccaggtctcataaggtattgtaagcaaagatgattcagaagaaaaccaattaaaatcctgtaaatttgaattaaattgatcctgctttgtctctatacggtgatttgtaacttgtcttttcctagtttaaaaaaatatatatcatggattggccgggtgcagtggctcatgcctctaattccagcattttgggaggccaaagtgggtgtattgtttgagcccaggagttcaagaccagtctgggcaacatggtgaaaccccatctctataaaaaaacatacaaaaataagtcagctgtcatggtacatgcctgtagtcccagctactcaggaggctgaggtgggaggatggattgagccccggtgatcacaccactgcactccagtttgggtgacagaatgagacctcttctcaaa

SEQ ID NO: 88723 - DNA, 1213 bp, Homo sapiens
gtatttttcttaacattgagttaaaacattagacataacctggatgggggaaaatggcgatcaaatgctaaaaatataaacataagaaaagtaaacatgaaaacaaatcttttttaaaaaatcatttaattacaagaaaattagccagaaaattacataagtttcaaacaaatattgtctataaaaacaagtgttcatttaccatctttttaaatttatcttttaaataatgtctcatctactgaacctagcctttcctggcaaacattagaatatacaagttttcttcatgtttaatatttcataaaacagaactggcttttgttcctgaagttagaatgatgcctatcattttgcttcagagaaactttaaaattgactatttcaattaaccactccccaaatccaatgcaaaaacaacaaaaaacactgctattttactaaaagattcctgtcttccatttcattttaccagagcaagtacaaattcggagaaaagcttcttaagtcctgcagtttcaaattccttttgtaattcatccaacgctgaatactctttgacttcaaatgccagaaacctttaactttttggcaccttgaggttgtttctgtctccctgtagtaaaatcagtattattttacccatgaacatcagtcttcctgtcagccttaaatctgaagcccacttctccacaattttgacatatttagtctttgctctcatgtgatctaaatgcaaaagagttatccacaatccatcatccatggtcgtgcttgttgaaaaagtacacttttcactgccactgccagtttctggttggctgaggatatgcctgagattctgctgaatccagagaaccagctcatgaaccataggctccgacaaaaggctctctgcttgctcaagtagcttctctttcacagtcacacactgggccctggtcaactgttcagagttaatcgagataccaggtagacatgaaggataattgactggcaaatggaacaccaattccagaggtatatccgcatccataaatccttcagcttttgtgtgaattctgaacacggtcccatctgtctctgagcggctcagcacctcccactcgtggggcctgcagaaaatcgcggccaggaccgagagctcctcctgcacaggctccgccatggctgtgggccccaccgcctcagcgcttccacttccgctgccgca

SEQ ID NO: 88724 - DNA, 859 bp, Homo sapiens
tctgttttaaattcctacctcaaatacgaaataatttatttagggttatgttacatacggagtgaaacaatacagaaaagcaaagggctaataatgacaggatttgaggagtgggtgggaggaaatagaatcacagcgggacacagggaggactcgaaagtattggttatgttctatttcctagtgtgtaattcttttattgttctttgtatcttacatatttattatagactgtatataagaaatgttttagttttaaaaaatcccacctctttggagcccaatgagagacacagcttctggcaggcactgatgaaatggaagtcacacctgccccccggaggcaaagcctttcactagttgggcctcctgcagatgttcctcagttctgtgctggtctccccagagctgcaggacagctggctgcacccagccctgggcatccttaggcttcctggctcctggcagattgctcctgtacggactgccacagagctctgatgttgccctgaccaaagccagtggccccctgcctctgaatcagctccaggaagaaagtgtcctcagtaaaaagggacttggtgaagacctgaagcagaaacttgcctttatcaccatctagcaggatcccctgtcgagcaagcagatgaggctcgtgccctgcagctcggatctgcctctcctttcctggctgctggtagtatgccccagggggagccaggaactggcctccagcagttgccaccccctcagtggcctccacaatgttaggcgtatacagccccacgtgctgcaggcctggccccttgtgccgggccaggaactgctccacctggtcctgtcgtgtcgtcgtccccgg

SEQ ID NO: 88725 - DNA, 455 bp, Homo sapiens
  misc_feature (1)...(455): n = a,t,c or g
ggggnnagggggnncnttttganaacagcttctgactgcttacgcccctcggcatcctggcgatatgtgcctttgatgaccgggatatcacgcggaaagtctgggggcagaacgtttacaccgggcgggggcgggggaatcggcgtgaccggcggatatgtggtgcgctctacggcaccacccacgaaatcggacatcgagcaagcgctcagggcctgcgacatcatcacggcggcaaacaccaataccgcgaaatgaacgcttcgttgcgtcatgacggtatactacaaaggcttcgccctaagtgctagcccctgctaactaaagctagcccgaattagccgagtgcccgttccagatccgcgatgaggtcctcggtggactccagcccgaccgataaacgcaccacgccatcggagagcccgatcgccgcacgtccctccggacccatcgcc

SEQ ID NO: 88726 - DNA, 402 bp, Homo sapiens
ggggagacttgcaacccacagttattgatgaagttcgcactggatcctaccgccagctcttccaccctgtgcaacttattacaggccaggaacatgctgccgaaaactattcccgggggcactacaccataggcagggggattattgacctcgtgttggaccgaactcgcaagctggccgaccagcgcacggaacttcagggctttttgggtttccacagctttggtgggggaactgggtctgggatcacctccctgctcatgggacgaccctcaatagattatggcaagacttccaccctagagatgtatatttacccgtctccccacgtatccacaggtgtagttgagtcctacagcttcatattgaccacccacaccaccctggagcactctggttggg

SEQ ID NO: 88727 - DNA, 1051 bp, Homo sapiens; identical to SEQ ID NO: 59909

SEQ ID NO: 88728 - DNA, 380 bp, Homo sapiens
ggcacgagggcgggctgcatttactgcctccgcaatgagaatctaaacgagcgcttcctgaacaccacgggcttcctcgactcccttaagagcaaccgggacggagccctggggaggcagctgggggaagcgccacccatggctgcagggggggggccagggctgacccggggggtcctcctgagtgcggcacagggggaacctctccgcccctctctggaggcctttctaggggatgaatgtgtataaggcgcaggtttttatgagcgaacgcgtgcatcccctgatggagacatgaggcaccaacagcgcgctatacctaaggcactccgactggtttgcagacggaaatgatattgcccttgtaacacatgggggcc

SEQ ID NO: 88729 - DNA, 1036 bp, Homo sapiens
atgaggaaaaagaggagaagaatcaaacttcctgaatctgatagcagtgaagatgaaggagtccgctgtggaaggcacatcacatcccacggcctggctctcaactgctctaccgacctcacgtggtttgagcacatcgtgccctgtggactggttgggtcaggcgtcacttccttgagtaaggagctccagaggcacgtcaccgtggaagaagtaatgccacctttccttgtggcctttaaggagatctacaagtgcacactgatctcagaggacagccccaactgaagagtactcataacagccaggatgctcctgccttgggaagcatgaagtctgacttgagtcacctactgaaacccagattttagacctggcctgtcattcactgatcatgaaactaaggacataccatgagctctgagccactattttcatatgtatcctgttttatttatatctttcccacctacctcagagatactagatgtgacaatactgtgaaaagcaacacatgctatataaaacattagcactgctattgacagaagtgtctcagagaaattcagatgtcatagattgttatttctcgattgttgatgtcatagattgtcatttctcgattgttgcttcctcaatactgtgtctaactgagcaattctgggctctagttcctttgattttgtgggaatcaaatctctgaatggcccaggtgaaggtgatgtgatgtagtgctttttcattctcaagagacctgggttctttctgcaataaagggaaaagggaagaaccttctaagaataaaatgggatcttaccttcctgggtttgattccccaagtttgataatttagcagtttttagttgggttaccctgagctaggccaaagactggaggaaggataagaataatttctcacactgtacaaatgccaaagatagaagtgagtttttcttatatgagacctctaaatttgtaaggctgcgtattatctgttgctgtgtaacaaatcatcaaaacttagtgacttaacagt

SEQ ID NO: 88730 - DNA, 524 bp, Homo sapiens
  misc_feature (1)...(524): n = a,t,c or g
cgagatccggnnnnttttgaaanaactcgataaaccctacgagngngccggaattcacaagatctagataatttttgtcataaaatgggcatagtctgaggtgcctgacatccaggctttcttttacacatttgtccctccctagtctctgctcccaatgtgactcgtcctaaatatttcttctctcctgtctgttccttcagtctccaccccaagctctaagtcctttgaatcctccttttctacggacccatctgacctcttccttcctccccaggctgctcctcgccaggctgagccacgtcccaattcttcctcagcctacgctccccaaccctataatccttctatcatctcccctcctcacacccgctctggcttacagggggaaggtagccaaggatggagtgaaatgcagggtaaatgtcttaaaggaaatgagaggttctatgaggctggctagtggcttgtaacctacatggaagaggttacgaanagatgacagaatggaatgagcctgtgag

SEQ ID NO: 88731 - DNA, 608 bp, Homo sapiens
ttcagagagaagagaaattatgtcaaaaagaaaagcaaattaaagaaggaagaaaaaaaataaaatataagagtcttactagaaatttggcatctagaaatcttgctccaaaagggagaaattcagaaaatatatttactgagaagttaaaggaagacagtattcctgctcctcgctctgttggcagtattaaaatcaactttacccctcgagtattcccaacagctcttcgtgaatcacaagtagcagaagaggaggagtggctacacaaacaagctgaggcacgaagagcaatgaatactgacatagctgaactttgcgatttaaaagaagaagaaaagaacccagaatggttgaaggataaaggaaacaaattgtttgcaacggaaaactatttggcagctatcaatgcatataatttagccataagactaaataataagatgccactattgtatttgaaccgggctgcttgccacctaaaactaaaaaacttacacaaggctattgaagattcttctaagatagatttaggggccgggcacggtggctcacgcctgtaatcccagcactttgggaggccgaggtgggtggatcatgaggtcagg

SEQ ID NO: 88732 - DNA, 460 bp, Homo sapiens
  misc_feature (1)...(460): n = a,t,c or g
ttgagtacatagcacgngcgnggcattcaaaccgcttgataaaagcccttactcgtatatttaaaatatctgatcaagattttgattgttctctcaatgatgctgaactcaacttctttcagaggatttgtttcaacactccattagctcctcaagctctggaggatgtcaagaatgtagtcagaaaacatataagtgatggtgtggctgacagtgggttgaccctgaaaggttttctctttttacacacactttttatccagagagggagacacgaaactacttggactgtgcttcgacgatttggttatgatgatgacctggatttgacacctgaatatttgttccccctgctgaaaatacctcctgattgcactactgaattaaatcatcatgcatatttatttctccaaagcacctttgacaagcatgatttggatagagactgtgctttgtcacn

SEQ ID NO: 88733 - DNA, 484 bp, Homo sapiens
  misc_feature (1)...(484): n = a,t,c or g
tgggaccnnnnaggnngnncctgtagacattgcctgtagacgtctagtacangcggnggaattcgtcttctgagctgctggcagttttgagaatctgatgacctccgaggggaccctgctctcagccatcaaagtgttcctgcccctctggacactcataattcaatggtagatgcaggtggagttgagaacatcacccagcttccccaggagcttcctcagatgatggctgcagcagccgatggtttggggagtatagcgatagacacgacccagctcaacatgtccgtgacagatcccacagcctgggctacagccatgaataacctgggcatggttcccgtagggttgcctggacagcagctcgtgtctgactcaatctgtgtcccaggctttgatccaagcctcaacatgatgactggaatcacccccattaacccaatgataccaggccttggactggtacctcccccaccaccaacag

SEQ ID NO: 88734 - DNA, 1051 bp, Homo sapiens; identical to SEQ ID NO: 62011
  misc_feature (1)...(1051): n = a,t,c or g

SEQ ID NO: 88735 - DNA, 2176 bp, Homo sapiens; identical to SEQ ID NO: 60069

SEQ ID NO: 88736 - DNA, 531 bp, Homo sapiens
  misc_feature (1)...(531): n = a,t,c or g
ggaattcgccgagatcaaatggagcttctcgctgatggggtgcgagtattacctccgccatgcaatttccactatcaataatttaacttctttgctgcagaacagaaggagtacataccgggcaccaaagactcgcgccccctcccccctttaattaagcgaagggaacgtgaaaaaataatagagtgtgggagttttggggccgaagtctttcccggagcagctgccttgatggttactttgacaagtagtgactgaaaagttccaccaggtgagaagagtgatgaccatccttttccttactatggttatttcatactttggttgcatgaaggctgcccccatgaaagaagcaaacatccgaggacaaggtggcttggcctacccaggtgtgcggacccatgggactctggagagcgtgaatgggcccaaggaaggttcaagaggcttgacatcattggctgacactttcgaacacttgatanaaagactttttggatggggcccaaaantttgggccnattgngaaaa

SEQ ID NO: 88737 - DNA, 753 bp, Homo sapiens; identical to SEQ ID NO: 62593

SEQ ID NO: 88738 - DNA, 416 bp, Homo sapiens
tgggaaagcattcagttgtttcacatacctttctcaacatagaaggactcacatggctgaaaaaccttatgaatgtaaaacatgtaagaaagccttcagtcattttggtaacttaaaagtccatgaaaggattcacactggagagaagccatatgaatgtaaggaatgcaggaaagcattctcttggctcacttgccttctgcgacatgaaagaattcacactggaaagaaatcttatgaatgtcaacaatgtggtaaagccttcactcgttctcgtttccttcgaggacatgaaaaaactcacactggagagaagatgcatgaatgtaaggaatgtgggaaggcactgagttctctcagttccttgcatagacataaaaggactcactggagagatactctataaatgtggaaaa

SEQ ID NO: 88739 - DNA, 426 bp, Homo sapiens
aaaagataaaggaagcagcagacatcattcagaagttgcacctaattgcccaagagttaccttttgatagattttcagaagttaaatccaaaattgcaagtaagtgatgtatttattttaccttttttttaataagtaaaaaaactacttgtgtaaaaataaaacagcaaaaggagaaaaagcaggaacaatgtcatcttcctaccctagtaggctactgcatagaagatccctgagtttgatttctcttccctcaaaacaaccattaccagtttttttggatattcttgcagaataatctatggatatacaagcataagacataaattctatatatgtgtgtgtgtacatatgtatgtgtatgtatagatatttatatgtacttctatcctcatttatttttaaataattgctaccatactatat

SEQ ID NO: 88740 - DNA, 1675 bp, Homo sapiens
cgccgggcctggggaaggggcgggcgcggggacccgatgcgcgggagcggaggccgagatggcttcggcgggaggcgaagactgcgagagccccgcgccggaggccgaccgtccgcaccagcggcccttcctgataggggtgagcggcggcactgccagcgggaagtcgaccgtgtgtgagaagatcatggagttgctgggacagaacgaggtggaacagcggcagcggaaggtggtcatcctgagccaggacaggttctacaaggtcctgacggcagagcagaaggccaaggccttgaaaggacagtacaattttgaccatccagatgcctttgataatgatttgatgcacaggactctgaagaacatcgtggagggcaaaacggtggaggtgccgacctatgattttgtgacacactcaaggttaccagagaccacggtggtctaccctgcggacgtggttctgtttgagggcatcttggtgttctacagccaggagatccgggacatgttccacctgcgcctcttcgtggacaccgactccgacgtcaggctgtctcgaagagttctccgggacgtgcgccgagggagggacctggagcagattctgacgcagtacaccaccttcgtgaagccggccttcgaggagttctgcctgccgacaaagaagtatgccgatgtgatcatcccgcgaggagtggacaatatggttgccatcaacctgatcgtgcagcacatccaggacattctgaatggtgacatctgcaaatggcaccgaggagggtccaatgggcggagctacaagcggaccttttctgagccaggggaccaccctgggatgctgacctctggcaaacggtcacatttggagtccagcagcagaccccactgaggggctgccgagcctcagggcaggtctcccgcccggcatgtgtgttcagggactgagcctggggacgcccacccacacccactgcttcctctcggcgcaccccaggggagtgttagcagcgaggccttcctcactcaggagtggaaactcagatgtgtcactcagactcaacttgctgggacactgacaggcgttcctgaggttttcagccacttaggctcgttgcggtttaaagatccctctaggtcactgagaaatgccacagaatgtgcaggaagcctgggaggcttctgtgaggaatgtgaggcacattattggggaaattgaggagacagcctagacactggctggcctgatgttttgttgacagtgaacccacagtgggagagagttttttccagtctgatctggttcttacacactcacacacataactcaaaagttttgtgaacaagtactttccttttttacatgttacatgtcctcatgttttctgttttctgtttcataacacaaggctggttgtggcctacaaacctaatttcatgacccagtggtttgcagtccagcgtggcctacacggatatggggagccactgagggatgttttccccccttgcttgtgccttaaaggcagagaagcgaggcggatgccctggaagcacccagcatcacacccaggcttgtgcggggccaggctgggagcccatgcagtagggcagaaggcagcggaggccaggtctgtcccggctggagaacagctccacggtcctgctgggtcag

SEQ ID NO: 88741 - DNA, 765 bp, Homo sapiens
gttgttttctatgaatgtattattttagctattggggtattttttaaggggacggagcccagaggacttggtgactgttttgagcatgtgggggtgagctgggtgactcgtcccccaggctctgacacaggagctgggaggatgggcagatgtttaccacggccagtgtggtgggacacacacacctgaaagcctgggacttggcctccaccctgctggcaccatccctcggcctgggccacgccctgctgcagtaacacccagtggggcttcagaagcacaacatccttccaggtctttattgacgccaggcacaagttgccgtgaggggtggcgaccctaagggggtgagtggggtcccccaccgaggtgaaccctgatggcggctgtttgcccagggccaggcctctgcaggcaggcggagggccaggcctaggtccagcagcagcttgggtggcaggagggtcaccagctcaggatgccagggcagtacttgtcaatgagcccctggtagtagggccgcagcttgtccacgtccggcaggtccgggcacttggtgtagaggtcgaacttgttgaactcccgcacccagggcagcatggccaggtcctgctggctgcatagctgctggtagtcgcggcccgtgtgccaggggtagaaggagtggaaccggatcatgtagaaagcctcagggggcagtgagaacttgttaaacttcatcacctggtacatgtactcatcatggccccaggacatgaggaccct

SEQ ID NO: 88742 - DNA, 425 bp, Homo sapiens
tttcccagcgcggtgcccgcccctcatcctcctccagtctccctcccctcgccgactgccgccccaggctccgccatggggaatgtgccatccgcggtgaagcactgcctcagctaccagcagcttctccgggagcatctctggatcggggattcagtggcaggggcgctcgaccccgcgcaggaaacatcccagttatctggactccctgagtttgttaaaatagtagaagttgggcctagggatggattgcagaatgaaaaggctatagttcctacagatataaaaattgaatttatcaatcgactttcccaaactggcttgtctgtaatagaagtgactagctttgtgtcttccagatgggtaccacagatggctgatcacactgaagtaatgagaggcattcatcagtatccaggagttcg

SEQ ID NO: 88743 - DNA, 892 bp, Homo sapiens
gcggccgcatccagcagagccttcaggggcaccaggcccaccagctgtgagcccaccactgggaggctcagctcctgtgcttctcggcaggtctcctcgtagaccgtgtgcagtgccgtgacctcaaagtccagaagattggtggacacctgagccaggttcttctcatccaggtaccagccaatgccctgaactttcttcagacgtcctggctggtccttcccgcggccctgctcccgcaggttgagcgcgatgcggtgggcttgctcctttgtgccggcaggttggatgttaaaagcaatgaggaacttcctcgcccccgtggccgtggccccccaactggggacaaaggagctgggaccaaagtcgggcgcccagtcggcctgctggagcttcttagggagggcctcgtactccccggcccggatggccggcagggtccggcgactgtccatcctggctgcctcgccgtacaggtaaactggcacgtccagctcctctgccagcctctggccaaaggcctgggcgcagagcacacactcatccacgctgacgcccctcacggggatgaaggggcagacgtctagggcccccatgcgggggtgctctccttggtgcctgctcatgtcgataagtcggtaagctacccgggcagcgttgagggccccctccaccacgcactccggcggccccacgaaggtgtacacggtgcggttggtggaagggcctgcgtccacatccagcagcacgcagcccggggtctgtgtgatggctccagagatggcgtcgatcacctcctggttcttcccctccgaaaagttggggacgcattccaccagctgggacatggccagcaccttgatccagatgctcctctctgggcagatggaag

SEQ ID NO: 88744 - DNA, 1901 bp, Homo sapiens
gtgtcttaaaatgtaaggaacctggacccagtgtatgctgatcatgtctttggtcttagaggagtgtgcatttgtattaacaactcatcttggaattttaagccttttttgtgtaaactttaaatagtacatgaaaagtgacttaattatggcacagcctatttttaagaattctccctttgctatgatgaacaaccacctggtcatatggcagtggcatggaaatggtcctaattttgttgctaaaatagctcttttgttttcttttttggatagaatgtcaaaactggaccaatggggccaggctgaagtattgaactttctgctacgctaccaaccccgcagtgaggaagaactatttgacattctcaatctgttggatagtttcctcaagagcagtagcccaggtgtggtgatgggagctaccaaactttttctgatcttggcaaaaatgtttccccacgtacaaactgatgtccttgtgcgggtcaagggacctttgctagctgcctgttcttcagagagccgtgagctctgttttgttgctctttgtcatgtacgccagatcttgcatagtttaccaggtcactttagcagccactacaaaaagtttttttgctcctactcggagccccactacatcaaactacagaaagtggaggtgctgtgtgaactggtgaacgatgagaatgtgcagcaggtgctagaggagcttcgagggtactgcacggatgtgtctgcggactttgcacaggctgccatctttgccataggtggcattgccaggacttacacagatcaatgtgttcagattttaacagagttgctgggtcttcgacaagagcacattaccacagtggtggtgcagactttccgagacctggtttggttgtgtcctcagtgtactgaagctgtatgtcaggccctgcccggctgtgaagagaacattcaagatagtgaggggaagcaagcacttatttggctacttggtgtccatggggaaagaattcctaatgctccttatgtgttagaggactttgttgagaatgtgaagtcggaaacatttccagctgttaagatggagctgctcactgctttgctgcgccttttcctctcccgacctgctgagtgccaggacatgctaggacgtttgttgtattactgcatagaggaagaaaaagatatggctgtacgggaccgaggtctcttctattatcgcctcctcttagttggcattgatgaagttaagcggattctgtgtagccctaaatctgaccctactcttggacttttggaggatccggcagaaagacctgtgaatagctgggcctcagacttcaacacactggtgccagtgtatggcaaagcccactgggcaactatctctaaatgccagggggcagagcgttgtgacccagagcttcctaaaacttcatcctttgccgcatcaggacccttgattcctgaagagaacaaggagagggtacaagaactccctgattctggagccctcatgctagtccccaatcgccagcttactgctgattattttgagaaaacttggcttagccttaaagttgctcatcagcaagtgttgccttggcggggagaattccatcctgacaccctccagatggctcttcaagtagtgaacatccagaccatcgcaatgagtagggctgggtctcggccatggaaagcatacctcagtgctcaggatgatactggctgtctgttcttaacagaactgctattggagcctggaaactcagaaatgcagatctctgtgaaacaaaatgaagcaagaacggagacgctgaatagttttatttctgtattagaaactgtgattggaacaattgaagaaataaaatcataacagagtcttaaaaaaaaaaaaa

SEQ ID NO: 88745 - DNA, 2211 bp, Homo sapiens; identical to SEQ ID NO: 58783

SEQ ID NO: 88746 - DNA, 341 bp, Homo sapiens
gccccggaagtttagggacgacccacgcgtccgaagcaaggtgaagtttcagcatgaagtctacccgccatgcaaacctgattgtgattccagcctctcagaacacccagtctcccggcaggtgttcattgttcaggatcttgagattcgagatcgtttggcaacatcacaaatgaataaatttttatacctgtattgcagtaaagaaatgcctcgaaaagctcactccaacatgttgacagtgaaagccttacacgtgtgtccagaatctggcaggtccccacaggagtgctgcttgagagtgtcgctgatgccgctccgcctcaatattgaccaggatg

SEQ ID NO: 88747 - DNA, 470 bp, Homo sapiens
  misc_feature (1)...(470): n = a,t,c or g
tgataaacaaggtggcagatagatacatgataaaacaagtttgccatgtgctcaatgtggctgacatttatacttctcagaccttgctattttagggaaggtatcagtataaccagggcattctttttcctggaactaaaaatccttaataatcagtcactattataaacagaatgatttacatacaggaatcaataaacagttgctttttggttaatggttatctggagtaggaggatagttatatttcaaatagaatagaaagctttattggaatacttacatgtctttttagtttgaggaccttacaagctttttacaaataaatggtttaaaatagtttaaacagaaaatgtcagaacattgatagattatgttttatttaatatacagagaaaaattcccatgaaataaagacagttttcaagaaaatattctattataaatattacaacttattagttattagn

SEQ ID NO: 88748 - DNA, 406 bp, Homo sapiens
caaagatttaaaatgaagtccgggagaccacttccatctgttgacctgacacctaaggcttgtgtaaatggaatccaatggagaacaatggagaggaatacaacgttgaaaaatccctacacgtaaaaattgttaggcctggtgactggatatcattcatgacgagaacggggaacagtttaatcttcatcccaagtttctgtctatgctaattaagtggaacagacaatgtaacagaagcggtttaaagaggagctcaatccttttaggaatttgaccttgatgcacctatgatatgacaacaggcaggtcagctggccctgagtaaaaatgtgggagttatcaacatatagctatggaaagtgaaagggaaagtatgcacagggagacatatcgtgtggatcag

SEQ ID NO: 88749 - DNA, 617 bp, Homo sapiens
tttttttttttttctatttcaccaaagaatctttaatcacagaggtgaacactagaagtaacataatgagaaaagaaaatgaacaatgttctaagaaataaacccatagctgtcaaacacaagtctacataattcagcccaggaaaacataattattatctgtccaccacagacttaggctccatttccaagtaacgatctaaatttttttttaatttacaaaattaaaaacaattcttcatatacattctgtcttggttcttttgcatattattccttaggcacaaatccaaagcctgctaatagtggggaattaaataggacaagtaaaaacaagcccaatttaaggagacctttgagagtaaaatgttatagttggaagccagcttgccgtggttggaatcgttgctgtcagttcggggaaaaaactctccttaggtatacgccgaatgctgtcagctgctgtcctcaaagctgctactatttcggcaagaatgaaaatgcattgagctcatgggatcggatacatagccatatttgtcaatgggtgtgtattgaagacttcttttcatctcctccaaagacagaccttgagaggaatattgtccagcactttg

SEQ ID NO: 88750 - DNA, 452 bp, Homo sapiens
actgatgatcctagtccagtgtggtggaattcatctcatttaaccctctccacaatcccaaggggtagatgggaaaatcgaggatagacaatggccaaagttaaagagctagtgggtggcagaggcagaatttgaacccaagactgcctgaggccagtagtctcctcttgggtgctaagtgccctttccccttctctgctgtccccttggacccagatagggtagggcctataccttgagatagcgtcggcggctcacgtatgcgtgtaccagggaccggaacttcaccagactcctcctcatctgctgatagcgttgcctgggttgggggagtggggaggtcagggattggggccacagggtgacagggtgaccaaaaggtagagaggcccttgccagcctggcctgggagccagtgcccacatctcacttttggggtcctttggctcaaa

SEQ ID NO: 88751 - DNA, 1511 bp, Homo sapiens; identical to SEQ ID NO: 63620

SEQ ID NO: 88752 - DNA, 438 bp, Homo sapiens
  misc_feature (1)...(438): n = a,t,c or g
nattgatcgactcgtagaccagcctggnggngttcagcaaatttaatacggtacagcaccggatcgcgcatcacgataaacggtgaagccatgtcgattttcgcacgcaggcaggctttaccttcttcaaaaccaccggcacgcattttttcgaacagcgccaggttctcttcaacgctgcggtcgcggtacgggctgtttttacccggttgcgtcagggtgccgcggtattcgcggatctgttccggcgtcagttcatcaacgtacgccaggcctttattgatcagttcgatcgcataggcgtggagctgatcaaaataatcggaggagtaacggacgttaccagaccagtgaaaacctaaccactctacgtcgtttttgatcgactcaacatactcgatatcttcttttaccgggttagtgtcgtcgaaacgcagg

SEQ ID NO: 88753 - DNA, 682 bp, Homo sapiens
ttagacgacatcgagaccgtgtggaggaattcggcgggagcctggtccgtggcctcggcctgaagaacagccggagcagcccatctctcagtgactcatacagccacctatcgggtcggcccattcgcaaaaagacggaggaagaagagaagctgctgaagctgctgcagggcattcccaggccccaggacggcttcacccagtggtgcgagcagatgctgcacacgctgagcgccacgggcagcctggacgtgcccatggctgtagcgatcctcaaggaggtggaatccccctatgatgtccacgattatatccgttcctgcctgggggacacgctggaagccaaagaatttgccaaacaattcctggagcggagggccaagcagaaagccagccagcagcggcagcagcagcaggaggcatggctgagcagcgcctcgctgcatacggccttccaggccaaccacagcaccaaactcggccccggggagggcagcaaggccaagaggcgggcactgatgctgcactcagaccccagcatcctggggtactccctgcacggatcttctggtgagatcgagagcgtggatgactactgaccagcccggacccccaccccctgggctgtaggccagggcagccacagcggcgtggaccgagggtaccagcctgcaggctcccc

SEQ ID NO: 88754 - DNA, 952 bp, Homo sapiens
ttttttttttttgggagagacaggtgggatttattgatgttgcttttgtgagaacaaatttatagcctggggaagcatcttccaaggggaatatcgcatggctggaaaggtcacacgccagctttgatgtcgggtggcaggaatgtgggcaggaggcagcgctgccagctgcctgtttggcaaaccccacaggctaccctgctggccaggccttttcccagcaccttgcctgtaggacgccgggtggcatgcacactattgtcccagggaggagaggcagggactccccaggtgctgccccttcccacaaccagtgtccccactggacacttccaaggccccgcagttgcactgcagttcctgccccttctgcacaggctgggagactcccagagatcttgtttgaatcaactccaaatccttcaggtccttccctgcctcttatcagaggccgctggaaacacaaggcctgcttctgtggaccaggggctcctctgggggtggcctcagccacggctgagatccctagaagtccaggagcagctgcggaagcaccttctccagctggtccacgtccacacggagcgcgtcttctgcctgggcctgccgcacgccgcggactgctgcttccacaacgaagaccttcagcaactccaccatgagctgcagcgcgtccccgctcactttggtcttgtcatccttgaagtgcaggtgcagcagcctgctcaccagctccagctgcgagacaccagcccacgagggcgcggggcgcgcggcccggccggagatggagtctgagaacgggcccaacctcaaaggcacagggggcggcgcgggggctggcgtctggccctcacagtgtcacgcgtgaggtcgggacggagcgtccgcgcctgcctagcccctgccctccggccctcaccttccggaagccggatccagctcctgctcc

SEQ ID NO: 88755 - DNA, 403 bp, Homo sapiens
cacctcccgcttcacttccgcccagagctttaacttcacccggggtctctgcttgcacaaggactatgtggctggcagggagttcgtggcctggaaagacacacacccggacgccttccccaaccagctcacccccatgcgggactgcctgtacctggtggacggaggctttgccatcaactctccgttcccactggctctgctgcctcagagagcagcggacctcattctgtcctttgactattccttggaagccccttttgaggtcttgaagatgacagagaagtactgcctggaccgaggaatccccttccctatcatcgaggtgggccctgaggacgtggaggaggcccgtgagtgctatctgtttgccaaggctgaggacccccgctcccccattgtg

SEQ ID NO: 88756 - DNA, 1534 bp, Homo sapiens
atgcagctgcagccaattcaactcacaaagcaggatttgcaggcagaacatagggtgattgtggaggtatctgttgacataaaggtgccaggctgtaccgtctcatggaaaggggctgtccaaaatcctcattcagacccagagaggactctgcatgaacaaggaatcagctgttgcttatggccagtgctatgggcctactccccttcacccttgggggatgtcaccattgcttttcacgtggccaccctcctgtccgttggctttcgcgtggggagtgcctgctgcctctgcggcggtcacgtcgccccggagagcctcggagctctggctgcccacgatgggagtcctctggggggcgccggagccaggcagacgcatcgggtgggctcgggtctccagcccggccgggaggagggaccgggtctgcggagcggggactcggggcctcggcggggcgcgcacacgctaggcggggcggcccggggtgcggggcctctgcgcggctgaccaggctcccagagcgtcagcgctcgcccatggccgagccgctccagccagaccccggggcggccgaggacgcggcggcccaagctgtggagacgccgggctggaaggccccggaggacgccggcccccagcccggaagttatgagatccgacactatggaccagccaagtgggtcagcacgtccgtggagtctatggactgggattcagccatccagacgggctttacgaaactgaacagctacattcaaggcaaaaacgagaaagagatgaaaataaagatgacagctccagtgacaagctacgtggagcctggttcaggtccttttagtgagtctaccattaccatttccctgtatattccctctgaacagcaatttgatccacccaggcctttagagtcagatgtcttcattgaagatagagccgaaatgactgtgtttgtacggtctttcgatggattttctagtgcccaaaagaatcaagaacaacttttgacattagcaagcattttaagggaagatggaaaagttttcgatgagaaggtttactacactgcaggctacaacagtcctgtcaaattgcttaatagaaataatgaagtgtggttgattcaaaaaaatgaacccaccaaagaaaacgaatgagaaaaatgaaaggaagttctgctgtcagaggcaaaacatctgtttatcatagacatcaacatgacctataagtaaagtgcgtgtctagtgtcttctattgagagtactactattaattaagcttatttccaatgtgcctttttaatgcttgaagttttatctacatacacaggtaacagaggacagtagtctgtaaacatataaatcggtcataactatcgtggtctttatttctgtgaggatctagggaaatttcatgtcacttccctccttcactgcatcacaatcatattcccttttttttttcttggatttgtgtcagttggatgatatcccctccagatagtatcaataaaatgttaaaattaaaaaaaaaa

SEQ ID NO: 88757 - DNA, 447 bp, Homo sapiens
ggaattcgagacacgggccttccaggagcaagcactacctgttctgcaggcgggtcctggcctccccgcagtgaatcccagagaccaagagatggcagctgggttctttactgctggatcgcaggggttggggccatttaaagatatggccctggccttccctgaggaggagtggaggcatgtgaccccagcccagatagactgctttggggagtatgtggaaccgcaggactgcagggtctctccaggcggtgggagcaaggaaaaggaggcaaaacccccacaggaagacctgaaaggggcgctggtggcactgacatcagagaggtttggggaagcctctctccagggccctgggctcggaagggtctgtgagcaggagcctggtggccctgcaggcagtgcgcctgggcttcctcctccccagcacggtgccatccccctgcc

SEQ ID NO: 88758 - DNA, 1779 bp, Homo sapiens
cttagaacccaggaggaagagacggagtgctctgcagatgtcccagaaggcgcatggaagtccttctgacccatattgtcttcaaaacagtcgtaggaaggatggagaagcctggcctggcactggctctcaggaaagtcattgatggaattcgtgtgtctgtgtggggctcactgtgagtggggggtgacttcctttgagtaggatggacatttccccctgctctaaaaggagagtcagttcctcgttctctaatatacagttacctgactgacattgaccgcatcgccacaccatcattcgtgcctacccaacaagatgtgcttcgcgtccgagtgcccaccaccggcatcattgagtatccatttgacttggaaaacatcatctttcggatggtggatgttggtggccaacgatcggaaagacggaagtggattcactgctttgagagtgtcacctccattattttcttggttgctctgagtgaatatgaccaggtcctggctgagtgtgacaacgagaatcgcatggaagagagcaaagccttatttaaaaccatcatcacctacccctggtttctgaattcgtctgtgattttattcttgaacaagaaggatcttttggaagagaaaatcatgtactctcatctaattagctatttcccagaatacacaggaccgaaacaggatgtcagagctgccagagactttatcctgaagctttaccaagatcagaatcctgacaaagagaaagtcatctactctcacttcacatgtgctacagatacagacaatattcgctttgtgtttgctgctgtcaaagacacaattctacagctaaacctaagggaattcaaccttgtctaaaagctgctgcccactcctcccctataacagaagatgtgatttgcaaactccttgttttatttgcaagtgcttctgacatcaccagagccagccccatgccaggaactaaggatgtcatgtagatcgtggggacagagatgggtgatggaacttggaagatatttgagtttaccaacatactttaaaagtccttacatcccaaattgtgtttataattattttcttgacttttggctataagattttgtgtaatttttgaatttggtgttttctagaatttttaaaagccactttgatttagttttaaatatgtttaaaaatagcgattaaaattatgtaagcaaggagcctgttagtttatagatcatgccttcaaacctctagagttaatttgggtgacttttttaaaaataagaatgttaatgggtttgaagctttttattaaaccttgtaatttagagacatttttaattgtgtttctcacctcatgctgaagggtgactcctttaacatgccaccaaagattttttttaaacacttggttctttttgtgtgttaactttctaagccaaattaatggatatataagtatatctaatttagctttgccacagtttgatcaccaagaagccaaagctgacatagagtaaatgggctctagatagcatatatgttttattggtgaaaaatgtgtgtgtgtgcgcgtgtgtgtgtgtgtacatttttacccccaatgtatatgaccagatcttaaaaatgtatgaaatggctagaagtccacattgtttgacaaatgttacgtaaccctgccaaagttctgatggccaccacagatttgctgtttgaattatgtatgctgtgcctttctgaggaggctaagaatataccattcagatattaaaaaaaaaaaaaa

SEQ ID NO: 88759 - DNA, 403 bp, Homo sapiens
  misc_feature (1)...(403): n = a,t,c or g
cattcatgtcaaactcgccgctacgcgagaatgccttgtcagatatatccgatatgctgaagaacttgacagagagccacacgtcaaaatcctccactccttccagcatctccgagaagtctgacattgacggggccactctggaggaggctgaggagtcgacgcccgcccagaagaggaagggccgccagtcaaactggaacccccagcacctcctgatcctccaggcccagtttgccgccagcctccggcagacctcagaagggaagtacatcatgtcagacctgagcccccaggagcggatgcatatctccaggttcaccgggctgtccatgaccaccatcagccactggctggccaacgtgaaataccagcttcgaaggacaggtggaacaaagttccn

SEQ ID NO: 88760 - DNA, 410 bp, Homo sapiens
cacagataacggacttaatgtcattgacatacttgaaacggactatgataattatatatatttttataacaagaatatcaagagtggggaaacattcctaatgctggagctctatgttcgaacaccggatgtgaactcacaactcaaggagaggtttgtgaaatattgtgaagaacatgggattgataaggaaaacatatttgacttgaccaaagttgatcgctgtctccaggcccgagatgagggagcaccctaagactccgggttggtgatctctgacaccggtggagagagggtggcccagggaccagtgccttccaaaagcattaggggttggccccaaagataccataaaaataatttggtaggaaagcttgtggaaaaatcttgaaatctggagttggaagacc

SEQ ID NO: 88761 - DNA, 651 bp, Homo sapiens
attatatattacatatatttctctagtttgttttagaagttgtgattaagtccttttgcataggttgttacaacagggaactattgattaaattagtataggaaagtaatgaccagctatttgtactctttcactgtgttaccaaatttcagttctgtgctctggtttctttacagctctatttagtcagatataagaaatagtaattgagattttcaaaagacaggattcatgatgatgttagacaattcatatgtggtttagcccatggcctcatgggttatttgaggtcaaaagtgaccaaatattttgtgtctaagtgccaccaaaatgcagacttcaaagaatctgtcatgctgcatatcctgaccctggttctgtgtcagtggtccttgggctgtgagggacactgcatgtggacctgtgctctgatgacaactgcagggctcacaaggaaaggcttataaaatatgaatagacaacgctctcactcacgtctcaacctcgtggaaataaaacgttttgcccttattcctccttggttaggggtaaataagccccagctggtgaggagagatcagatactgctcaaatcacccacttcctcagccaagggctctaatccaaggtattggcagaaattgaagaagg

SEQ ID NO: 88762 - DNA, 466 bp, Homo sapiens
  misc_feature (1)...(466): n = a,t,c or g
ccccactgatacgtcngaaatgattaccgtccggaagnacngcgncgacccaagcgtccgnggacgcgagcgcgggctcgccaggctacacacaacccagctgttccagcatgtgccaaagacacgctggtcaatcgtgtactcgccgcgctacatcattaccttaatgggcctgcagaagctgcatccctttgatgccggaaaatggggcaaagtgatcaatttcctaaaaggtatggaaggccccccttggactctcatctgcttcctccaacccacctgtcctctccgtcctcatccccaacataagcctcaggctctctcccatcttcagtttcagccctcggatggccttccacccatgcttccgcccaaaatgatttttccaacacagactcctaatcacgatatgatgtccctgactcagactctccctggctccccatcctgtgggcctaagtcctgc

SEQ ID NO: 88763 - DNA, 407 bp, Homo sapiens
tttcgtggctgaattcagacagcgttcttggctacagcattggagaaatcaagcgcagcaacacttccgaaacaccggagctgcttccttgtggctatctggttggagagaacacgaccatctcagtgactgtgaaagggctcgcagaaaacagcctggactcactggtgtttgagtccttgattcccaagcccatcctgcagcgctacgtctccctcctgatagagcaccgtcggatcattctctctggccccagcggcactgggaaaacctacctggccaaccggctgtctgagtatatagtgcttcgagagggacgggagttgacagacggggttatcgccacctttaacgtggaccataagtccagcaaggaattgcgccagtacctgtccaaccttgctgtc

SEQ ID NO: 88764 - DNA, 405 bp, Homo sapiens
  misc_feature (1)...(405): n = a,t,c or g
caaccccattagaatagcccgtgggagctgtcccggcttgggctgggtagccaggcctgtacgctctctgagtcagtcaggatgacttgcctggaagagggcaagatgtcgggtgaggcagttctctgtagccacagcagtacttgaaggggctgacggagcactcccagcagctggggctgcatggccttcagttgagggtctgggttgtacatcacagcgtgccatggttggacaatatttttcttagaaattttttgattgatttcatttgactcattggttggcgttctggagaaatatggggtaagtctctttctctttctctgtgactcttntcaaccccccccaacccaccagcccccttactaaataactatgtgtgtgtgtgcttatgtacgaaca

SEQ ID NO: 88765 - DNA, 407 bp, Homo sapiens
atgaatgtaaactgcttagcacctcacctgtgagagcaagcattctgaaggtgctagctttcattattactttggcatctctggacttacgcgttttcttgggctgcctcttcggcttttgagacctttctgtagcaatatatcatctcgatgagcagccacaaggtgaggaagaccagaaggatgtacatcatgatttctgagaccacagaggtgaagtcctctccagctgaaagaaagagaatgaggttcagaatatgcaaatccagcaaacctagagccgtcattggagccatatttttaagtacagcttaaataaagactgagtaaagaaactcaagaagatgtcaaaggtattccaaatcctgactctcccgcccattggctttctcactgactgtcatcac

SEQ ID NO: 88766 - DNA, 478 bp, Homo sapiens
  misc_feature (1)...(478): n = a,t,c or g
ctcgacatcgagaccactagtccangnggtggaattcgccatttgtcactggtggctaccatatgaaacagttcaggtgtagactcctttactatttcaactcaaagtctttcggtgaatcatgccctttattccaatgagtattacagatattagaagttcagggcctcgagtcattgacatttgtattcatgttgtgtcttcgtcactagcagtagtgattttaagtgtcgtgctatgatagctccatgcatgtaaagataaaagccccaaacactatcagctgttcattcagctcgtggaaattctaattccgtgttcattttttttctatagacatttgccatggctgagcacttcaaacagatcattagatgtcctgtctgtctaaaagatcttgaagaagccgtgcaactgaaatgtggatatgcctgctgcctccagtgcctcaattcactccagaaggagcccgatgggg

SEQ ID NO: 88767 - DNA, 406 bp, Homo sapiens
ttcccccatgcctaagccctgacagccactcatctggactcataattttgtaatctcctttgtggttgtggtggcttcaggactgtctttgggctttttgtgtttagtcattgaaccagtaagagaatcattgagttcagttatttgtctcagaatgggtacttttaccctccccaccccgtttctttcattgctggatgctagttgcatatacctttctctttgcaaatgtggagatgggagagtcatgctgtaaattgattttaccagttaagtgattgaccagcctgtggagatttaaaagggaaagccagtataatgggttgcgctaggtatttgactgtcccttaagtttgaaaccactgtgttagacaccagttttccttgcttgctagctggatagcat

SEQ ID NO: 88768 - DNA, 403 bp, Homo sapiens
  misc_feature (1)...(403): n = a,t,c or g
caaaagtacattgttcaccgtgatcttattgctgaaaaccttctccttgatggtgatatgaatattaaaattgctgactttggttttagtaatgaatttacagttgggaacaaattggacacattttgtggaagcccaccctatgctgctcccgagcttttccaaggaaagaagtatgatgggcctgaagtggatgtgtggagtctgggcgtcattctctatacattagtcagtggctccttgcctttcgatggccagaatttaaaggaactgcgagagcgagttttacgagggaagtaccgtattcccttctatatgtccacagactgtgaaaatcttctgaagaaattattagtcctgaatccaatanagagaggcagcttggaacaaataatgaaagatc

SEQ ID NO: 88769 - DNA, 434 bp, Homo sapiens
  misc_feature (1)...(434): n = a,t,c or g
gccctaccggattgnnnnncccgggccgacccacgcgtccgcctgaatcaagaaacttcagtaatatatataattaatggaactgtgtgccatccaaaagacatatatgccacagatcaagaaggaaactttaagtgtcctgctcttggttgtgtccggatatttaaaagaattgggtttctaaataaacatgcaatgaccgtacatccaaccgatttaaatgtgcgacaaacagtaatgaagtggagcaaaggaaaatgcaaattttgtcaaaggcaatttgaagattctcaacattttatagaccaccttaatagacatagctatccaaatgtgtatttttggttgcattttaattgcaacgagtcggttaagctgccgttccagcttgcccagcacacaaaaagtcacaggacatttcaggctcagtgtat

SEQ ID NO: 88770 - DNA, 392 bp, Homo sapiens
aaggtgtgggaggtagcgggctaggcacactcggcctgatgccatgtgcacccctccttccccctcagccacaggcctaatgattggctgcctggtctaccctgatggttgggactcaagtgaggtgcggcgcatgtgtggggagcagacgggcaagtacacgctgggccactgcaccatccgctgggccttcatgctggccatcctcagcattggcgacgccctcatcctctccttcctggccttcgtgttgggctaccggcaggacaagctcctccctgacgactacaaggcagatggaaccggtaatcacccaactccacaatggtgtcccctgcctggagaccctgggatgtgggtgggggttcatcttatccagtcctctaaggctt

SEQ ID NO: 88771 - DNA, 1149 bp, Homo sapiens
actgtggtgtaattccattaaacacctcctcttgcttcatcctggtgtgcctctttcatggcagggccctcagccaccctgctagatggttaggaccaaggctctgttctcctggaagccaaggtcggcacattggtcttgggcttctcttctctctgggtttcttgttcactaaggagtaacacagaggtcaggcagagaatgggggtctcgcaggctagggacctcagggagaggcctctgttgcccttttcagcaaggctggaaatgggatatgggcaggggacgtcttctctgacttcaccctagaccttctggctccaaatggggcccatggccttgagcacctgggaccagctctttccaccacagggcattgggcactgggcactttcttatcgagatagtcactcccacgtctggttcgtgatgggcttggccctccagctcagcacaactgcaagaatggattttgtattctctagacggacactgtccaagatggtagccattggccacatgcgacacatttttaatgaattaaaattaatcaagactggaaatgtcggccaggcctggtggctcatgcctgtaatcccagcactttgggaggccatagagggcggatgacttgaggtcaggagtttaagaccagcctggccaacatggtgaaacccatttctactaaaaacacaaaaattagctgggcatggtggtgtgttcctgtaatcccagctgcttgggaggctgaggcaggagaatcgcttgaacccaggaggcagagattggagtgagctgagatcatgccactgccctccagtggccaccacatccggcaaggcagatgggaccatttccttcatccagaacgttctgtggacatcactgctctaggttcctcccttatggagtctcacaagactgtctagccagcaagatctcttttccaaccaggccaggagcacctctccacccactgctgctggtctgaccgccttcctggaagtccctcttgaggcaggccctggagttagaagctgggcagaggcacccacagccttatcctttgccaatctctgactcaatgccacggccactgtagtgagctgaaccacctccagcagtcccctggcagaagcacctggaaaa

SEQ ID NO: 88772 - DNA, 546 bp, Homo sapiens
ggaattcgagcgttcatcttgcgggtgtgggcctgaaataagttccgagactgcttaatgatctatcacaggttctttcctaggagtgagtcaccagcacattttattaacccagttcacccttcgttgccccagcgcctgcaacaaagcaaccgagatcccgcagctgagccgctcccatcatgaagcctctggcctacacaatggggaagatgaaaccagccagcctcatcaatcgtccctgggcaggccagtctcctcttcagtctcatgttcagggtttgcataattaggcgcctgatggaggcgaatgtctgccccaccgaaggtcgtcattgtgcagcactctgtcggggagctgtgaggtacacagcagcccgggcctgctccgaacagcagcagagcctgtgaggaggagcctggcttttgcaggagcgcattaataaggttggaaacccgtggcttgggaatcagagccaatcgcagtcatgtcagaaatggaaataagaaactcctggatgaaatggaggagccagcaaccctcta

SEQ ID NO: 88773 - DNA, 478 bp, Homo sapiens
agagaagggaaaatgacatcaaaaaggacattctgttgtcttttgccttcctgcaaagaaaatgtgttataatattaagcttttcagtatggtttagctcaggttcaactttggtactagaagaaatgttcctgaaaggaaagtgaaaagaaatttcatttcaatataggtgactatgcagcctgcaattcaagtatggtttggagaagatctgcctctaagtcctcggagtcctctgactcccagacacggaccaggattggctaatgtttgtcagtacgatgagtggatagctgtgaggcatgaagccactttgttgcccatgcaagaagatctgtcaatctggttatctggtttattaggtattaaagttaaggcagaaaaattattggaagaacttgataatggagtactattatgtcaactgattgatgttcttcaaaacatggtgaaaacatgcaactctgaagaatcaggg

SEQ ID NO: 88774 - DNA, 393 bp, Homo sapiens
tgtggccttgttgtgaagaactttgatgccctgttgtatgtgatcgttatgacaatcctgtgaagtttttcaatgatgaaggaaactgaggcttagagagttggagtaatctgtgaaggctcaggatgggcaagaggtcccgcccaggtttgagcccagatgcgaggttaccacgcttcctggtgaggtgttttacaactaaggccaagccaggcaaaacccattgttctgcagcttctggcttggattgggtgtcttgttgagtatgtgggcagtggatctgatgttttccacttcctcccatgtggcagggctgtgtgcatggagcatgaggggctggctgggcagacagccttgatttgactgaattcagccatggcccatgttggaaaa

SEQ ID NO: 88775 - DNA, 404 bp, Homo sapiens
gtttggcaggaatgccaccacgggcagtgtgtcctcctcactgccacgtgtctgggggatgtgatgtccgtggtcctaggagtggtgctgtttccctggatcacttggttaaggtggtgtttgcaggatttctccatcagctgcgacaatgagaatgtccggcttctcctcaaagccttgcccagtggttgcagtgtccacccatggctcttgctgacagcagttgctgctgtaaagtttgcctagtgatgattttgtatttttctcattccttccacaatcattaacctgggttcttctataaggaagaaccgtctcttctctgttgtttattatttattcaattatttatttacatcaatctggacttagggatatttatttttattccatggattagaatc

SEQ ID NO: 88776 - DNA, 5328 bp, Homo sapiens
cccggccgtgagcagtgagagagctgacgggcagagcagactgcatgacagcaaagggcagaccaaactcctgcagctgctgaccaccaaatctgatcagatggagccctcgcccttagccagctctttgtcggatacaaacaaagactccacaggtagcttgcctggttctgggtctacacatggaacctcgctcaaggagaagcataaaattttgcacagactcttgcaggacagcagttcccctgtggacttggccaagttaacagcagaagccacaggcaaagacctgagccaggagtccagcagcacagctcctggatcagaagtgactattaaacaagagccggtgagccccaagaagaaagagaatgcactacttcgctatttgctagataaagatgatactaaagatattggtttaccagaaataacccccaaacttgagagactggacagtaagacagatcctgccagtaacacaaaattaatagcaatgaaaactgagaaggaggagatgagctttgagcctggtgaccagcctggcagtgagctggacaacttggaggagattttggatgatttgcagaatagtcaattaccacagcttttcccagacacgaggccaggcgcccctgctggatcagttgacaagcaagccatcatcaatgacctcatgcaactcacagctgaaaacagccctgtcacacctgttggagcccagaaaacagcactgcgaatttcacagagcacttttaataacccacgaccagggcaactgggcaggttattgccaaaccagaatttaccacttgacatcacattgcaaagcccaactggtgctggacctttcccaccaatcagaaacagtagtccctactcagtgatacctcagccaggaatgatgggtaatcaagggatgataggaaaccaaggaaatttagggaacagtagcacaggaatgattggtaacagtgcttctcggcctactatgccatctggagaatgggcaccgcagagttcggctgtgagagtcacctgtgctgctaccaccagtgccatgaaccggccagtccaaggaggtatgattcggaacccagcagccagcatccccatgaggcccagcagccagcctggccaaagacagacgcttcagtctcaggtcatgaatatagggccatctgaattagagatgaacatggggggacctcagtatagccaacaacaagctcctccaaatcagactgccccatggcctgaaagcatcctgcctatagaccaggcgtcttttgccagccaaaacaggcagccatttggcagttctccagatgacttgctatgtccacatcctgcagctgagtctccgagtgatgagggagctctcctggaccagctgtatctggccttgcggaattttgatggcctggaggagattgatagagccttaggaatacccgaactggtcagccagagccaagcagtagatccagaacagttctcaagtcaggattccaacatcatgctggagcagaaggcgcccgttttcccacagcagtatgcatctcaggcacaaatggcccagggtagctattctcccatgcaagatccaaactttcacaccatgggacagcggcctagttatgccacactccgtatgcagcccagaccgggcctcaggcccacgggcctagtgcagaaccagccaaatcaactaagacttcaacttcagcatcgcctccaagcacagcagaatcgccagccacttatgaatcaaatcagcaatgtttccaatgtgaacttgactctgaggcctggagtaccaacacaggcacctattaatgcacagatgctggcccagagacagagggaaatcctgaaccagcatcttcgacagagacaaatgcatcagcaacagcaagttcagcaacgaactttgatgatgagaggacaagggttgaatatgacaccaagcatggtggctcctagtggtatgccagcaactatgagcaaccctcggattccccaggcaaatgcacagcagtttccatttcctccaaactacggaataagtcagcaacctgatccaggctttactggggctacgactccccagagcccacttatgtcaccccgaatggcacatacacagagtcccatgatgcaacagtctcaggccaacccagcctatcaggccccctccgacataaatggatgggcgcaggggaacatgggcggaaacagcatgttttcccagcagtccccaccacactttgggcagcaagcaaacaccagcatgtacagtaacaacatgaacatcaatgtgtccatggcgaccaacacaggtggcatgagcagcatgaaccagatgacaggacagatcagcatgacctcagtgacctccgtgcctacgtcagggctgtcctccatgggtcccgagcaggttaatgatcctgctctgaggggaggcaacctgttcccaaaccagctgcctggaatggatatgattaagcaggagggagacacaacacggaaatattgctgacactgctgaagccagttgcttcttcagctgaccgggctcacttgctcaaaacacttccagtctggagagctgtgtctatttgtttcaacccaactgacctgccagccggttctgctagagcagacaggcctggccctgggttcccagggtggcgtccactcggctgtggcaggaggagctgcctcttctcttgacagtctgaagctcgcatccagacagtcgctcagtctgttcactgcattcaccttagtgcaacttagatctctcctgcaaaagtaaatgttgacaggcaaatttcatacccatgtcagattgaatgtatttaaatgtatgtatttaaggagaaccatgctcttgttctgttcctgttcggttccagacactggtttcttgctttgttttccctggctaacagtctagtgcaaaagattaagattttatctgggggaaagaaaagaattttttaaaaaattaaactaaagatgttttaagctaaagcctgaatttgggatggaagcaggacagacaccgtggacagcgctgtatttacagacacacccagtgcgtgaagaccaacaaagtcacggtcgtatctctagaaagctttaaagaccatgttggaaagagtctccagttactgaacagatgaaaagggagcctgtgagagggctgttaacattagcaaatattttttcccttgttttttcctttgttaaaaccaaactggttcaccctgaatcatgaattgagaaagaaataattttcatttctaaattaagtcccttttagtttgatcagacagcttgaatcagcatctcttcttccctgtcagcctgactcttcccttcccctctctcattccccatactccctattttcattccttttttaaaaaataatataagctacagaaaccaggtaagccctttatttccttaaatgttttgccagccacttaccaattgctaagtattgaatttcagaaaaaaaaaatgcatttactggcaaggagaagagcaaagttaaggcttgataccaatcgagctaaggatacctgctttggaagcatgtttattctgttccccagcaactctggcctccaaaatgggagaaaacgccagtgtgtttaaattgatagcagatatcacgacagatttaacctctgccatgtgttttatattttgttttttagcagtgctgactaagccgaagttttgtaaggtacataaaatcaaatttatatgtaaacaagcaataatttaagttgagaacttatgtgttttaattgtataatttttgtgaggtatacatattgtggaattgactaaaaaatgaggtaattcagtattaaattagatatcttcatagcaatgtctcctaaaggtgttttgtaaaggatatcaatgccttgattagacctattttgtatacttaagactttttattttctaaaccttgtgattctgcttataagtcatttatctaatctatatgatatgcagccgctgtaggaaccaattcttgatttttatatgtttatattctttcttaatgaaccttagaaagactacatgttactaagcaggccacttttatggttgtttttcttgcccactctggtaggggaaaaatcttttattaataggtgtcagtttcagacaactccaataccaagaaactgatgaccttttttgagctatttctccttaacccctaatacctttcttacctaaatttcagaatgatatctttttgatgtctaaaaagcaaagcattttataatatctcattagccaggctttttaggaacagagaagtttttccttgaaatttgattgtttgtttatttgtggcagggtgaaaaatgtacaaactacccctatttatacttatatctctctctatatgtacgcattatggaaatataggaagagatatagcccaaagatagatggtaagtagacagtctgaaaatgttgctccatactaaagaacctttctggaaatttgcatttcgctacttttttccacttgagaggggtctcaatacagggaggtggccaaggaacaacacttctcagtggccaccagttcatatatcccctcaaaaggctctacttttctccaccaaaccattgggttgcccaactgtgatggaaaaaacaagcagatgttggcccagaactccaggacctccccgtgggctgaggctcatgtggcatacaattcagtgtgaccagttttaatgttcagaaatatgtgaattagaatgacttttaacttcacacagcacaaaagagaaatggagtttaaactggatttgttttgttttgagtttcaagtcccttttcactacaacaccgtccaaaactatctacctatctcttcttttttatccatctgcccgctgtattttaatgtcaatcctaattcagacaaatccgcaacttcatgatactggtaatttataataattcgtgatcattgctgttttgaaggaaaagagatgataaattctcttacggtttcaatcaggtaatggattttgttttacatctagttaggagaagaaaagtaagtgaaggaatcctctgatcatattgatcactatagaagcaaaagccaaatcagttcccttcattatcagtatttctcatgctgtacacaataaatttgttagactgagtacttggtttttgtttaatagaacaaataatcagtgtttcacttatattactaaatgtgaaaaacataatgtgaaaagtatacatacattaacttgggtg

SEQ ID NO: 88777 - DNA, 330 bp, Homo sapiens
  misc_feature (1)...(330): n = a,t,c or g
aaaaattgtgcaaatgaagctgtggttcaaaagattttggacagggtgctgtcaagatacgatgtccgcctgagaccgaattttggannnatgcttgctactaacagtacccggggccttaatgaagatgagctcatggcccatggccaagagaaggacagtagctcagagtctgaggatagttgccccccaagccctgggtgctccttcactgaagggttctccttcgatctccttaatcctgactacgtcccaaaggtcgacaagtggtcccggttcctcttccctctggcctttgggttgttcaacattgtagcggccgaacgatgc

SEQ ID NO: 88778 - DNA, 1899 bp, Homo sapiens
ccggtttgaccgcctcgacccacgcgtccgcggacgcgtgggcagcgatggcggctgcgtcggggtcggttctgcagcgctgtatcgtgtcgccggcagggaggcatagcgcctctctgatcttcctgcatggctcaggtgattctggacaaggattaagaatgtggatcaagcaggttttaaatcaagatttaacattccaacacataaaaattatttatccaacagctcctcccagatcatatactcctatgaaaggaggaatctccaatgtatggtttgacagatttaaaataaccaatgactgcccagaacaccttgaatcaattgatgtcatgtgtcaagtgcttactgatttgattgatgaagaagtaaaaagtggcatcaagaagaacaggatattaataggaggattctctatgggaggatgcatggcaatgcatttagcatatagaaatcatcaagatgtggcaggagtatttgctctttctagttttctgaataaagcatctgctgtttaccaggctcttcagaagagtaatggtgtacttcctgaattatttcagtgtcatggtactgcagatgagttagttcttcattcttgggcagaagagacaaactcaatgttaaaatctctaggagtgaccacgaagtttcatagttttccaaatgtttaccatgagctaagcaaaactgagttagacatattgaagttatggattcttacaaagctgccaggagaaatggaaaaacaaaaatgaatgaatcaagagtgatttgttaatgtaagtgtaatgtctttgtgaaaagtgatttttactgccaaattataatgataattaaaatattaagaaataacactttcctgacttttttattattaaaatgcttatcactgtagacagtagctaatcttattaatgaaaaacaatagacaaacatctgtgcataatttttcagacacaattctgtaaatatttggaaaccttttaagtatttaaacttttaaatttttgaaataaagtattctaaactaatataaataaggacaatgaaaaaacatgaaaggacttagcataatgttattttatcttttctacaactttgtttaaattacctttccaaagatatttgtgtttatgtaattttccacggaataacattaatactctaggtttataaaccggtttcacattatttcatttgatcatcacaagagctttgtgaagtaagccgagaagttgttactggtatttaataatagcaatagaggagttaaagactttcccacagcttgcaggtcaagacaagaaattcaggtctcctaattctcagtggagctctatttctgttaacccaaattgctgctctgttttaggtctcaatttcatctgtaaaatgatactaatagtacttatcccattggatttttgttgagatttaaataaatagccaaaagccaatacataataaacactcaataaagattaaccataaggagagtcatgatctggttccaggaatacattgttagatgactgaaaaattgtattacttcaatgaaaatactataaataataacattttcatatattagttggttctcatgcatacataatctaattttatttgatcctcacaactgtttaagttttattaaatatacattatccctatttgtataaatagaatcatacaatacctgcctgctttcattcaacaaaattatcatgagatttttccatgttgtgtacatcaatagttcatctattttattgctcagtaatattccattgtgtggatgtatcactatttgtttacacattcaccactgatatataagttgcttccagtgtgaggctgttttaaataaagctgctatgaatattcaaaaaaaaa

SEQ ID NO: 88779 - DNA, 452 bp, Homo sapiens
atgattgaaggcagggatgctagcagcaaggaccccaaagaattatcagcattggggcccaaacttccccccaggctgggggaaactggacttcctgacatcaactaaccaggcgacatcctggataggcctcttcaaagatggccaaggaagtgcccacaggtggatggatggctcagcccccacctacataaactgggactccaggaaattggatgataatggaaccaccccagcctgtgtgatgatgctctaccagggacactggagcaactcctcttgcaaatcagagtctcctgtttacatctgtgagaagaggcagagctgctgacctaggcccctaccccataagattggtgtaaacctcttgttgtgcatcctcaacctccatccctgccctctttgggctttgaatccccagaggcaacaataaaggacgtttctccaaaaaa

SEQ ID NO: 88780 - DNA, 402 bp, Homo sapiens
tatttcactgctcttcaaccattgatattaaaactaaaaatagattaaatgacatgtatttcacaggaaatagacatttcacttcttttcagcaatcatgtgactttattgcttttacaccaacatatctctaatattaccatgcaattgcttctattaagtctggctacactgatgtgatgaaagttgaagtgaccttattggtatctgtgaacaggcatatgctcaatgaagtcaaagataatttcatcagttgtgtaacaacggttttgtaaatgggatttcaaaaccatgaaatcaaagtattgtattaataaaatgaattgcttagttatccagaaaagttgactctgtgggctttataaacatccctctgaatgaaaactttacagagagtgatag

SEQ ID NO: 88781 - DNA, 1521 bp, Homo sapiens
caatgctgccttaacttacatgcccagtgtttctcttcagtcactgtgtcaaatttgttcgagaatctgtgtttgtggatatcctcgacaacatgtaagaaaatataaaggtataagtagcaggataccagtttcttcaggattcatggtgcaaatgttaacagggatttattttgccttttataatggagaatgggatctagctcaaaaagcactggatgatattatatacagagcccagctagaattatatccagagccattgctggttgctaatgcaataaaggcttcattgcctcatggtcccatgaaatctaataaggaaggtacaaggtgtattcaagttgaaatcacaccaacttcctctcgaatatcaagaaatgcagtaaccagcatgtcaataaggggtcataggtggaaaagacatgagcaacctgacaacaataatgatgctactgaattgggcatccttgtcattcctgagattagtgtcacaaatgtggccggagagagaaccgggaatggggaaaaaggcagaacactaggagagattgatgctcagcatatacagggtgtgcaggaaacagccacagatcctagaactgagagcaaaggcttgccagagatcaggaggcaaaaatctgaaatacagaattaacaggtcaagaagaactgatggagatatctgaagttgacgagggattttattccagggctgcgtctagtaccagccagtcgggtttatcaaacagtagtcacaattgtagtaacaagccaagtataggaaagaaccacagacggtcaggaggaagcaaaactggaggaaaagaaaaagaaactacaggggaatcttgcaaagatcactttgctcgaaaacaaactcagagagcccaaagtgagaatcttgagcttctctctttgaagagacttactttaacaaccagccaatccctacctaagcctagtagccatggtttggctaagaccgcagcgactgtatttagtaaatcctttgaacaagtcagtggtgtcacagtcccacataacccgtcatctgctgttggttgtggggctgggacagatgccaataggttttccgcttgtagtctccaagaagaaaagcttatttacgtttcagaaagaactgaacttccaatgaagcatcaatcaggtcagcagagacctcctagtattagcattactctgtccacagattaattagtaacatatttttctcccataacctagtgaacctggaaatacaactttgcttctttatgaaagtaccctgggtctttcatccgtattcctgacaggagccctgatgtcttaaattctgaaggctcccctgactttatgaagggaagattgtctaggttgcactaagtcgaaatatggttttgttatctcttgattaagattttctccccttcgtttgcgtctttttctcccctcctcttctttgttatctgctgccccaagacttgtcagtgcccatcaacttttgccaggttgtctcat

SEQ ID NO: 88782 - DNA, 2057 bp, Homo sapiens
ggggaaaaaaaaagaaagaaaagaaaaaaaaaaggattgaacacagaaagactagagtagacaagaatcacttctccattcttggttatatttccttatctttatacactactgaaatcagtttgtttcaagtattttacctgggattcttgcatctacatgaaattggcctgcagtctgcctttcttacacttttttggtcagtttatggtgtcaagattataactccattaaatgaattggaaagtgttgcctattttcctgttctccataagaatttgcaaaagattggaatgatctgtttgttaaaagtttataaagctgtctggccctggtatttattggtgggaagactttaactactataattagactattcaggaattctatttttttcttgagtcaattttgaaaaaaaatctaagcatttacccattttacaatttattagcataaagtagcttaaggaattttcttatttctaaacctctcctggatatgcatacttccttttccgatactgtttgtatcttctcactttcttttccttggccgttttaccagaagtttgtctattttatttttttaaagaaccagtcttagctttgttcattctctctgcccttctcttttatgttctgctttctgatggtttgttctgttgttttctcatttcataaattggacatttaactcattcatgttcaaggttttttctatttttagtaagtatctgagtttatttgaattacctcctttgcctcaccccatgattgagtgtatgcatgtatacaaacatgtatatatacacatttttattgcttttccattcatatctttacattatgatttatttgacctgttaattattttacagtatttttaaatgcacagacttaagagttttataaatgtatttccttttcaaaaaaattttgtaatgttaatatcactattaataagacaattttatattttgtgaatcctgataaaatgtgctgaagacacaacattaattatgtgatattcctgccaaaaatgcataacatgaacatagtagagagaaatatcagaaaaagataaaatgaggaatatcctacaaagttaccagcctatacttctcaaaaatttcaagttaaaggagactaaagtgacgtgacaagtacctgcagcacgtgtttctggactggatcttggtcaagaaagcattttttaaacttttgttctttcggacatttttgagacattcggtaaaatttgagtaaggtctgtaaattattaatagcattatatcagtgtgacttcctgattttgataataatgtcatggttccttgaaaaagtccttgttttttaggaaatagacactggagcgtttagggttaacggaatattgatatgcaactgaatcacaaaaggtttaggaaaaattatagagagagaaaatggtagagtaaatggggtcagatgttaacctttggaaaatctatgtcgaggtatatggatactttgtactgttttgcagatttactgtaaatctggaatcatttcagaatagaaagtttaaaaatagcttttgttctaactaattgcatgtggtcaaagaacatgcgagtatgataaagcctgggcaaatttttatagcctttctctgcctcagctttaccatctgaaaaatggaaataatagcacctatgtcatatattgtttgagaggaagttaagacacttaaagtactgagaactcatccaggcacaagtatataaatatatgttgtagtaggctgaataatggcccccaagacatcaggtcctaatccatgaaccctatgttaccttacgtggaaatgaggtgtttgcagatgtgattaaattggagatcttgagatggggagattttcttggattatctaggtaggtcctaaatgcaatcacaagtgtctttaatcagaggcagggagattgcagacagaagaggagaaggcagtgtgatcatgaaggtgaggactggagtgatgcagccacaaaccaaggaatatcagtagccacaaaaaaaaaa

SEQ ID NO: 88783 - DNA, 430 bp, Homo sapiens
tttcgtgagctccagggctccccttcgctgctctgtgtcctctgctcctagaggcccaacatctgtggccctgtgacctgcaggtattgggagacccacagctaagacaccgggaccccctgaaagcctagaaatggacgacttgaaatatggagtgtatcctctcaaggaagcaagtggatgccctggggctgagaggaatcttctagtttactcttattttgaaaaggtaacctcttgagacattaaaattgtctacgcccaacccagctttcatttcttggggacacattgctggtcagccagtccgatgctggcactgatgggaaaacacagaaataatgtatgccccctggattgtcttagggggcagaaagataatgaaataaatatagtggaagaaaaatagtgttaaaaagtgaaaaatttg

SEQ ID NO: 88784 - DNA, 1325 bp, Homo sapiens
  misc_feature (1)...(1325): n = a,t,c or g
accatgaagcacccatgacaaaaataaaaaagttgactagtagtacagaccgatatgatcaaaggcatgctggaaacaagcctattaaaggtcagcttgaatcaagatttcatttgcatttgcgaagacataggagaattcatactggagagaacccttacaaatgtgaagaatgtgagaaagttttcagttgcaaatcacatcttgaaatacataggataattcatactggagagaaaccatacaaatgtaaggtttgcgacaaggcttttaagcatgattcacacctggcaaaacatactagaattcacaggggagacaaacattacacatgtaatgaatgtggcaaggtttttgatcaaaaagcaacccttgcatgtcatcatagaagtcatactggagagaaaccttataagtgtaatgagtgtggcaagacctttagtcagacatcacaccttgtgtaccatcatagactgcatactggagagaaaccttacaaatgtaatgagtgtggcaagaccttcgctcgaaattcagtcctcgtaattcataaggcagttcatactgcagagaaaccctataagtgtaatgaatgtggcaaggtttttaagcaacgagcaactcttgcaggacatcgtagagttcacactggagagaaaccttacagatgtgaagaatgcgacaaagttttcagtcgcaaatcacatcttgaaagacataggaggattcatactggagagaaaccatacaaatgtaaggtttgtgacaaggctttccggagtgattcacgtcttgcagaacatcagagagttcatactggagagagaccttacacatgtaatgaatgtggcaaggtttttagtacaaaagcatacctcgcatgtcatcaaaaacttcatactggagagaaactttacgaatgtgaagaatgtgacaaagtttacattcgcaaatcacaccttgaaagacataggaggattcatacaggagagaaacctcacaagtgtggtgattgtggtaaagcctttaattcaccttcacaccttattaggcatcagagaatccatactggacagaaatcttacaaatgtcatcagtgtggcaaggtctttagtctgaggtcactccttgcagaacatcagaaaattccttttggagacaattgtttcaagtgcaatgagtatagcaaaccatcaagcattaattgacatcagagtcaaatcagcattgacctgagtttgagttgacttaacattgatttcaagcattaatcgacattaaactgtttatgttaagaggaatgngccaggcgtggtgtctcacac

SEQ ID NO: 88785 - DNA, 837 bp, Homo sapiens
tccactaagaaaaacacctaatacttttctgtgccaataaaatgtaggggatttttttcttcttatattttctttcactccttgttctgcaccttgaaaatggatatttgctgaaatgagaggagctgaggaactgaagaaaaggagtgcttcaaattgtatatatgcattacaaatttatgtcaacaagtcaaaattctgacaaaacttctagagaacaaatgaatacaggctgtaatgtaatattgtattatctatttctctatgtacataaagtttcaactattgctcacagatgacagagttgatctggcagaagcaagatgcttatgtgcggaacagagctgggaagaaaatacatgcatcaagcaaacagtttattgagatcagtcaaatctagctgttttgcaagtcttctccaattctgtatctctaaaaatggcctccacacccaaaaaacaaaaaaaaatgttatctgttccatgaggcttttctctcttagataccagtttttgaagtaatccagtcccgcaaggccgtaactctagtataaacaccaggcttgttgggtttcgcacattcatctccccagctcactattccagcaaggtaccagatatctctagcatctgaactaaccagtggtcctccagagtcaccctggcatgcatctgtttttccttctaaggagccagcacataacattctaggagttatggcgtcattgtaagcttgaggttcattgcaagttgtagcgtctatgagagtcacctgtgcttgtcgaagatgattttgactgtaaccatcatatttcagtgctccaaatcctgtcacaaa

SEQ ID NO: 88786 - DNA, 2571 bp, Homo sapiens
atggaagcgggaccctcgggagcagctgcgggcgcttacctgccccccctgcagcaggtgttccaggcacctcgccggcctggcattggcactgtggggaaaccaatcaagctcctggccaattactttgaggtggacatccctaagatcgacgtgtaccactacgaggtggacatcaagccggataagtgtccccgtagagtcaaccgggaagtggtggaatacatggtccagcatttcaagcctcagatctttggtgatcgcaagcctgtgtatgatggaaagaagaacatttacactgtcacagcactgcccattggcaacgaacgggtcgactttgaggtgacaatccctggggaagggaaggatcgaatctttaaggtctccatcaagtggctagccattgtgagctggcgaatgctgcatgaggccctggtcagcggccagatccctgttcccttggagtctgtgcaagccctggatgtggccatgaggcacctggcatccatgaggtacacccctgtgggccgctccttcttctcaccgcctgagggctactaccacccgctggggggtgggcgcgaagtctggttcggctttcaccagtctgtgcgccctgccatgtggaagatgatgctcaacattgatgtctcagccactgccttttataaggcacagccagtgattgagttcatgtgtgaggtgctggacatcaggaacatagatgagcagcccaagcccctcacggactctcagcgcgttcgcttcaccaaggagatcaagggcctgaaggtggaagtcacccactgtggacagatgaagaggaagtaccgcgtgtgtaatgttacccgtcgccctgctagccatcagacattccccttacagctggagagtggacagactgtggagtgcacagtggcacagtatttcaagcagaaatataaccttcagctcaagtatccccatctgccctgcctacaagttggccaggaacaaaagcatacctaccttcccctagaggtctgtaacattgtggctgggcagcgctgtattaaaaagctgaccgacaaccagacctcgaccatgataaaggccacagctagatccgctccagacagacaggaggagatcagtcgcctgatgaagaatgccagctacaacttagatccctacatccaggaatttgggatcaaagtgaaggatgacatgacggaggtgacagggcgagtgctgccggcgcccatcttgcagtacggcggccggaaccgggccattgccacacccaatcagggtgtctgggacatgcgggggaaacagttctacaatgggattgagatcaaagtctgggccatcgcctgcttcgcaccccaaaaacagtgtcgagaagaggtgctcaagaacttcacagaccagctgcggaagatttccaaggatgcggggatgcctatccagggtcaaccttgtttctgcaaatatgcacagggggcagacagcgtggagcctatgttccggcatctcaagaacacctactcagggctgcagctcattattgtcatcctgccagggaagacgccggtgtatgctgaggtgaaacgtgtcggagatacactcttgggaatggctacgcagtgtgtgcaggtgaagaacgtggtcaagacctcacctcagactctgtccaacctctgcctcaagatcaatgtcaaacttggtggcattaacaacatcctagtcccacaccagcgctctgccgtttttcaacagccagtgatattcctgggagcagatgttacacaccccccagcaggggatgggaaaaaaccttctatcacagcagtggtaggcagtatggatgcccaccccagccgatactgtgctactgtgcgggtacagcgaccacggcaagagatcattgaagacttgtcctacatggtgcgtgagctcctcatccaattctacaagtccacccgtttcaagcctacccgcatcatcttctaccgagatggggtgcctgaaggccagctaccccagatactccattatgagctactggccattcgtgatgcctgcatcaaactggaaaaggactaccagcctgggatcacttatattgtggtgcagaaacgccatcacacccgccttttctgtgctgacaagaatgagcgaattgggaagagtggtaacatcccagctgggaccacagtggacaccaacatcacccacccatttgagtttgacttctatctgtgcagccacgcaggcatccagggcaccagccgaccatcccattactatgttctttgggatgacaaccgtttcacagcagatgagctccagatcctgacgtaccagctgtgccacacttacgtacgatgcacacgctctgtctctatcccagcacctgcctactatgcccgcctggtggctttccgggcacgataccacctggtggacaaggagcatgacagtggagaggggagccacatatcggggcagagcaatgggcgggacccccaggccctggccaaagccgtgcaggttcaccaggatactctgcgcaccatgtacttcgct

SEQ ID NO: 88787 - DNA, 1120 bp, Homo sapiens
atggatgaactctccgagttgagagaattctatgatccagatacagtggagctgatgaactggattaacaattacactctaggtaagggtagcacagtacacaaggcccagagtaagtgtttagatctcttaacagtggggttaattcagactctaaaatctttcagctctaacactccaagaaaggctgtgtttgcgggaagcatgcagttgctggccggagtcaagctgtgcacgggaaggaccctaaccaaccacccgcactatgaagacagcagcctgagagagcggaccagagcggtccctaccacatcatgtgggacttcaagatgtgatttgggtggggacacagccaaaccatatcagaggggaaatcagaacgtaagtgcacagggctcgcatctcctggtccaggacctctgcctgcccatatccactaaggacgtgccattagaccacaggtcctccccaggtcgggacctctgcctgcccatatccactaaggacccccagaatctgggacgctcagtttgcatccatccactgagggtgtgtggcactggtatgaacgtgaagggggcctcctgtggcgttgcccacggtgtgctgcaagtggctctcacccctaggatggacgagagggagaggagcagtggggtctctcaattagctgagatgcggagtagcagtcaagtagcatttgccacattgcatttttatgtctttttgaaggtttatcagatatatgccaagagggcaccagaggaagtgcatgccctcctaaggtccttcggcactgactacgtaatcctggaagacagcatctgctacgagcggaggcaccgccggggctgccgactccgggacctgctggacattgccaacggccacgtgagcatgctgcctctccctgtgtgggggtctcctggaggggcgggactctgatttgaatcctaagaatgtgaatctttttatccttaatgtctagttgaattacgctacgaatcaagtatttgctttttctcttgcttcctacagaagccctctcttggcactttagtgactgccactggggctgggcaagggagaggtgagaggggagccctgggtccccaaggtc

SEQ ID NO: 88788 - DNA, 532 bp, Homo sapiens
tttcgtgctggagcttccttaggaaagcccgaagcttgtgcacggtcaagccgcgatgtgcaaagcagggagggctgggtgctcaggccattcttgttgccctggggtaggtccttccctgggccccagatggacagcagtgcatcagggttttcaaaaaggggctgctgcctcgcagtcctcaggcttggccatcctctccttgcagaggcgacgaggtgatcgccgtggccagcatgaactacgatcccattgtgtccaaggtcgctgaggtgctggcctcaggccgtgccatccggaagcgggaggtggagtgagtgtgggtgtgggaagcctgggggtgggagtagttccctggagtactggctaaggtgcctatgacagccagccgcccccacaaccctccagggcctttcccctcttggtttgcatcgcctgaggcttacaggactacagggaggtgtggggcaaggatcatggtttgagagcaggctggttatgtgttcatggtggatggaagggatagagatgt

SEQ ID NO: 88789 - DNA, 419 bp, Homo sapiens
tttcgtctcggcggctctgacgggtccgttccggcgtgaggcgcagggacccgcgtctccgctcctgtgggaggcccggggctcgcagcgcgttcgggtgccagggacggtgggtgtatggggtctgggctggcgctgtgctcttcgagagggaccctaagctgttccagggctgggagagatggcgaaaagagaattcgccctttggagccggaatgactttggacaactgcaagctcttttctgtccaactgcattttagttatacccaaggagtggaaaagtaaattattcggataatgcagtttagccactttcgaacaaaatcgcaggttaacctgaatatccacatttttgagaaagactgtgtgggctttgggacgggtggcaggaggaaacggcgcgcacttaaagtattt

SEQ ID NO: 88790 - DNA, 1052 bp, Homo sapiens
gccacgcctgcggcgctgctggttgaggctgtgtgggtgggggacgggccgaggcgatggcggagaagtttgaccacctagaggagcacctggagaagttcgtggagaacattcggcagctcggcatcatcgtcagtgacttccagcccagcagccaggccgggctcaaccaaaagctgaattttattgttactggcttacaggatattgacaagtgcagacagcagcttcatgatattactgtaccgttagaagtttttgaatatatagatcaaggtcgaaatccccagctctacaccaaagagtgcctggagagggctctagctaaaaatgagcaagttaaaggcaagatcgacaccatgaagaaatttaaaagcctgttgattcaagaactttctaaagtatttccggaagacatggctaagtatcgaagcatccggggggaggatcacccgccttcttaaccagctcaccctccctgtgtgaagatcccccgggactgcgatgcggcgtgaggctgggactgcgagtgctgacgccaccttcctgctgaggtgggactgggccctggacacacccctcagcccctctgtcctcattgtttggcctcatgggaccgaggggctggaggagaggcggagctgtgccccagctgttccagcagcttgtctggcgtcaactggctttcagagtgctgacccctcatcactgtggggatcattctctctgagggcagatgaggcgcaggaaaatagtcttggaaatgttaaatatgatgggtaaattaaaagttttacaacattctacctaatatttttcttttaacatactttttctgttctattgtattatggtgcccgaaaagctaaataacgactaggaaaaatttttttaaaaaaagaaaaatcagtttaatgtgtggaagtacttaagtggtattatattttacattttcaagtatagtgcataaagaatgttttaaatgtaactgttttcatggatttcaattagacatgcctataataaactaagtatgtggcttaaaaaaaaaa

SEQ ID NO: 88791 - DNA, 741 bp, Homo sapiens
tttcgtccttcagaaatgctcgccatcatgcttgggagataagatccgagccctgggacgccgcctccgctcctccaggcgcccctcttcactgtctcttctgtgtgccttctgcttctcctgcctccaaccaggtctggtttcaaaaccgcagggccaaatggcgcaagcgggagaagcgctggggcggcagcagcgtgatggccgagtacgggctgtacggggccatggtgcgccactgcatcccgctgccagactccgtgctcaactccgccgagggcggcctgctgggctcctgcgcgccctggctcctggggatgcataaaaaatccatggggatgataaggaagccaggaagtgaagataagttggcaggactctggggctctgaccacttcaaagaaggttctagccagagtgagtcaggatcacagagaggctcagataaagtgagccctgagaatggcttggaagatgtggctattgacctctccagctctgcccggcaggagaccaagaaagtgcaccctggggctggtgctcaaggaggctccaactccacggcactggaggggccccagccagggaaggctgcagctcttaccatgtgttgccttgtcaactcctctggggcagcagctgtgtctgatacactctttggagttcagaggccagaaagataccttctagttgatgggaaaatatggtgcttcctgaagaaggaagggcagtacaaggaaa

SEQ ID NO: 88792 - DNA, 1900 bp, Homo sapiens; identical to SEQ ID NO: 63918

SEQ ID NO: 88793 - DNA, 5779 bp, Homo sapiens
gcgggtagccagaggctggggcggctgtggagcctgtggtgggagcggcattgtggggcagggaaaaggtgagccgagccgacggaggggacgcgctgcggggcgcccccagtctatggagcggggtaagatggcggaggcggagagcctggagacagcggcagagcacgagcggatcctgcgagagatcgagagcactgacacggcctgcatcgggcccacgctcaggtctgtttatgatggtgaagaacatggacgtttcatggagaagcttgaaactcgtatccgtaatcacgaccgagaaattgagaaaatgtgcaactttcattaccagggctttgtggactctataactgaactgctgaaagtgagaggagaagcccagaaactcaaaaatcaagtgacggatactaatagaaaactacaacatgagggaaaggaactggtaatagcaatggaagagctgaagcagtgtcgactacaacagagaaatatttctgccactgttgataaattaatgctgtgtcttccagtcctagagatgtacagcaaactgagggaccagatgaaaactaaaaggcattatcctgcactgaaaactctggaacatctagagcatacctacctgcctcaagtaagccactatcgattctgcaaggtgatggtggacaacatccccaagcttcgagaagaaataaaagatgtttctatgtccgatctcaaagactttctggagagcatccgcaaacattcagacaaaattggagagactgccatgaagcaagcccagcagcaaagaaacctggataacatcgtcttgcaacaacccagaataggtagcaagaggaaatctaagaaagatgcatatataatctttgatacagagatagaaagtactagtccgaagtctgaacaggattcaggaattctggatgttgaagacgaggaagatgatgaagaggtacctggggcccaagatttggtggatttctctccagtttatcgatgtctacatatatattctgtcctgggtgcccgggaaacatttgagaattactaccgaaaacagaggcgaaaacaggctcgtttggtacttcaacctccatctaacatgcatgaaactttagatggctacaggaagtattttaatcaaattgtaggcttttttgtggttgaagatcacattttacatacaacccagggcttagtaaatagagcctacattgatgaactgtgggaaatggcactttcaaaaaccatcgcagcactccgtacccactcgtcttactgttctgatccaaaccttgtgttagatttgaagaacctcattgtgctttttgctgacacacttcaggtgtatggtttccctgtaaatcagctttttgacatgctgttagaaatcagagaccaatatagtgaaactctgctaaagaagtgggcaggtattttcagaaacatacttgattctgacaactacagtcctataccagtaacaagtgaagagatgtacaaaaaggtggtaggacaattcccatttcaagatatagaactggaaaagcaaccatttccaaaaaagtttcctttctctgaatttgtgccaaaagtttacaaccaaattaaagaatttatctacgcttgtctgaagttttcagaagatcttcatctaagctcaactgaagttgatgacatgattcggaaatcaacaaacctgttgctaaccaggactctgagcaactctctgcagaatgtaattaaaaggaagaatattgggcttactgagcttgtccagattattatcaatacaacacatttggagaaatcctgtaagtacttggaagaatttatcaccaacatcactaatgtgcttccagagacagttcacactaccaagctctatggcaccacaacttttaaggatgctagacatgcagctgaagaagagatttataccaacttaaaccagaagattgaccagttcctacagctggcagactatgactggatgaccggagatttgggcaacaaagctagtgattacctggtagacctcattgcctttcttcgtagcacctttgctgtattcacacaccttcctgtaagtggcagttgctcttactttgtcctttatatataaaaagatttccttataatttagtttggtgaaagatgttagtttctgctgtaactacccaggaagattttcagtatataaaggcgcatgctatatttattaacctttaatgatatgtagaggctacttccatcattttttcattgacctttgcatttttttcatctgaaaatggttcctggtattatgtctgcttatcttcctatgatgttcaaggtaattagtacaaagacaatataaaagccttggtagaattaaaaaaagaaacttagttagaatttcagatatgtatattttagttttagaatattctttaacttttttatataaactgaaattctttgatgaaatgctccatcttttttatctaatttgtctatgttttctctgttttcttaagcatattaattatagacattcaaaatcattctttactacttcttatatatattatacatacatattggtggattttttttctcttggttttcagtgatatggtcctgtctgtttctaatatttttcggttgatgttagacattgtataaaatatgtagagattccaggtggtgttatcttccaccagaaaaggttcatgttttcctttacttagtaaatagaatgggcaggtgggttgtggtttgaagctgaccaccttagtaccatcatggactgatttggattaatattgggttgcagttgtagtgtactttgtttgcccttgttggtaggatatggctctgcagagcttttaaaaactgcctgatatgtcattgtctttttagcaccaaagaggactatagaaattcctgctcttcacagaaaccttgtctgttcagcctcctgtactctttcgttttagaatctggtaaatgtcttgagaaggagacttagcagtacccagtatcagcaattgctgatgggaaaaaaagtgttggggattgtcagtgttactttaccatccctaatgaggtttcagctcctatgtgatctgaatgtttgtgtaccccaaaaaatcatatgttgaatctaataaccagtgtgattacattaggaggtgaggccttgggaggtgatagattatgatggtagagcctcgcaaatgggattagtatacttataggagggacttcagagagctgccttgttccttgtggccatgtgaggatacggggatacaggaagaagactccttttttatttcgcactaggaaataggccttcatcggacaccgaatctgctgataccttgatgttggacttccaagcctccagaactgtgagaattcttttgtttgtaagctaccagtctatgggattttgttacattattctgaatggactaagatagctcctgtcatttttaggcattcttctactagtgagtctttttctctgaaacactgtgaaactgtgagaaatctccttgcttttcaaagattttggcttaaacccttattttcctcagccgtttagctttagaattcagtaaatatcttgagggtaaaactagtcctcaaacctctaactgtggcactctagtctgttggaagcagcaaagattccaagtttttttcgccccctagtagttagtctctgcctggttttaagattctcagtctgttgcccttgtctacgttcctcaaatgcccacaaggaaagctgcagattttcacctcacctttaaaaggttttgtcctctctgcagttttattccctttagtcttcattgcttcacagcacctgatgccttttaatatgttttttctacatgttttacttcctctcctagttgttcctagtgggagcatttatctgcagaaaattatgtcattttgtctggctttatcctgataccaaagccagacaaaaagagcacacacaaaaaaactatgagttaatctcacaattatggataaaagtaaaataaataaaattttagcaagtcaattcccagtgttttaagaaagtaattttgtactagtgtaggatttattccagaaatgcaaggatggtttgatattttaaaaaaatatgttaatataatttatcatattactaggtgagggagatacagtttcttgatgtattctagaaagacattttattacatccaggctacattcttgatttaaaaacaaagtttactaaattccaagcagtataatattttaataacaaaataaagaacatctatttgaaatttagtggccaccatagattgaacagtagaacaataaaacatttattttcattgacaacaggaattgggtgaagatgcttctcaccaacactttagaagttctataaaataaatgtaaaaaaagaataaattacattataatgagccatgcatgtcttagtccattcctgctcccataacaggatactgtagactgagaaatttataaacaacagaaatttgtttctcacagttctggaggctgcaaagtccaatattaagatgtcagcagattcagtgtctgataaagtcctgttactcataaatggcacctctgtatccttacgtggcagagaaggcaaaaaggacaaactcactcccccaatcccttctataaggcactaatccaattaatgagtgatgtaatcacttctgaaatttttgtgccctcccccacaaaaattaaaaattaaaaaaaataacaaagttgcattggggattaaatttcaatatgaattttggcaaggctcaaacatttcaaaccatagcacatgcatattattattcataggttattattatctaaatagaacatactaaaaattcattaagaccaataagagtttaggttagatgattcacttagaaaacaaataaacttttcttatattagcaatgcccacatagaaaatatagtgtcaaaagtgtcttatttactattgggacatagatataatttttctatgcagctacttagcaagtcaatttagaaataatgtgacaacatcacagagtaatataaaagagactttcttatgcacaaatatatatggtattccaggatgggagtatttcattctgtagaaagttttttcaaatttaatctaattgcagtgagtatcaagtaaatttgtttagggaagaatcttaatgaaatcattctgaaattcatttgtaagcaaaaatggacaatatttggtaaaaaatgataacatgaacataatttgtaactctattaataagacatacaaattaagcttgtgtgatatttttgactataaactactcagaaataagaaaatggtaacactccttgtttataagaaatatttgtggaaataggtattttcatacctgctgctaggggtctagttattgtagtctttttggagtcagtttttcaatatgcctcagaaaccccttaaaatgtgcttacctttttactatgtaattccccttttagaatttgaacttaatgaaataatcatgattgtattataatattcagatgtaactatatttaatacaatgtattttgtatagcgaggagtaggtataaattaaaaatccaacaaacaaatgtgttcacaaactaaattattgtatattcatataatgtgatattcattaaattaatgtaaatttatatttattcattaaaaatatattcgttatttcttaactgg

SEQ ID NO: 88794 - DNA, 2775 bp, Homo sapiens
ggcacgagcgcagccttccggcaagggagcccaacaccagccttgccagagaagcgaaggatgtcagtgggagaccgggcaggcagcctccccaactatgccaccatcaatgggaaggtgtcttcgcctgtcgccagcggcatgtccagtcccagtgggggcagcaccgtctccttctcccacactctgcccgacttctccaagtactccatgccagacaacagcccggagacgcgggctaaagtgaagtttgtccaggacacttctaagtattggtacaagcctgagatctccagggagcaggccatcgcgctcctcaaggaccaggagccgggggccttcatcatccgcgacagtcactccttccgaggcgcgtacgggctggccatgaaggtgtcttcgccacctccaaccatcatgcagcagaataaaaaaggagacatgacccatgagctggtcaggcattttctgatagagactggccccagaggagtcaagctcaagggctgccccaatgagccaaacttcggatcgctgtctgccctggtctaccagcactccatcatcccattggccctgccttgcaagctggtcattccaaaccgagaccccacagatgaatcgaaagatagctccggccctgccaactcaactgcagacctgctgaaacaaggggcagcctgcaatgtgctcttcgtcaactctgtggacatggagtcactcactgggccacaggccatctctaaagccacatctgagacgttggctgcagaccccacgccagctgccaccatcgttcacttcaaagtctctgcccagggaatcactctgactgacaaccagagaaagctctttttcagacgccactaccctctcaacactgtcaccttctgtgacctggatccacaggaaagaaagtggatgaaaacagagggtggtgcccctgctaagctcttcggcttcgtggcccggaagcagggcagcaccacggacaacgcctgccacctctttgctgagcttgaccccaaccagccggcctctgccatcgtcaacttcgtctccaaggtcatgctgaatgccggccaaaagagatgaaccctgccccttgcccagggccagtgccatggggaaggggcttgtggggaggggacccatgaatcctgaccactcttgaacccagaaggaggactttgggccaatttcggaggagagaagaaagtgcaacgtggggagagggaagtgaattgcagaggggagggggaaaagagagagagagagagagagagagagagagagaaagatgggggagaagaacttggattcccctgggtagatggaaactgcaaaaacccaaagcctccaaaactaaccaggtccacctaacaccccctccctcccctaagaagatggatgtcctcaaaagagaaggaacaaacctccttgggaatccacattttttgggggaatggaaaagctctgtctccctaactcaactgctttgcaaggggaaatcaagctgggagaatctttttctggccacctgtagggtaggttgtcaaaccaaacagagccaccgtgggacatcaagtggaagaacttgtttgcttgaaagtatctcagacccaaggcacctcaggtctctttgctgtgcctccactatattgtcgtgtgggtgtgtgtctgcacccacatcctcacacattgatctagatctgcctttatccactcgaattataaacagctcggcttgtccttgtcccatgtgtttgtagacacacatgcatactgtccaaagattagggttggtggtggcagtgcagcaggggagggacaaacaaccaagctatgggtgacagaggctctctcctggtgcctgcacctgcactctagtgaccctgggtgccgccagacccttctcttctacaaagaccccagcaggagtgggagggtctgcaatggcatcgccctgtcctgccttggccagaagcctggagctttggtttgaggaggtagagatatgtgtatccataggaagagatctgtcagaacaggcagctgttgagctcggggtgtcttccccaaggcatgtggctcagcagcaagaaaggcaagttgctcctgctggggccctggactctgccttagctcccacctctcagccttgttattgggtttcatgcccctggaccagccttatctcagacctgcttacctgcatgatgcctttttgggggctggggattgagtcttgctgctctgcccagccctgttctattctgcagggtccctgtgttggaattctccctggggaacctactttctgctcagtgaggctccggccagaaacctggagtccttatcctcccctctgtaagtgttttagggtctggcttttgcaggcaccctctgacctcagcagagctcctgggcctgctgcctgcacaccacatcgcctacctacaatgccaaagcctcactgtcaccctttctgccttggtttccctagctgagccacgctgcccatgcagcagagggcagaaggcttgcacttgggccaaagggcctaaggtccactggacagttgggaaaacacctgaccaccatttaaggactctaagccagaatggaaaattcaccaggactccattcttaagcctatgcgagtcccctagagagaggcattgtactgatatataaatattatataatatatacatgagacatactgacagaatctgtaagctaataaaatgtaagaaaaggttaaaaaaaaaa

SEQ ID NO: 88795 - DNA, 424 bp, Homo sapiens
tttcgtgaagccagagcttgaaaacggatgcttcatgacagtgttgtaattactgctaagctgataggaaccagggcccagtggacaaaggggccaggaggttgatagtagaatgcagatggttgacataaacatcagcagggaggtttctgtgagagtcaagagtcatgcctgcatgtggcagtggggagcaaggagaatgctacccctctgcctggccaggaagtcatgggatatcagaggaaaaaaagcttttagttgagtcagggtgtcaggggaggtggtaccttcagaaaccagccatgttttaaagaggaaaggaaatattttcttccagaagaggctgaggatatttgtttgctgctgacagattgaattgtaggggcaggagagaaagacctcagggagtggggaaggcagggat

SEQ ID NO: 88796 - DNA, 424 bp, Homo sapiens
tttcgtccggatccgatcccgctctgcacattccaaaggcaggtgtcagagatggctgaagatgggagcgaagagatcatgttcatctggtgtgaagactgcagccagtaccacgactccgaatgtcccgagctgggcccagtggtcatggtcaaagactcctttgtgttaagcagggcaaggtcatcccttcctcccaacttggagatcagacgactggaagatggagccgagggggtgttcgccatcactcagctcgtcaagcggacacagttcggtccctttgagtccaggagggtcgccaaatgggaaaaggagtctgcatttcccctgaaggtgttccagaaggacgcgcaccccgtgtgcttcgacacctccaacgaggatgactgcaactggatgatgctggtgcggccagcggcgg

SEQ ID NO: 88797 - DNA, 367 bp, Homo sapiens
ttcctcagctacgactaccaggtacctcgggttcctccctcctccgagagaccgccgaggtgcgggctgtgagagggggagcgtggagcctccgaggccgagggatcagtgtccttcagtgatgtggctgtgggcttcacccaggaggagtggcagcatctggactctgctcagaggaccccgtacagagacatgatgctggagaactacagcctcctcctctcagtgggatattgcattaccaaaccagaggtggtttgcaagttggagcatggacaggtgctgtggatattagaggaagagtccccaagtcagagccacctagactgctgcatagatgatgacctgatggagaagagacaggaaa

SEQ ID NO: 88798 - DNA, 2031 bp, Homo sapiens
cggcaccgatccgcaattcccggatcgacgatttcgtgcgcagagtggagtcaaaggcaaccagtgctcgctgcggtctctggggatcgggaccgcggcggcggcccgcgagcgggatgttccggggcttgagcagttggttgggcttgcagcagccggtggcaggcggtgggcagcccaatggagatgctccacccgagcagccgtccgagacggtggctgagtctgcggaggaggagctgcagcaagcgggagaccaggagctcctccaccaggccaaagacttcggcaactatttatttaactttgcatctgctgccacaaaaaagataactgaatcagttgctgaaacagcacaaacaataaagaaatccgtagaagaaggaaaaatagatggcatcattgacaagacaattataggagattttcagaaggaacagaaaaaatttgttgaagagcaacatacaaagaagtcagaagcagctgtgcccccatgggttgacactaacgatgaagaaacaattcaacaacaaattttggccttatcagctgacaagaggaatttccttcgtgaccctccggctggcgtgcaatttaatttcgactttgatcagatgtaccccgtggccctggtcatgctccaggaggatgagctgctaagcaagatgagatttgccctcgttcctaaacttgtgaaggaagaagtgttctggaggaactacttttaccgcgtctccctgattaagcagtcagcccagctcacggccctggctgcccaacagcaggccgcagggaaggaggagaagagcaatggcagagagcaagatttgccgctggcagaggcagtacggcccaaaacgccacccgttgtaatcaaatctcagcttaaaactcaagaggatgaggaagaaatttctactagcccaggtgtttctgagtttgtcagtgatgccttcgatgcctgtaacctaaatcaggaagatctaaggaaagaaatggagcaactagtgcttgacaaaaagcaagaggagacagccgtactggaagaggattctgcagattgggaaaaagaactgcagcaggaacttcaagaatatgaagtggtgacagaatctgaaaaacgagatgaaaactgggataaggaaatagagaaaatgcttcaagaggaaaattagctgttcctgaaatagaagaataatccttaacagtctgcaaactgacattaaattctagatgttgacaattactgaatcagaaggcatgaaagagtataattttatgaaattcaaaattattcttttttcaagttgaaacttgcctcttctactttaaaaaagtatatagaacagttacttctaataatcagaaagagatgttttatagaacatttctttaatataaagttagagatgtcttcataggcagtatggctatctttgccacagaaacataagtaaaattttagagttctgttttccatgaggtcaaaaatataatttattcctcagtcatggttttctaaatatctgtactccacattccattttaattgatatgagggtgttaaagtacctacttaatggggttgattactacaaaaatgaccaaattataccaaagaacttaagaggaagcactttcagaactattcacttgccaggtattttctaaaattccacctgaaagccaaaagataaaataaataagttgattttaatgatataagcatcacacaattttacattaagaaatactgtgcaggccatgcgtggtggctcaggcctgtgatcccagcactttgggaggccgaggtgggcggatcaccggaggtcaggagttcgagaccagccttgccaacatggtgaaaccctgtctctactgaaaatacaaaagttggccgggcatggtggcgggcacctgtgatcccagctactagggaggcttttgaacccgggaggcggaggttgcggcgagctgggatcgcgccactgcactccagcctgggtgatagagtgagattcagtctcaaaa

SEQ ID NO: 88799 - DNA, 2168 bp, Homo sapiens; identical to SEQ ID NO: 63459

SEQ ID NO: 88800 - DNA, 4119 bp, Homo sapiens; identical to SEQ ID NO: 64707

SEQ ID NO: 88801 - DNA, 11775 bp, Homo sapiens
atgatgaacgaagatgcagctcagaaaagcgacagtggagagaagttcaacggcagtagtcagaggagaaaaagacccaagaagtctgacagcaatgcaagcttcctccgtgctgccagagcaggcaacctggacaaagttgtggaatatctgaaggggggcatagacatcaatacctgcaatcagaatggactcaacgctctccatctggctgccaaggaaggccacgtggggctggtgcaggagctgctgggaagagggtcctctgtggattctgccactaagaagggaaataccgctcttcacattgcatctttggctggacaagcagaagttgtcaaagttcttgttaaggaaggagccaatattaatgcacagtctcagaatggctttactcctttatacatggctgcccaagagaatcacattgatgttgtaaaatatttgctggaaaatggagctaatcagagcactgctacagaggatggctttactcctctagctgtggcactccagcaaggacacaaccaggcggtggccatcctcttggagaatgacaccaaagggaaagtgaggctgccagctctgcatattgccgctaggaaagacgacaccaaatctgccgcacttctgcttcagaatgaccacaatgctgacgtacaatccaagatgatggtgaataggacaactgagagtggttttacccctttgcacatagctgcacattacggaaatgtcaacgtggcaactcttcttctaaaccggggagctgctgtggacttcacagccaggaatggaatcactcctctgcatgtggcttccaaaagaggaaatacaaacatggtgaagctcttactggatcgaggcggtcagatcgatgccaaaactagggatgggttgacaccacttcactgtgctgcacgaagtgggcatgaccaagtggtggaacttctgttggaacggggtgcccccttgctggcaaggactaagaatgggctgtctccactacacatggctgcccagggagaccacgtggaatgtgtgaagcacctgttacagcacaaggcacctgttgatgatgtcaccctagactacctgacagccctccacgttgctgcgcactgtggccactaccgtgtaaccaaactccttttagacaagagagccaatccgaacgccagagccctgaatggttttactccactgcacattgcctgcaagaaaaaccgcatcaaagtcatggaactgctggtgaaatatggggcttcaatccaagctataacagagtctggcctcacaccaatacatgtggctgccttcatgggccacttgaacattgtcctccttctgctgcagaacggagcctctccagatgtcactaacattcgtggtgagacggcactacacatggcagcccgagccgggcaggtggaagtggtccgatgcctcctgagaaatggtgcccttgttgatgccagagccagggaggaacagacacctttacatattgcctcccgcctgggtaagacagaaattgtccagctgcttctacaacatatggctcatccagatgcggccactacaaatgggtacacaccactgcacatctctgcccgggagggccaggtggatgtggcatcagtcctattggaagcaggagcagcccactccttagctaccaagaagggttttactcccctgcatgtagcagccaagtatggaagcctggatgtggcaaaacttctcttgcaacgccgtgctgccgcagattctgcagggaagaacggccttaccccgctccatgttgctgctcattatgacaaccagaaggtggcgctgctgttactggagaagggtgcttcccctcatgccactgccaagaatggctatactccgttacatattgctgccaagaagaatcaaatgcagatagcttccacactcctgaactatggagcagagacaaacattgtgacaaagcaaggagtaactccactccatctggcctcgcaggaggggcacacagatatggttaccttgcttctggataagggagccaatatccacatgtcaactaagagtggactcacatccttacaccttgcagcccaggaagataaagtgaatgttgctgatattctcaccaagcatggagctgatcaggatgctcatacaaagcttggttacacacctttaattgtggcctgtcactatggaaatgtgaaaatggtcaactttcttctgaagcagggagcaaatgttaacgcaaaaaccaagaacggctacacgcctttgcaccaggccgctcagcagggtcacacgcacatcatcaacgtcctgctccagcatggggccaagcccaacgccaccactgcgaatggcaacactgccttggcgattgctaagcgtctgggctacatctccgtggtcgacaccctgaaggttgtgactgaggaggtcaccaccaccaccacaactattacagaaaaacacaaactaaatgtacctgagacgatgactgaggttcttgatgtttctgatgaagagggtgatgacacaatgactggtgatgggggagaataccttaggcctgaggacctaaaagaactgggtgatgactcactacccagcagtcagttcctggatggtatgaattacctgcgatacagcttggagggaggacgatctgacagccttcgatccttcagttccgacaggtctcacactctgagccatgcctcctacctgagggacagtgccgtgatggatgactcagttgtgattcccagtcaccaggtgtcaactctagccaaggaggcagaaaggaattcttatcgcctaagctggggcactgagaacttagacaacgtggctctttcttctagtcctattcattcaggtttcctggttagttttatggtggatgcccgaggtggtgctatgcgaggatgcagacacaatgggctccgaatcattattccacctcggaaatgtactgctccaacgcgagtcacctgccgactggtcaagcgccacagactggcaacaatgcctccaatggtggaaggagaaggcctggccagtcgcctgatcgaagttggaccttctggtgctcagttccttggtaaacttcacctgccaacggctcctcccccacttaatgagggagaaagtttggtcagccgcattcttcagctggggcctcctggaaccaaattccttgggcctgtgatcgtggagatccctcactttgcggcccttcgaggaaaggaaagggaactggtggtcctgcgcagtgagaatggggacagctggaaagagcatttctgtgactacactgaagatgaattgaatgaaattcttaacggcatggatgaagtactggatagcccagaagacctagaaaagaaacgaatctgccgcatcatcacccgagacttcccacagtactttgcagtggtgtctcgtatcaaacaggacagcaatctgattggcccagaaggaggtgtactgagcagcacagtggtgccccaggtgcaggccgtcttcccagagggggcactcaccaagcggatccgtgtaggcctgcaggctcaacctatgcacagtgagctggttaagaagatcctaggcaacaaagctaccttcagccctatagtcactttggaacctagaagaagaaaattccacaaaccaattaccatgaccattcctgtccccaaagcttcaagtgatgtcatgttgaatggttttgggggagatgcaccaaccttaagattactatgcagcataacaggtggaaccacccctgcccagtgggaagatattacaggaactacgccattaacatttgtcaatgaatgtgtttcctttacaacaaacgtgtctgccaggttctggctgatagattgtcgacagatccaggaatccgttacttttgcatcacaagtatacagagaaattatctgcgtaccttatatggccaaatttgtagtgtttgccaaatcacatgaccccattgaagccaggttgaggtgtttctgcatgactgatgataaagtggataagacccttgaacaacaagaaaattttgctgaggtggccagaagcagggatgtggaggtgttagaaggaaaacccatctacgttgattgtttcggcaacttggtaccattaactaaaagtggccagcatcatatattcagtttttttgccttcaaagaaaatagacttcctctatttgtcaaggtacgcgatacgactcaggaaccttgcggacgactatcatttatgaaggagccaaaatccacgagaggcctggtgcatcaagctatttgcaacttaaacatcactttgccgatttatacaaaggaatcagagtcagatcaagaacaggaggaagagatcgatatgacatcagaaaaaaatgatgagacagaatctacagaaacatctgtcctgaaaagtcacctggttaatgaagttcctgtcctagcaagtccggacttgctctctgaagtttctgagatgaaacaagatttgatcaaaatgaccgccatcttgaccacagatgtgtctgataaggcaggttctattaaagtgaaggagctggtgaaggctgctgaggaagagccaggagagccttttgaaatcgttgaaagagttaaagaggacttagagaaagtgaatgaaatcctgagaagtggaacctgcacaagagatgaaagcagtgtgcagagctctcggtctgagagaggattagttgaagaggaatgggttattgtcagtgatgaggaaatagaagaggctaggcaaaaagcacctttagaaatcactgaatatccatgtgtagaagttagaatagataaagagatcaaaggaaaagtagagaaagactcaactgggctagtgaactaccttactgatgatctgaatacctgtgtgcctcttcccaaagagcagctgcagacagttcaagataaggcagggaagaaatgtgaggctctggctgttggcaggagctctgaaaaggaagggaaagacatacccccagatgagacacagagtacacagaaacagcacaaaccaagcttgggaataaagaagccagtaagaaggaaattaaaagaaaagcagaaacaaaaagaggaaggtttacaagctagtgcagagaaagctgaacttaaaaaaggtagttcagaagagtcattaggtgaagacccaggtttagcccctgaaccccttcccactgtcaaggccacatctcctttgatagaagaaactcccattggttccataaaggacaaagtaaaggcccttcagaagcgagtggaagatgaacagaaaggtcgaagcaagttgcccatcagagtcaaaggcaaggaggacgtgccaaaaaagaccacccacaggccacatccagctgcgtcaccctctctgaagtcagagagacatgcgccagggtctccctcccctaaaacagaaagacactctactctttcctcttccgcaaaaactgaaaggcaccctccagtatcaccatcaagtaaaactgagaaacactcacctgtgtcaccctctgcaaaaacggaaagacattcacctgcgtcatcatcgagtaaaactgagaaacactcacctgtatcaccctcgacaaaaactgaaaggcactctcctgtgtcatctacaaaaacagaaagacacccacctgtttcgccttcaggcaaaacagacaaacgtccacctgtatcgccctccgggaggacagaaaaacacccgccagtatcgcctgggagaacagaaaaacgcttgcctgtttcaccctccggaagaacggacaagcaccaacctgtatcaacagctgggaaaactgagaagcacctgcctgtgtcaccttctggcaaaacagaaaagcaaccacctgtatcccccacttcaaaaacagagaggattgaggaaaccatgtctgttcgggagctgatgaaggctttccagtcaggtcaggacccttctaaacataaaactggactctttgagcacaaatcagcaaaacaaaagcagccacaagagaaaggtaaagttcgggtagaaaaagaaaaggggccgatactaacccagagagaagctcagaaaacagagaatcagacaatcaaacgaggccagagactcccggtaacgggcacagcagaatccaaaagaggagttcgtgtttcctccataggagttaagaaagaagatgcagctggaggaaaggagaaagttctcagccacaaaatacctgaacctgttcagtcagtgcctgaagaagaaagccacagagagagcgaagtgcccaaagaaaagatggctgatgagcagggagacatggatctacagatcagcccagataggaaaacctccactgacttctctgaggtcattaagcaagagttggaagacaatgacaaataccaacaattccgcctgagtgaggagacagaaaaggcacagcttcacttagaccaagtactcactagtcctttcaacacaacatttccactcgactacatgaaagatgagttccttccagctctgtctttacaaagcggtgctttagatggcagttctgaaagcctaaagaatgagggggtagccggctctccgtgtggcagcctgatggaggggacccctcagattagttcagaagaaagctataagcatgaaggcctagcagagacccctgagacgagcccagaaagcctttctttctcaccaaagaaaagtgaggagcaaactggggaaacaaaggaaagcaccaagacagaaaccaccacagaaattcgttcagaaaaagagcatcccacgaccaaagacattactggtggctctgaagagcgaggtgccacagtcactgaggactcagagacctctactgagagttttcagaaagaggccactctaggctctcccaaagacacaagccctaaaagacaagatgattgcacaggcagctgtagtgtagcattagctaaagagacacctacaggactgactgaggaggcagcctgtgatgaaggtcaacgtacctttggtagttcagcccacaagacacaaactgatagtgaggctcaggaatccacagccacctcagacgagacaaaggccttgccgctgcctgaggcttctgtaaagacagatacaggaactgaatcaaaacctcagggagtcattagaagtccccaagggttagaacttgcactccctagccgagatagcgaagtcctcagcgctgtggctgatgactcattagcagtgagccacaaagactctctggaagccagccctgtgctagaagataactcttcacacaaaacccctgattctctggagccaagtcctctgaaagaatccccttgccgtgactctctggaaagcagccctgttgaaccaaagatgaaggctggaatttttccaagtcactttcctcttcctgcagctgttgccaaaacagaactcttgacggaagtggcctctgtgcggtcccggctactccgagaccctgatggcagtgctgaggatgacagtcttgagcagacatcgctcatggagagctcagggaagagccccctttctcctgacacccccagctctgaagaagtcagctatgaggttacacccaaaaccacagatgtaagtacaccaaaaccagctgtgattcatgaatgtgcagaggaggatgattcagaaaacggggagaaaaagaggttcacacctgaagaggagatgtttaaaatggtaaccaaaatcaaaatgtttgatgaacttgaacaagaagcaaagcagaaaagggactacaaaaaagaacccaaacaagaagaatcttcttcatcttctgacccagatgctgactgttcagtagatgtggatgaaccaaaacatacaggcagtggggaggatgaaagtggtgtccctgtgttagtaacttcggagagcaggaaggtgtcttcctcctcagaaagtgaacctgagttggcacagcttaaaaaaggtgctgactcaggccttttaccagaaccagtgattcgagtacaacctccttctccacttccatcaagcatggactccaattccagtccagaagaagtacaattccagcctgtcgtttccaaacaatatactttcaagatgaatgaagatactcaggaagagccaggcaaatcagaagaagaaaaagattctgaatcccatttagctgaagaccgtcatgctgtttccactgaggctgaagacaggtcttatgataagctaaacagagacactgatcagccaaaaatctgtgatggccatggatgtgaggccatgagtcctagcagctcagctcgtcctgtctcttcaggtctacagagtccgactggtgatgatgttgatgaacagccagtcatctataaagaatcattagctctccaaggcactcatgaaaaagacacagagggagaagagcttgatgtttctagagcagaatctccacaagcagattgccccagtgaaagcttttcatcttcatcctctttgcctcattgtttggtatctgaaggaaaagaattagatgaagacatatctgccacatcttctattcaaaaaacagaggtcacaaaaactgatgaaacatttgagaacttaccaaaggactgcccctctcaagactcatccattactactcaaacagatagattttccatggatgttcccgtgtctgacctagctgagaatgatgaaatctatgatccacaaatcactagcccttatgaaaatgtcccttcccaatcttttttctctagtgaagaaagcaaaacccaaacagatgcaaatcacaccacaagttttcactcttctgaagtgtattctgttaccatcacatcccctgttgaagacgttgtagtggcaagctcctctagtggaactgttttaagcaaagaatctaattttgagggccaggacataaaaatggaatcccaactggaaagtaccttgtgggaaatgcaatcagacagtgtctcttcatctttcgagcctactatgtccgctacaacaacagttgttggtgaacaaataagcaaagtcatcatcacaaaaactgatgtggattctgattcttggagtgaaattcgggaagacgatgaagcctttgaggctcgtgtgaaagaggaagaacaaaagatatttggtttgatggtagacagacaatcacagggtaccacccctgacaccactcctgctaggaccccaactgaagaggggaccccaacaagtgagcaaaacccatttctgtttcaggaaggaaaattgtttgaaatgacccgaagtggtgccattgatatgaccaaaaggtcctatgcagatgaaagttttcactttttccaaattggtcaagaatccagggaagagactctctctgaagatgtgaaagaaggggctactggggctgatcccctaccgctggagacatcagctgaatcactagcactttcagaatcaaaagaaacagtggatgatgaggcagacttacttccagatagcgtgagtgaggaagtagaggaaatacctgcttcggatgctcaacttaactcccaaatggggatttcagcctccactgaaacacctacaaaagaggctgttagtgtagggaccaaggacctccccaccgtgcaaacgggtgatatacctcctctctctggtgtaaagcagatatcctgccccgactcttctgaaccagctgtacaagtccagttagatttttccacactcaccaggtctgtttattcagataggggtgatgattctcccgattcttccccagaagaacagaaatcagtaatcgagattcctactgcacccatggagaatgtgccttttactgaaagcaaatccaaaattcctgtaaggactatgcccacttccaccccagcacctccatctgcagagtatgagagttcagtttctgaagattttctatccagtgtagatgaggaaaataaggcggatgaagcaaaaccaaagtccaaactccctgtcaaagtacccctccaaagagttgaacagcagctctcagatctagacacctctgtccagaagacagtggctcctcagggacaggacatggcaagcatcgcaccagataatagaagcaaatctgaatctgatgctagttctttggattcaaagaccaaatgcccagtaaaaacccgaagttacactgagacagaaacagagagcagagagagggccgaggaacttgagttagaatcagaagaaggggccacaagaccaaagatacttacatcccgattgccagttaagagcagaagcactacatcttcctgcagggggggcacgagccccacaaaagaaagtaaggagcatttctttgacctttacagaaattccatagaattctttgaggagattagtgatgaggcttccaaattagtggataggctgacacagtcagagagggagcaggaaatagtttcagacgatgaaagtagtagtgccctggaagtatcagtaattgaaaatctgccacctgttgagaccgagcactcagttcctgaggacatctttgacacaaggcccatttgggatgagtctattgagactctgattgaacgcatccctgatgaaaatggccatgaccatgctgaagacccacaggatgagcaggaacggatcgaggaaaggctggcttatattgctgatcaccttggcttcagctggacagaattagcaagagaactggatttcactgaggagcaaattcatcaaattcgaattgaaaatcccaactctcttcaagaccagagtcatgcactgttgaagtactggctagagagggatgggaaacatgctacagataccaacctcgttgaatgtctcaccaagatcaaccgaatggatattgttcatctcatggagaccaacacagaacctctccaggagcgcatcagtcatagttatgcagaaattgaacagaccattacactggatcatagtgaagggttctcggtacttcaagaggagttatgcactgcacagcacaagcagaaagaggagcaagctgtttctaaagaaagtgagacctgcgatcaccctcctatcgtctcagaggaagacatttctgttggttattccacttttcaggatggcgtccccaaaactgagggggacagctcatcaacagcactctttccccaaactcacaaggagcaagttcaacaggatttctcagggaaaatgcaagacctgcctgaagagtcatctctggaatatcagcaggaatattttgtgacaactccaggaacagaaacatcagagactcagaaggctatgatagtacccagctctcccagcaagacacctgaggaagttagcacccctgcagaggaggagaagctgtacctccagaccccaacatccagcgagcggggaggctctcccatcatacaagaacccgaagagccctcagagcacagagaggagagctctccgcggaaaaccagcctcgtaatagtggagtctgccgataaccagcctgagacctgtgaaagactcgatgaagatgcagcttttgaaaagggagacgatatgcctgaaatacccccagaaacagtcacagaagaagaatacattgatgagcatggacacaccgtggtaaagaaggttactaggaaaatcattaggcggtatgtatcctctgaaggcacagagaaagaagagattatggtgcagggaatgccacag

SEQ ID NO: 88802 - DNA, 381 bp, Homo sapiens
aaagccaggtctgattataatagacacaattctcaatgctaagttctaacaaattaaatgtgtccctgaatgtgacagtaaaacttctaagttttattccattttcaaagattagctcagttccacttgtcagctgggacatgctgttagatttgttgttttattgtattgtttaaatgttcagtgggcacaagtttttcataggtaaagaattaatgtgtcatgttatcgtgacacattaattttagatacatcagtctaaaagcatgaaagtttattttgatccagttcaccgcataaaataatcactacccattttcacttcaaagggcatatcttgatatgtatagaaggatagtgttgaaaataattgtgtttaag

SEQ ID NO: 88803 - DNA, 389 bp, Homo sapiens
  misc_feature (1)...(389): n = a,t,c or g
ttctggctctaaaaataccgctgaactcactgaagggctgctgcctttgggagggggaagggctgctgactgagaaaaccccccagaggacgatggttgccacagccagggagaggaagagcagtgacactgttaaaagcaggggatctgggctctcacagtcctcaagattcttttccagtgccaccatttactacctgaatgacacttgggcaagttactttacctcttgcagttcaagtctcagatataaaatgggggaaattatgcttgcctcataaggctattgggaggattaaatgacaccattgtaaatggtctggcatcaggctgtcatggacagctgagccaggtgggcactgcacatacatactcacgcaagcaagcan

SEQ ID NO: 88804 - DNA, 1041 bp, Homo sapiens
cagagaaaggacctaactcagacacaagtccacatatatagcccaaggacttgtgtcagagaaaggacctaactcagaagatctcaacaggacagttgaccttttggcaggtttgggagctgagcgaccagaaacaggtacttttttgtatatacctgtgtgagtggtgaggtggacagtaatgaaaatgtcctttgcaagttggcacatttaaccgaagttctaagagtaatcatattactcaccatttggaaaattatacccattgttagctgactggattaaagcacatgatagtttaccttttaacagcataatgcaatattagaaatagttgaagaaattggaaggagtttcagaaatgtagctgagtttctcctgggcttaagggactttatagctcatgttcaaatgcaccactgtctctctgaattacagatgatctgtttttctaacaatacgacctgacgattttttttttttttaagagacagggtctcgctctgttgcccagactggagtgtagtggcgcggtcttggctcactgcagcctcggcctcctgggctcaagggatcctcttgcctcaccctcccgggtagctgggactgcaggtgtgtgctaccatacttggctgattttttaattttttgtagagatggagtctcgctgtattgcccaggctggtctcgggctcctggcctggggtgatcctcctgccctggcctcccagcaaattttttaaaataaattggctgggcacggtggctcccacctgtaatcccagcactttgggaggccgaggtgggcggatcgcctggggtcaggaattcgagaccagcctgaccaacatggagaaaccccatctctactaaaaatacaaaattagccgggtgtggtggtgcatgcctgtggtcccagctattcgggaggctgaggcgggagaatcgcttgggcctgggaggtggaggttgtggtgagcagggattgctccattgcactccagcctgggcaacaagagcgaaactctgtcaaaaaaaaaa

SEQ ID NO: 88805 - DNA, 456 bp, Homo sapiens
  misc_feature (1)...(456): n = a,t,c or g
agatgttntgannaagggggtcagcccantgcgaannccnnaannnngggncgagcacgcgggcggggcttaataaatgaatagcatttcttatttcgtgtttatttttagaaagaaatacttgttgtaaaaaggggagttgtttttgagctataagcattgatatatttactttttatatatttcaggaccacattttaaccccagcgctattcataacttttatgacaatattggatttgtaggtcctgtgccaccaaaacccaaaggttagtgtatccattaaatgtgaaaactgttacttttgaaaagcaaaattttagaaaatttttcctgttcagcaaccttcctctctagaattgcttcaaactttggcattcttaaatgaattcattaagaagatgtttgcttattttcatttacatgcttggggttgggaaggatgcaaagatgtat

SEQ ID NO: 88806 - DNA, 481 bp, Homo sapiens
  misc_feature (1)...(481): n = a,t,c or g
gatggcccccgttgagccctaatcgagaccgtaggcagtgacgaggaattccagattcctaggtcttagcatgaggtggaaggagccatctgactcctccactggagcacaggatagggggactgtgggaccagccatcaaaggaaaaggcacatcttcttttcccaggcaggccgagaagatgaggagtagcccaccaagagccaggaaaataccagcagcccagcccaagtagagggcacctccaaactcccaccgaggtatgatgtcagggatgctgtcatcccagaagtcttggattgtggcatgggccacccaggagactggaaggagggtagtggctgaagcggatgcctccaaagtccttcccaggagaccaagccgcctcttgaatacccatctgatcctgtgaaactggaagcattcagacccaaagctgcagagcaaaagccccaataggcccagcccatgggaggctacn

SEQ ID NO: 88807 - DNA, 1104 bp, Homo sapiens
  misc_feature (1)...(1104): n = a,t,c or g
tttttttttcgtgaggaagggctcatgccccttatttatgggaaccatttcattctaacagaataaaccgagaaaggaaaccagagctgggactgctgccgtctgtccggtagagtgaagcaagggggctggaatagggcctgttcagcccctgtccctgctgaaacggctgtgggaggctgggccctgggacgccctctcatagcgtccagcgatccagacaaataggagagccgtgacggcctgaatgccagccagcaggaagaagtagaggtccatccggcaattgttgatgttcccaaagtccttggggcagtgcagccagcccccgggcaaggacagcagtgccactaggctggagcccaacagtgagcccacccccgacaggcagaagaagatgcccatgatggcgccctgcatggagcgcggggcctctgagtaggcaaactccaggcctgggatgctggcaaagatctcactgatcccaatgagcaggtactgagggatctgccaccagatggacagtggtgccgcgttgtacaggacctccccaatctgctgggacacggtctcgttgtggtggatgtagtgtaagcgctccatctccaggactcctgccacaatgacggaggtaaaaccaaagaacatccccagcgccatcttctgcagagcagagggaagcagcttgcaccgcagcagtaaagggtcgatcaagcggtccttcagagggaccagaatcagcaccaccacaacattggccaggaggagccaggcttccgggatctgggcaggaggaagtcaggagaggcaggctagcagagtgcaaggagcctggctgcagtcaggagacctggactctagactggccctgggtgaccctggggtccagctcctttccctctctggagttcatgctcctcagctgtgtaaccagggagtgggattatgtagagatggcaaataggttcctcttgtattctaacttttatcaattggtagtggctgattatggaacatttatgggctcagcataaaaaaagtcatgattgactagtgatgtctccgaattcccccactggatacgaactcgagnnnngccgctcc

SEQ ID NO: 88808 - DNA, 484 bp, Homo sapiens
  misc_feature (1)...(484): n = a,t,c or g
gagagcccccttcgagaccatattgagangcgtggaattcctgctcctgaacgtgtcaggcttcaagaaccccagctcagccctgggctgcatgttcctcaccagatccctgttggcccacccctacctccacgtcaacatcttccagcacatcggactgcccatgttctcccgggacaacaagccccgtcggattcacatgatgagcctgggggtgcttaacctggcccggctgcccgtgctggactgggcgttcggccactcgatcatcagctgccatgtggaacaccatctattccccaggctctctgataacatgtgcctgaaggtgaagcccgtggtgtcccagttcctacgtgagaagcagctaccgtacaacgaggactcatacctggctcgcttccagctgtttctccgtcgctatgaggaattcatggccttcctcgatcctcagccaaaggaacctgtgcaagacactggctcn

SEQ ID NO: 88809 - DNA, 766 bp, Homo sapiens
  misc_feature (1)...(766): n = a,t,c or g
cgaattccattgggttgctgcgggaagccggggcctccctgtccacccaggagctggaggaagtatggacggttctgtgcaggctggcatacagggccgacctcgaaggcctgcaggtgtggtggcaggcaggggctgacctggggcagccgggctatgacgggcacagcgccctgcacgtcgtgagtgcccccaccccctgcaccctctccaaaggctgccacctccaggaaggacacctggacaattcaccagctcactgctctgcccctccccgctctgcccctcccccaaatgcctggccctccccatgcaggacccgcacagactgggtccccttcccggggctctgagtggtgggggtgacgagagtggaggagctgctggggccctgtgtgtgtgggctggggacaggggagggcatcctggggatggggatccttgggccaggctgctagtcagtggccccaaggcagcccctccccactgcttccccataggcagaggcagccgggaacctggcagtggtggcctttctacagagcctggagggtgcggttggtgcccaggccccatgcccagaagtgctgcctggtgtctaacctgaaggcgtcctgctgcagtataagccattccttcctcccatgacctgctggaggggtctcaggcatgaccccactgctggggctgcttcccagcctgctctcatgtaaancctgaaggcctttgttgggcaggacggcaataaagtctctgacatcccctc

SEQ ID NO: 88810 - DNA, 495 bp, Homo sapiens
  misc_feature (1)...(495): n = a,t,c or g
nggatggtcngnnnnccatgggnccatgccangtccgtgacnnnncncnnnnngnananannncgncagcccttgggaatggtcctctgnnnnnnaaggtggctcctcacttnacacgtgttcaggaaaaagtccagcaggaatgggtgcagcatcatngggagtccctcctgtgtgcctgtcgctacaaggtggcatgtgctgatttcaagaaacggacttagtggatgttgctccagacggacttaccctgcctgcccctcaggtaactcaccttggtcccctgtccacagccattggtcccatggtcataaaatcactgccactgctgccaccactgccaccaaaggaggagctgacccccacagagagaccccacgccctgctaggctgcaccagtggctgtgagaggggtgggggacgctcccctgaggatgggggagtcaagccccgtgagacccactttaaccaatgagaggcaggagctggatagac

SEQ ID NO: 88811 - DNA, 2716 bp, Homo sapiens
  misc_feature (1)...(2716): n = a,t,c or g
tgttctgannngggcccgttagcagcngcangnacnnngggnnaancnggaagcgcacgattgtcattttgggacccctctgcacgttgcctgtgtccgggagcatctggactgtgtcaaagtgctgctgaatgcagcttgatgaatgtctgctcttatcgtgagaaagttgaggagtgcagagcttactctcttctctgaattgcctactgttttgggggccaacgtgaatgcggcaaagcttcatgagactgcccttcaccacgcggccaaggtcaagaatgttgacctcatcgagatgcttatcgagtttggcggcaacatctacgcccgggacaaccgcgggaagaagccgtctgactacacgtggagcagcagcgctcccgccaagtgcttcgagtactacgaaaagacacctctgactctgtcacagctctgcagggtgaacttgaggaaggccactggcgtccgagggctggagaagattgccaagttaaacatcccgccccggctcattgattacctctcctacaactgaattgcaggtggggtccggaccgtgactgcccccgttgtgcccagcattgcccgggtgagggctctgcctgttcctctgaagcagcgtgattgctgtagatagaacaacgctccttcgagtcccttcctgcgatcctgtttaggcttctctcctggatcctggataatgtttccagggtgttgggaaggcctgcgtctcaggtcacagttgtgggtgtggccctgcgctgttctacagaacctaccctctcaatgggcatgggcccaaccatccagttttcctcttttacggaccatcctcaaaggcactctcaggacagacggcgtggggagcacagaggaggctggcagagctggggactgagggcattgttgctgattctcactcaccggggcagcctgccgcagatgcacaggccccaggtgcaggccaccacctccgggtcggcaccaggactgccctcggtgctcatagggaatggctgggcccacggaaggtcggcctgggatgtggcctgggactgctgctctgctggctgctgtgtggatgcttttcctggagcactttccaaggcatcccccagccccaagcctgcgcgcatctgtcactcagggactttctatgggtctttgtgggggaaggccctggctttgtattccccacaagtagcactgagtttcttaggaaatttgtcttcagtattaggtctccaactcttgtaaaaagtttatatgtaggataaaaaccttttagaggacacgtaggcggtaccactaaggttttggtaatgagccattcaaaccgacagcagtgtgaaggtgtgtcaaggtgtatattctcgtggctcggcattctcagtgcaaaggcctgtttggagactctgtgggaattgtttttcatctgtttctatggttgtcaaatgaattcttcacccaccctacagtttgctaactccttgaagctatcaaattagtaagagaggctgcccgcacccagggggcaccatcgcccacttattatttagttttgcggatactcatggaccatctatcacatccagcattgtcccagtgctttgagttggacgggaatgggactctgcagccaaggcaggataagataatcttgcaatcccgtcctgcagtgatagaaacaggtcgttctgcattataagccataggtggagcattcggtagcgtattcagactgcatgggccggcctaggagtctttgccttcataaattttaagaaccccgcccacaacagggagttaaactggaggactttgcatgattagttcagggatgagtggtttctggggcatctgaggtcaggagttcgaaaccagcctggccaacttgatgaaaccccatctctacccgttctggagaacaggtcacgcctgtcctggagacagtgtgccgggaaaagggaacgtggtactcactggatgcacccaggccggcccgagcctcccaccgcagacagtgtggaacagagtgagcctgagctgcccaaggcgatgccctttgtgctgtatgactggaggcctctccgcgtgggtacttgggggtggggccacaaatctggcgaaaaacttcatgctggccgccgtgaggttttactccagcgttcccgccattgtcatggcgggtcttcgtcctaaactgagaagaaaagcattcctgtttaatcaccgccttagttaccagttctggatcagtcagtgtttctgcatggaataacaaccattaaaaaaagcactgggttctgccctttcatctttgtaagagattcttgcctctagcaatgacaacctgtgatgtctcacagtagagcacttagcgcagaatcaggtccccacggctgttgctcaataaaagtggcggaataaagtgcatccctgtgttcacacgactctttccttatggggcagaaacaccaagatgggcgcatcctgtgtggatggagaggggtggctctcgtcttgctgtgtcccaggtcgattggcagcgctgtgcttgccagggagccacactttcccatctcttccccaggtctcctgatgccaacttcagcaccccccttatgtggactattcttgggggagacagacgctgtccacgggaccaggtgactgggattttgggtcctcccctgcccttatgcagggctgt

SEQ ID NO: 88812 - DNA, 843 bp, Homo sapiens
tttttttttcaacggggtcttcctgtagggaccccggagttaaagtatttattttcacgctgcaactgctgatcactttacagagacatatcatgctgtagctctgcatggagctgaagacaaaagcaacatttttattaatgttataattattataattatctttaacaaagctattaaataacctgtacaaagcccaaaccggtcctagcgaaaacccgagcactgtttcaaatctcccaagttcctttctattcagttcagcagcatttcctatatacaaggccagcccaggggtggtcccccgaaactgtaggtctccctgacggtgggaacggtttagagtttggaaccgccctggcgtacggcagagctcccaattacaatccaaatgccccagccccaaccctacctccccgctcctgggaactgggtccctatgtccgaaggcagcggaagttggaagcctggctccattttgggaggcaggcaacggagagggtccgtctgctgagtctcccctccgccagctgcccacaggtccccggatctctcgcagaggtgctgggaagggggtccacctccgggagggctcacaggtcccgcgcgtcctcccgcttaaccccggcctcagcgactttgagcttcttattctggtgagtcttgacgtgcttcgcgaggtggtcgctgcgcatgaagcgcttgccgcactcgggacaggcaaagcgcttctcgcccgtgtgagtccgcaggtgccgctgcagctcgtccgagcgcgtgaagctcttcccgcagaagagccagttgcacacgaagggtcgctcgcccgtgtgccctcgtgcc

SEQ ID NO: 88813 - DNA, 818 bp, Homo sapiens
  misc_feature (1)...(818): n = a,t,c or g
tcccaaatgtcctttaattgaaaacagaaatgaatagagccaagaaataatgaggtctgggtggatgtcctttgggccgccaggatggaattaataantggcgccccttttatcaggtccctcatgcctcacgtagaagcaacagttcacctctctttttttctcaggcttctactcaaaagtcatcaagtttgtaggaacctgttgtttgttactttggcaggctgcactcaaatgcttaaaccataacattgcattcattctattgccagcttgaaacttgtacgaatttcctttctcagagtcagtcagcaggaagagatcaggatgttcagggtcatcagccatcatcaccatccatcctatcacagatacgttcttattggatgttgatttgaaatgttttctttcggtagcctttagagatttggcagcatagtaaaaaagctgtgtcccacacaaagctgcccaatattttgtccaagatgctactgtaggctttttgccttcttttaacaaagtttttctcctgagaacaccttgaatagtaacagctcctggatataaatgtactgccaaatcttctgattctgcagaactataataacgaagaaaagaacacataagagcttttgtctacaatagtcatcaagtaggtacttaaataaaatgtaattattcttaattttaaaagtttgttactttattcagagctgagaagacactgacaattctaaaggtttattaatcttgaaatttataagctgtacaaaaagttgattagaaagttattaaagtcagcagatggttaaaaaaca

SEQ ID NO: 88814 - DNA, 442 bp, Homo sapiens
cctgacatttccacaagctgtgtatgagtgccgtgtagcctcttcctctgcagtacttggggatgtcagactctttttctttgagatggagttttgctcctgttgcccaggctggagtgcagtggtgcaatcatggctcactgctgcctggaactcctgtcccagcctcccaaccagctggaaccataggcatatgccaccatgccagcagacctttaaaactgaatgccttgcgggctccaggaggccccatgtgggccacctgcgccctccccagcctcaccgagtacctctgctttacaggcagcacagctcctgggtctgctctgaaaggttatctggatgaacagactgtgtcactgccctgctcaaaaaccaccttcaagaccctccaccatctctctatgtttgctcctttccacctgcccttcactacactgga

SEQ ID NO: 88815 - DNA, 522 bp, Homo sapiens
ttggcctagctgatgtctataaaacacccaacaacagcaaatgttgtttggtgttgaacattcactatggtagaccatttgctgagttacaaggcaggtctgaatatattaagtcttaaatttatgaatgtaaaagaattgaagtgacacacgtatgtgttctgatttgcaactgagttaaattagaaatcagtaaccatgaaaaatctctaaataaattaaaatgaaaaagcccactagtaaataactcattgatcaaagaagaaatgaaagactgtcttaaactgaatgatactgaaaactcaacatgtcagaacttgtgggatgccagctgaagcagtacttagaaggaaatttatagttttaaaggctaaattagctgggcacagtggcatatgcctgtcattccagccacttgggagactgagatgggatgatccctggtggctaggagttcagggtggcagtgctctatgattgtgcctgtgcatagccactgtactctagccagggcaacatagt

SEQ ID NO: 88816 - DNA, 464 bp, Homo sapiens
  misc_feature (1)...(464): n = a,t,c or g
gagcanannnnttcgagtttcgtagacattagtcagagcggtggaattccgccagcctcggccctgcccctgccctgtccccccaggagctctaactaacctgctctattgtgcctctaatgcccacccgtgcgctgcagctcgaccccagcaggaaggcccctccccccgggcccagcaggcccgcggtcaggctggtggacgccgtatgggacgctaagcctcagcccgttgattcctgggtctagcttgcatgcctggtacgttctctcatctggttgttcgtccacctgttcctgccctctgggccagggcttcttgttagtctctgctgcctgcacgctctgctcttcccgcacgttccccgcaggactttggcctccagtccagcagcccagtggcccattcccggaaagaccaggcagaggtcagagagggagggtgctccctgggcccacagcccn

SEQ ID NO: 88817 - DNA, 3806 bp, Homo sapiens
tgtgccccagcctggatattcgctcagaggtggcagagcttcgtcagctggagaactgcagcgtggtggagggccacctgcagatcctgctcatgttcacagccaccggggaggacttccgcggcctcagcttccctcgcctcacccaggtcaccgactacctgctgctcttccgtgtctacggactggagagcctgcgcgacctcttccccaacctagcagtcatccgcgggacgcgcctcttcctgggctatgcactggtcatctttgagatgccacatctgcgtgacgtggcactgcctgcacttggggccgtgctgcgtggggctgtgcgtgtggagaagaaccaggagctctgccacctctccaccattgactggggactgctgcagccagcacctggcgccaaccacatcgtgggcaacaagctgggcgaggagtgtgctgacgtgtgccctggtgtgctgggtgctgctggtgagccctgtgccaagaccaccttcagcgggcacactgactacagatgctggacctccagccactgccagagagtgtgcccctgcccccatgggatggcttgcacagcgaggggcgagtgctgccacaccgaatgcctggggggctgcagccagccagaagaccctcgtgcctgtgtagcttgccgccacctctacttccagggtgcctgcctgtgggcctgcccgccaggcacctaccagtatgagtcctggcgctgtgtcacagctgagcgctgtgccagcctgcactctgtgcccggccgtgcctccaccttcggcatacaccagggcagttgcctggcccagtgcccttctggcttcacccgtaatagcagcagcatattctgccacaagtgcgaggggctgtgccctaaagagtgcaaggtaggcaccaagaccatcgactccatccaggcggcacaggatcttgtgggctgcacgcatgtggagggaagcctcatcctcaaccttcgccagggctacaacctggagccacagctgcagcacagcctggggctggtagaaaccattactggcttcctcaaaatcaagcactcctttgccctcgtgtccctgggctttttcaagaacctcaaactaatccggggagacgccatggtggatgggaactacactctctacgtgctggacaaccagaacctacaacagctagggtcctgggtggccgcggggctcaccattcccgtgggcaagatctacttcgccttcaacccgcgcctctgcttggaacacatctaccgactggaggaggtgacaggcacgcgaggtcggcagaacaaggctgagatcaacccccgcaccaacggagaccgcgccgcctgccagactcgcaccctgcgcttcgtgtccaacgtgacggaggcagaccgcatcctgctacgctgggagcgctatgagccactggaggcccgcgacctgctcagcttcatcgtgtactacaaggagtccccattccagaacgccacagagcacgtgggtccagatgcttgtggaacccagagctggaacctgctggatgtggagctgcccctaagccgcacccaggagccaggggtgaccctagcctccctcaagccttggacacagtacgcagtgtttgtgcgggccatcacgctaaccactgaggaggacagccctcatcaaggagcccagagtcccatcgtctacctccgaacgctgcctgcagctcccacggtgccccaagacgtcatctccacgtccaactcctcctcccacctcctggtgcgctggaagccaccgacccagcgcaatgggaacctcacctactacctggtgctgtggcagcggctggcagaggacggcgacctctacctcaatgactactgccaccgcggcttgcggctgcccaccagcaacaacgatccgcgcttcgacggcgaagacggggatcctgaggccgagatggagtccgactgctgcccttgccagcacccacctcctggtcaggttctgcccccgctggaggcgcaagaggcctcgttccagaagaagtttgaaaactttctacacaacgcgatcaccatccccatatccccttggaaggtgacgtccatcaacaagagcccccaaagggactcagggcggcaccgccgggcagctgggcccctccggctggggggcaacagctcggatttcgagatccaggaggacaaggtgccccgtgagcgagcggtgctgagcggcctgcgccacttcacggaataccggatcgacatccatgcctgcaaccacgcggcgcacaccgtgggctgcagcgccgccaccttcgtctttgcgcgcaccatgccccacagagaggctgatggtattccaggaaaggtggcctgggaggcctccagcaagaacagtgtccttctgcgctggctcgagccaccagaccccaacggactcatcctcaagtacgaaatcaagtaccgccgcttgggagaggaggccacagtgctgtgtgtgtcccgtcttcgatatgcgaagtttgggggagtccacctggccctgctgccccctggaaactactctgccagggttagggcaacctcactggctggcaatggctcttggacagacagtgttgccttctacatccttggcccagaggaggaggatgctggggggctgcatgtcctcctcactgccacccctgtggggctcacgctgctcatcgttcttgctgcccttggtttcttctacggcaagaagagaaacagaaccctgtatgcttctgtgaatccagagtacttcagcgcctctgatatgtatgtccctgatgaatgggaggtgcctcgggagcagatctcgataatccgggaactgggccagggctcttttgggatggtatatgaggggctggcacgaggacttgaggctggagaggagtccacacccgtggccctgaagacggtgaatgagctggccagcccacgggaatgcattgagttcctcaaggaagcttctgtcatgaaagccttcaagtgtcaccatgtggtgcgtctcctgggtgtggtatctcagggccagccaactctggtcatcatggagttaatgacccgtggggacctcaagagccatcttcgatctttgcggcctgaggcagagaacaaccctgggctcccacagccagcattgggggaaatgatccaaatggctggtgagattgcagacggcatggcctaccttgctgccaacaagtttgtgcaccgagatctagcagcccgcaactgcatggtgtcccaggacttcaccgtcaagatcggggacttcgggatgactcgggacgtgtatgagacagactattaccgcaagggtgggaaggggctgctgcccgtgcgctggatggcccccgagtccctcaaagatgggatcttcaccacccactcggatgtctggtcctttggcgtggtactctgggagattgtgaccctggcagaacaaccctaccagggcctgtccaatgagcaggtgctgaagttcgtcatggatggcggggtcctggaggagctggagggctgtccccttcagctgcaggagctgatgagccgctgctggcagccgaacccacgcctgcgcccatctttcacacacattctggacagcatacaggaggagctgcggccctccttccgcctcctctccttctactacagcccggaatgccggggggcccggggctccctgcctaccaccgatgcagagcctgactcctcacccactccaagagactgcagccctcaaaatgggggtccagggcac

SEQ ID NO: 88818 - DNA, 1438 bp, Homo sapiens
cggacgcgtgggcacgcaggccgcagcgagggcccgggccctggggatcccaggccatggatgctccccactccaaagcagccctggacagcattaacgagctgcccgagaacatcctgctggagctgttcacgcacgtgcccgcccgccagctgctgctgaactgccgcctggtctgcagcctctggcgggacctcatcgacctcatgaccctctggaaacgcaagtgcctgcgagagggcttcatcaccaaggactgggaccagcccgtggccgactggaaaatcttctacttcctacggagcctgcataggaacctcctgcgcaacccgtgtgctgaagaggatatgtttgcatggcaaattgatttcaatggtggggaccgctggaaggtggagagcctccctggagcccacgggacagattttcctgaccccaaagtcaagaagtattttgtcacatcctacgaaatgtgcctcaagtcccagctggtggaccttgtagccgagggctactgggaggagctactagacacattccggccggacatcgtggttaaggactgggctctcaacccctccaccaggtttgctgccagagccgactgtggctgcacctaccaactcaaagtgcagctggcctcggctgactacttcgtgttggcctccttcgagcccccacctgtgaccatccaacagtggaacaatgccacatggacagaggtctcctacaccttctcagactacccccggggtgtccgctacatcctcttccagcatgggggcagggacacccagtactgggcaggctggtatgggccccgagtcaccaacagcagcattgtcgtcagccccaagatgaccaggaaccaggcctcctccgaggctcagcctgggcagaagcatggacaggaggaggctgcccaatcgccctaccgagctgttgtccagattttctgacagctgtccatcctgtgtctgggtcagccaggaggttcctccaggcaggagctgagcatggggtgggcagtgaggtccctgtaccagcgactcctgccccggttcaaccctaccagcttgtggtaacttactgtcacataggtctgacgttttgttgtaataaatgttttcaggccgggcactgtggctcacgcctgtaatcccagcactttgggagaccgaggcaggttggatcacgaggtcaggagatagagaccattccctggccaacacggggtgaacccttgtctctactaaaaatacaaaaaattagccgggcgtggtggcgggcgcctgtagtcccgagctactcgggaggctgatgcagaagaatggcgtgaacccggaaggcatgagctttgcagtgagcccgagatcaccgccactgcactccaagcctggggtgacagagcgagactctggctcataaaataataaat

SEQ ID NO: 88819 - DNA, 2901 bp, Homo sapiens
gccctgaggattcagccccacaatattcacgcctcttcccaaacgcatctcagcacatcacgccgagctacaactacgcgcccaacccggacaaacactggatcatgcgctacacggggcccatgaagcccatccacatggaattcaccaacatgctccagcggaagcgcttgcagaccctcatgtcggtggacgactccatggagacgatttacaacatgctggttgagacgggcgagctggacaacacgtacatcgtatacaccgccgaccacggttaccacatcggccagtttggcctggtgaaagggaaatccatgccatatgagtttgacatcagggtcccgttctacgtgaggggccccaacgtggaagccggctgtctgaatccccacatcgtcctcaacattgacctggcccccaccatcctggacattgcaggcctggacatacctgcggatatggacgggaaatccatcctcaagctgctggacacggagcggccggtgaatcggtttcacttgaaaaagaagatgagggtctggcgggactccttcttggtggagagaggcaagctgctacacaagagagacaatgacaaggtggacgcccaggaggagaactttctgcccaagtaccagcgtgtgaaggacctgtgtcagcgtgctgagtaccagacggcgtgtgagcagctgggacagaagtggcagtgtgtggaggacgccacggggaagctgaagctgcataagtgcaagggccccatgcggctgggcggcagcagagccctctccaacctcgtgcccaagtactacgggcagggcagcgaggcctgcacctgtgacagcggggactacaagctcagcctggccggacgccggaaaaaactcttcaagaagaagtacaaggccagctatgtccgcagtcgctccatccgctcagtggccatcgaggtggacggcagggtgtaccacgtaggcctgggtgatgccgcccagccccgaaacctcaccaagcggcactggccaggggcccctgaggaccaagatgacaaggatggtggggacttcagtggcactggaggccttcccgactactcagccgccaaccccattaaagtgacacatcggtgctacatcctagagaacgacacagtccagtgtgacctggacctgtacaagtccctgcaggcctggaaagaccacaagctgcacatcgaccacgagattgaaaccctgcagaacaaaattaagaacctgagggaagtccgaggtcacctgaagaaaaagcggccagaagaatgtgactgtcacaaaatcagctaccacacccagcacaaaggccgcctcaagcacagaggctccagtctgcatcctttcaggaagggcctgcaagagaaggacaaggtgtggctgttgcgggagcagaagcgcaagaagaaactccgcaagctgctcaagcgcctgcagaacaacgacacgtgcagcatgccaggcctcacgtgcttcacccacgacaaccagcactggcagacggcgcctttctggacactggggcctttctgtgcctgcaccagcgccaacaataacacgtactggtgcatgaggaccatcaatgagactcacaatttcctcttctgtgaatttgcaactggcttcctagagtactttgatctcaacacagacccctaccagctgatgaatgcagtgaacacactggacagggatgtcctcaaccagctacacgtacagctcatggagctgaggagctgcaagggttacaagcagtgtaacccccggactcgaaacatggacctgggacttaaagatggaggaagctatgagcaatacaggcagtttcagcgtcgaaagtggccagaaatgaagagaccttcttccaaatcactgggacaactgtgggaaggctgggaaggttaagaaacaacagaggtggacctccaaaaacatagaggcatcacctgactgcacaggcaatgaaaaaccatgtgggtgatttccagcagacctgtgctattggccaggaggcctgagaaagcaagcacgcactctcagtcaacatgacagattctggaggataaccagcaggagcagagataacttcaggaagtccatttttgcccctgcttttgctttggattatacctcaccagctgcacaaaatgcattttttcgtatcaaaaagtcaccactaaccctcccccagaagctcacaaaggaaaacggagagagcgagcgagagagatttccttggaaatttctcccaagggcgaaagtcattggaatttttaaatcataggggaaaagcagtcctgttctaaatcctcttattcttttggtttgtcacaaagaaggaactaagaagcaggacagaggcaacgtggagaggctgaaaacagtgcagagacgtttgacaatgagtcagtagcacaaaagagatgacatttacctagcactataaaccctggttgcctctgaagaaactgccttcattgtatatatgtgactatttacatgtaatcaacatgggaacttttaggggaacctaataagaaatcccaattttcaggagtggtggtgtcaataaacgctctgtggccagtgtaaaagaaaatccctcgcagttgtggacatttctgttcctgtccagataccatttctcctagtatttctttgttatgtcccagaactgatgtttttttttttaaggtactgaaaagaaatgaagttgatgtatgtcccaagttttgatgaaactgtatttgtaaaaaaattttgtagtttaagtattgtcatacagggttcaaaaccccagccaatgaccagcagttggtatgaagaacctttgacattttgtaaaaggccatttcttgggaaaaaaaaaaaa

SEQ ID NO: 88820 - DNA, 484 bp, Homo sapiens
  misc_feature (1)...(484): n = a,t,c or g
gttccagccccgaccgttganccctactgaacgatccgacnaccncgangannagagaaggattaccgngngagaagcnggggcngnnggncgagttgtatctggtgttggtagaggccgtggacccagggctgctggagggcaccacacagaatgtatacttctacgatggcagcactgagcgcgtggaaaccgaggagggcatcggctatgatttccggcgcccactggcccagctgtgtgaggtccacctgcggcgtttcaacctgcgccgttcagcacttgagctcttttttatcgatcaggccaactacttcctcaacttcccatgcaaggtacggaaccaggtgtactcgtggctcctgcgcctacggcccccctctcaaggctacctaagcagccgctccccccaggagatgctgcgtgccttatgccttacccagaaatgggtacagcgtgagatatccaactttgagtacttgag

SEQ ID NO: 88821 - DNA, 851 bp, Homo sapiens
  misc_feature (1)...(851): n = a,t,c or g
aatttgtcttccattgcttttaatgttacatgtttgtttagctttcctgcaaagtagtatctgtttatttgtttggagaccacatggcctagtggaccttagcattggatagactttggttggaaatccagtttggtttctactcatattaattagctataaaactaggataatatccagcttatagggttattagtaggattaagtgagatagtataagtaaaatagcatagtaactagtagatagtacacatggatttcagtcatcatcaacttttgaataatctactagattgacacaactaaacttcatcctctgctgtatttcaactttcatataataaatggtgagtgaggtattaagcccagcatctgatgcgctccctcctctcacctcccaccctccaaaaggcccagtgtgtgtttttctccaccaagtggccatatgtttttatcattcagctcccacttataaatgagaacatgtggtatttggntttctgttgctgtgttagnttgttaaggataatggcctctagctccatccatgtccctgcaaaggacatgagctcattccttcttaaggctgcgtagtattccgcggggtatatgtaccacattttctttatccagtggatcattaatcggcattggggtgggacccatgtctttgctattgggaaaaggctgcagcgaaatatgggtgccggctcttttaagtggccacagcaaccaacaaaaggggggggccgctttggagagaaaaaatttctgcgggggggggggacgaaatttttttatggggccactagaagaaccggcgcgcgttcacaagcgaacgggggaccacc

SEQ ID NO: 88822 - DNA, 391 bp, Homo sapiens
  misc_feature (1)...(391): n = a,t,c or g
aagcttcccagctgcagccaggagcacgggaacaggacacatttcttgttcaggcctcagaacttgcagttcttccagacgggggctgttcctgctccctcctccaccctccacccccagcctttgttcctgggaatgctgtctcaatgtctcgatctcactttcgccaaagcaaacatttccaacaaggcgtatgctaaggggatattagaaagacagatcgagacattcgcgagcggccgctcgcgatctaaaactagtctatgtttttacctaatcttcttgctacttgctaccttcagctaatgagaggggtttttgagggctgagagttatcagcttgtaaaataacaatttcattttctcagactatgttgatgccaactctgtn

SEQ ID NO: 88823 - DNA, 444 bp, Homo sapiens
caataattgccgtgcttcggatgaaccaagggaagagaaataatgcagaagagaatcttgagcccagtggtcgagtgctgaagcagtgtggccctttgtgggaggagggtggcagtggtgccagaatctttggaaatcagggcttaaatgaaggcaggaccgaaaacaataaggcacaggccagccctagtgaagaaaacaaagcaaataaaaaccagctcgcaaagtgtggaaaatctggggaatgcataaagctacatcaagaagcagaatgacctcacttatcctgtttggtgtatgccgtgacagttggaaggaaatacaccctgaaattgtcctcagtgtacaaatgaaaagcctccttttcccacctaacattactgtacatgtgggctcttcccatgtttatccgtgttttttataaatgccatgatctgcaatgaa

SEQ ID NO: 88824 - DNA, 640 bp, Homo sapiens
acagaggatgctggatactgtatggagtttaagacagagtccttgactcctcactgtgctctggaaaaccggcccttgactagatggatgcagtatctccgagagggatacacggtgtgtgtggattgtcagcctccagctatgaactctgtgagccttcgttgttctggagatggcctggactccgatggaaatcagactctccattggcaagcaattggtaatcctcggtgtcaaggaacttggaaaaaagttcggcgagtagaccagtgttcttgtccagctgttcacagttttatttttatatagatggtgatataaatatttccaaatgcatttgtaaacattctaaatattctcaagtcatgttcaatgtttcctaaaccttcaattttggccaaagtccccaaacacatcattgccacactctgaagtagagaaagaaaatttaggggccagttctcaaggaacacaggtcctttatttttattttaactaagttgaagacccactcaaaaagctcttgtggttttatgttcttgacctttcaactggagtcctctcattcagcaggtggcccgtgagacacagaatacatgtctgtttgctaaagtaaaattactgtaactcaaaaaaaaaa

SEQ ID NO: 88825 - DNA, 1363 bp, Homo sapiens
agaccatgaaccaggcatctcctgctagaaagctggaagagattcttcatctggcagagctctgcatagaagtcttacagcagaatgaagagcatcatgcagaggcatttgcctggtggcctgatttattggctgaacatgcagagaaattttgggctttatttacagtggatatggacactgcactagaggctcaaccgcaagactcctgggatagttttcctcttttccaactgcttaataatttcctccgaaatgacacacttttgtgtaatggaaaatttcacaaacacttgcaagaaatctttgtacccttggttgtccgctatgtggatctcatggagtcttccatcgcccagtcaattcacagaggttttgagcaggagacatggcagcctgtcaagaatatcgccaacagtcttcccaatgtagctcttccaaaagttccaagtctgcctcttaatcttccacagattcctaacatttctactgcttcgtggatgccttctttatatgagtccaccaatggctcagcaacatcagaagaccttttttggaagcttgatgcactgcaaatgtttgtctttgatctgcactggccagaacaggaatttgcccaccacttagagcaaagacttaaactaatggccagtgatatgctagaggcctgtgtcaaaagaacaagaactgcatttgaactcaagctacaaaaggcaagcaaaacaactgacttgcgcattccagcttccgtttgcactatgtttaatgtattagtcgatgccaaaaagcaaagcaccaaactctgtgccctggatggaggacaagagtttggtagtcaatggcaacagtaccattcaaaaatagatgatctgatcgacaacagtgtaaaagaaatcatttcactgttagtttcaaagtttgtttcagtgttggaaggcgtgttgtctaagctgtcaaggtatgatgaaggcactttcttttcatccattctgtcattcactgtgaaagcagctgcaaaatatgttgatgttccaaaaccaggaatggatctggcagacacctatattatgtttgttcggcaaaaccaagatattcttcgagaaaaggtcaatgaggaaatgtatatagaaaagttatttgatcaatggtacagcagttccatgaaagtcatttgcgtgtggttgactgatagattagacctccaactccatatttaccagctgaagacgctcatcaagattgtgaagaaaacctacagggactttcgattgcagggtgtgttggaaggaacactgagcagtgggacttatgatactgcgcacagacgtttaacaggaaaggagggcacagcctctgtttcaac

SEQ ID NO: 88826 - DNA, 398 bp, Homo sapiens
accctttctggtaggaaacgttcaagtacattttgtcgagtagatgtaatgaaactataaattagtttttactaaatgaagaaagcaggcaagttggtgttcgagaacgtccttgcacgtttccagtaaatgtggcaccccgagccattctgaagctgccctccctaaatggacggtctgtggctgtctccttttctccccttgcaagatccttgcaggacaggagggagtccaggtcaaggcataatactcacatacacagctgggcttgttgccagaccactgattgttctgctgacaggtgataactctctcccccaccagctcaaaggccgccgggcattcaaagggatacacgtggctacacagatacgctgacaacacaaatgctgcaatta

SEQ ID NO: 88827 - DNA, 537 bp, Homo sapiens
ttacctgtgttggcagcaccattatcagtgatgtatttaccccgggtgggcctctcgcatttagcatatgttctgaaactcccgcaagcatttccgggcttcttcaagaaactgcttgtgcaacctgttttgctgtaagatctgctgctgctggtctcggatcatctgactgtgccggtcgtcgtcggcgaggctggtgcccgatggggaagtggtgctgagctcagatcctctctccctttcctgggctctcgtggaggaggacttcagatgggccagtcgagctcttctttgctccctcctctctttttctagctcagctttgtagtggatttccaagctcatatctgggtgttccatttgttcaagcgattccagttgtttttgtcttctctgctccatctctgctttctgcctttgcctggatgccgtcgagcccactctgtctgcctggtcttgaaggtggagctgaagggagccctctgccagcgtgcccagtttgggggtctcttgtccagattcagtgctatacaataa

SEQ ID NO: 88828 - DNA, 423 bp, Homo sapiens
aacaggttatggacttaccatccactgtaagagttacccaaagctcggcatccgtgatggtccagggggcttctgaggcgatcaggcagcatcgacattcagctgctaagccgaggagatctgggaaggagtcggccaaggaatgttgggtttgagctccaggagctttaggagtggcagcgatgtgagtcagacagtctgacttccagtgggggcctgcacagacagggcccgacttaggaggaatcctgggctgctggcactccgaggcccagtggccaggcttttggcatttgaagcaaggtccacagggaggttttgaaggagcccctgggagctgtggcttggatgttccgaaggttttgtatgctggagacgtggttgtgggttgtcttacagtggaggcaagtagctataactgag

SEQ ID NO: 88829 - DNA, 500 bp, Homo sapiens
  misc_feature (1)...(500): n = a,t,c or g
tagaacttgtgggccaaatatggcccctgcctaattttgttaatatttattggaatgcagcatgcctctgtttatgtattgtctgtggctgcttacatactacaaggttggagttgagtggttgcagcagagattgtatgcctgtaaagccagattagtattctcctcctttttgtagaaaaagtttactgattgctagtttaggctgtccatgtggaagttaatttatttccccatctggtataaggaaagaagttcatttcactgagtgcagggagtaggtaattttcttgaaaaagtacataaaagtacctaaattggtagggtaagagcagtatctaaaagaactaacataactttaagattattttagaaaacatgtaggatgttttattttgtattctttgtatactcaaatttttggtcacaagttccttttacatttttgttaaggacatcgaagatctttgtatgtgggttcctctannanaaaaaaaaaa

SEQ ID NO: 88830 - DNA, 770 bp, Homo sapiens
gagtagattttcgggtcaaaaccttgctggtggacaacaagtgctttgtgctgcagctctgggacacagctggccaagagaggtaccacagtatgacgcgacagctgctccgcaaggctgacggggtggtgctcatgtacgacatcacctcccaggagagctttgcccacgtgcgctactggctagactgtctccaggatgcagggtcggatggggtggtcatccttctcctgggaaacaagatggactgtgaggaggaacggcaagtgtccgtggaagctgggcagcaactggcccaggaactgggggtctattttggggagtgcagtgccgccttgggtcacaacatcctggagcctgtagtaaacctggccaggtcactcaggatgcaagaagaaggcctgaaggactcgctggtgaaggtggcccccaagaggccgcccaagagattcggctgttgctcctgatcacctgtcctgtcctgggtaggatggacacccatggggtttcctgtccctcagctcctgtcctttgttcctggacagcaacgacacagaggaccagcttggaggttcaggaaaacccttctcaactcaggactcggatcccagagcagggccgcatcacctctgcctttcacactccaaaggagggctttgctgagtgaacaaggcttgaggggcaggggtatggcaaaactctccaaacaaagaaagtctagaaaaacgacttaaggaaaatacaccaaaatattggccgcaaaaaaaaaa

SEQ ID NO: 88831 - DNA, 395 bp, Homo sapiens
tatactgcttaataatgtgatgaaactgtaaaaggattccattaaaggggcaaggagtggcgttaaagagtatgtaggttttcacttatcctttttaaataggaaagagtttttccttaggatcagctataggggcctttttagtctgggatgtttccttctgaaataggagacacaaatcttccaatggttcacaggtttatcgaggctggtctggctgatcttgggactcctgagctgatggtcctacaggttcttcagggggtgtccaaagtttaactcgcatgtagtgaatccaagattccactcctgccaccttaactgcagggggggtagagaggattactgagtatggtccttcccacaaggaatccatagatgaggaggaagagggg

SEQ ID NO: 88832 - DNA, 404 bp, Homo sapiens
atttgttaatactcagctactgtagtgctcatgtttttaagaaacaggccatgttcaaatttaaatatattcttcacagtctcaatggattcttcatccagtggaggcttcctttggcttccaggttggagaaatttattaattgtggggatgtggctgattctggccttgaatttctaaaatgcaaaagaatactatccaagagagaagaatataacaaaacaaagtaaaatgcaaatgagccacattctggtggaggtgggggataattgggattttcatacattgtggacattgcaaagtgatactgccactttgcaagttagcaatatttctcaagaaccacaaaaacgttcataggctgttacgaagtgattccattttaaaaattgcgtcctaatgat

SEQ ID NO: 88833 - DNA, 708 bp, Homo sapiens
acaccggtggccagttctgcaatcagcatcctttcaacaactcctgttgacaacagcacacctgtgaccacttctactgaagcccgttcatctcctacaacttctgaaggtaccagcatgccaaactcaaatcctagtgaaggaaccactccattaacaagtatacctgtcagcaccacgccggtactcagttctgaggctagcaccctttcagcaactcctattgacaccagcacccctgtgaccacttctactgaagccacttcgtctcctacaactgctgaaggtaccagcataccaacctcgactcttagtgaaggaatgactccattaacaagcacacctgtcagccacacgctggtggccaattctgaggctagcaccctttcaacaactcctgctgactctaacagtcctgtggtcacttctacagcagtcagttcatctcctacacctgctgaaggtaccagcatagcaacctcaacgcctagtgaaggaagcactgcattaacaagtatacctgtcagcaccacaacagtggccagttctgaaatcaacagcctttcaacaactcctgctgtcaccagcacacctgtgaccacttattctcaagccagttcatctcctacaactgctgacggtaccagcatgcaaacctcaacttatagtgaaggaagcactccactaacaagtttgcctgtcagcacc

SEQ ID NO: 88834 - DNA, 1850 bp, Homo sapiens
atgaaggcacagacagcactgtctttcttcctcattctcataacatctctgagtggatctcaaggcatattccctttggctttcttcatttatgttcctatgaatgaacaaatcgtcattggaagacttgatgaagatataattctcccttcttcatttgagaggggatccgaagtcgtaatacactggaagtatcaagatagctataaggttcacagttactacaaaggcagtgaccatttggaaagccaagatcccagatatgcaaacaggacatcccttttctataatgagattcaaaatgggaatgcgtcgctatttttcagaagagtaagccttctggacgaaggaatttacacctgctatgtaggaacagcaattcaagtgattacaaacaaagtggtgctaaaggtgggagtttttctcacacccgtgatgaagtatgaaaagaggaacacaaacagcttcttaatatgcagcgtgttaagtgtttatcctcgtccaattatcacgtggaaaatggacaacacacctatctctgaaaacaacatggaagaaacagggtctttggattctttttctattaacagcccactgaatattacaggatcaaattcatcttatgaatgtacaattgaaaattcactgctgaagcaaacatggacagggcgctggacgatgaaagatggccttcataaaatgcaaagtgaacacgtttcactctcatgtcaacctgtaaatgattatttttcaccaaaccaagacttcaaagttacttggtccagaatgaaaagtgggactttctctgtcctggcttactatctgagctcctcacaaaatacaattatcaatgaatcccgattctcatggaacaaagagctgataaaccagagtgacttctctatgaatttgatggatcttaatctttcagacagtggggaatatttatgcaatatttcttcggatgaatatactttacttaccatccacacagtgcatgtagaaccgagccaagaaacagcttcccataacaaaggcttatggattttggtgccctctgcgattttggcagcttttctgctgatttggagcgtaaaatgttgcagagcccagctagaagccaggaggagcagacaccctgctgatggagcccaacaagaaagatgttgtgtccctcctggtgaacgctgtcccagtgcacccgataatggcgaagaaaatgtgcctctttcaggaaaagtataggaaatgagagaagactgtgacaactcatgacctgcatccttaatatccagtgacttcatctcccctttcttcaccacaattccaggcaatggcctgtcggaccagacaattctaccactgcaaagagttgtaaccattttctggtatcacatttatttttcaagacatacttttcaagacatcattcactgacccactacctgcattgagtataaatgcctggatgttaaggattccaatttaactttgaaaagaactgtctcattcatttacatttctgttacagtcagcccaggaggttacagtgagctctccactaagaatctggaagaaatgcatcactaggggttgattcccaatctgatcaactgataatgggtgagagagcaggtaagagccaaagtcaccttagtggaaaggttaaaaaccagagcctggaaaccaagatgattgatttgacaaggtattttagtctagttttatatgaacggttgtatcagggtaaccaactcgatttgggatgaatcttacggcaccaaagactaagacagtatctttaagattgctagggaaaagggccctatgtgtcaggcctctgagcccaa

SEQ ID NO: 88835 - DNA, 521 bp, Homo sapiens
tacggctgcgagaagacgacagaagggttatacaagtggcaagaagaggacagtggaccagctcctgggaccttccaaaacattggctttgacatctgccaagatgatgattccatccacctggagtccatctatagtaatttccagccctccttgagacacatagaccctgaaacaaagatccgaattcagaggcctcaggtaatgacgacatcattttaaggcatggagctgagaagtctgggagtgaggagatcccagtccggctaagcttggtggagcattttcccattgagagccttccatgggaactcaatgttcccattgtaagtacaggaaacaagccctgtacttaccaaggagaaagaggagagacagcagtgctgggagattctcaaatagaaacccgtggacgctccaatgggcttgtcatgatatcaggctaggctttcctgctcatttttcaaagacgctccagatttgagggtactctgactgcaacgtctatcacccgattgatc

SEQ ID NO: 88836 - DNA, 619 bp, Homo sapiens
tcaaaatgtctgagaactttcatcttactactaaacacatacccaaggtgaggaaggcttacaaactatactttcgagggggcagatagtattttgggcatttccacgtgatgatattttatgttacatctcttttctccattttctcaaaagtatttcctttcttaatgcctcattctttactcataataattctgtcttttgttttgtcaatggtgtaattaatttcatgtgtattaacactatggtgactagttaatttccctaactgggtttattagaagcagtccagacacaggggctgaaaatgcttggctatgaaagtgttaaagtttgcatggtacacagaggattttctgatttctcagtgtccccaactgtcttcaggaatatgttaagtagttcctgactctgattttccttgccagattaaactaaacagctgatcaggaacccttaaggaatctgcagcagctggacctccccccgaaaagagagagagagaaagaatttcccagcctaaaaacactgcctatgggggtctcgggagaacccgcctaactttgccccctggtaaaaaggctttaggtccccctttgcttttggccccaccccttac

SEQ ID NO: 88837 - DNA, 287 bp, Homo sapiens
attttattttgcttttggatttgggggaaatgtggatattctgccaagttttactcttcctcttccttgtggaaggccaagcctacaggaaaaagcacatgtcccaagctacaccccaggactggaagctgcccctaggcttaattcccccagctcccgaagcgggacgagatggccatgcagcacaagtgctgaaaaagaggcagctttccaatagttctgtttggaagccttgatatgtttgggtgaaccctaagaataaggaaggtgagaaattcaagttcact

SEQ ID NO: 88838 - DNA, 299 bp, Homo sapiens
aaaacctcccaagatacaaagccttcagtgttatggaaagatgtaaatagtaatctatggtgcaggccacatgatttgctaacatggggaagaggatatgcttgtgttcacatcccctcaggtcctcttgggattccagtgcaatgcatcaaaccataccatggcatggctgggacccaatgcagtactggaaatgaagaatgtgagcctgtaggacccgcagccccggacaatgcagcttcctcggacaacacaggtcccggatggggaatgtgaaatatacaactgggggatgctga

SEQ ID NO: 88839 - DNA, 2739 bp, Homo sapiens
cctgcaagtgtcacccccagggctcagtcggatccagctgcagccgacttggaggccagtgccagtgtaaacctcttgtggtcgggcgctgctgtgacaggtgctcaactggaagctatgatttggggcatcacggctgtcacccatgtcactgccatcctcaaggatcaaaggacactgtatgtgaccaagtaacaggacagtgcccctgccatggagaggtgtctggccgccgctgtgatcgctgcctggcaggctactttggatttcccagctgccacccttgcccttgtaataggtttgctgaactttgtgatcctgagacagggtcatgcttcaattgtggaggctttacaactggcagaaactgtgaaaggtgtattgatggttactatggaaatccttcttcaggacagccctgtcgtccttgcctgtgtccagatgatccctcaagcaatcagtattttgcccattcctgttatcagaatctgtggagctcagatgtaatctgcaattgtcttcaaggttatacgggtactcagtgtggagaatgctctactggtttctatggaaatccaagaatttcaggagcaccttgccaaccatgtgcctgcaacaacaacatagatgtaaccgatccagagtcctgcagccgggtaacaggggagtgccttcgatgtttgcacaacactcagggcgcaaactgccagctctgcaaaccaggtcactatggatcagccctcaatcagacctgcagaagatgctcctgccatgcttccggcgtgagtcccatggagtgtccccctggtgggggagcttgcctctgtgaccctgtcactggtgcatgtccttgtctgccgaatgtcacaggcctggcctgtgaccgttgtgctgatggatactggaatctggtccctggcagaggatcatgtgattgtaacagggcaggtacccagaagcccatctgtgatccagacacaggcatgtgccgctgccgggagggtgtcagcggccagagatgtgatcgctgtgcccggggacacagccaggaattccctacttgtcttcaatgtcacttgtgctttgatcagtgggaccacaccatttcttccctctccaaagcggtgcaagggttaatgagactggctgctaacatggaagataaaagagagaccctgcctgtctgtgaggcagacttcaaagacctcagagggaacgtgtctgaaatagaaaggattttgaaacatcctgttttcccatctgggaaattcttaaaagtcaaggattatcatgactctgttagaagacaaatcatgcagctaaatgaacaactgaaagcagtgtatgaatttcaagatctgaaagatacaatagaaagagcaaagaatgaagcagacctcttacttgaagaccttcaggaagaaattgatttgcaatccagtgtccttaatgcaagcattgcggactcctcagaaaacatcaagaaatattatcacatatcatcatctgctgaaaagaaaattaatgaaactagttccaccattaatacctctgcaaatacaaggaatgacttacttaccatcttagatacactaacctcaaaaggaaacttgtcattggaaagattaaagcagattaagataccagatatccaaatattgaatgaaaaggtgtgcggagatccaggaaatgtgccatgtgtgcccttgccctgtggcggtgctctctgcacgggccggaaggggcacaggaagtgtaggggtcccggctgtcacggctccctgaccctctcaacgaatgccctccaaaaagcccaggaagcaaaatccattattcgtaatttggacaaacaggttcgtgggttgaaaaatcagatcgaaagtataagtgaacaggcagaagtctccaaaaacaatgccttacagctgagggaaaaactgggaaatataagaaaccaaagtgactctgaagaagaaaacatcaatcttttcatcaaaaaagtgaaaaactttttgttagaggaaaacgtgcctccagaagacatcgagaaggttgcgaatggtgtgcttgacattcacctaccaattccatcccaaaatctaaccgatgaacttgtcaaaatacagaaacatatgcaactctgtgaggattacaggacagatgaaaacaggttaaatgaagaagcagatggagcccaaaagcttttggtgaaggccaaagcagctgagaaagcagcaaatattctattaaatcttgacaaaacattgaaccagttacaacaagctcaaatcactcaaggacgggcaaactctaccattacacagctgactgccaatataacaaaaataaaaaagaatgtgctgcaggaatttgttgagctgaaaaaacaatatgctattctccaacgtaagacaagcactacaggactaacaaaggagacattaggaaaagttaaacagctaaaagatgcggcagaaaaattggctggagatacagaggccaagataagaagaataacagatttagaaagtaaaatccaagatttgaatctaagtagacaagcaaaagctgatcaactgagaatattggaagatcaagttgttgccattaaaaatgaaattgttgaacaagaaaaaaaatatgctaggtgctatagctaggcagagttaaagagcaaaagcttgtgcctttgtttctggtttctgatgtacaagcccctggggctctgttgaacctgtg

SEQ ID NO: 88840 - DNA, 6397 bp, Homo sapiens; identical to SEQ ID NO: 64829

SEQ ID NO: 88841 - DNA, 402 bp, Homo sapiens
aaattatttctggacatctaattcccagaattcccggtcccaacactctgggacgctgaatgcatgtgggaatgaggatggggaaagcagggaggttaggaaggaaagagacttgagaatgtgacgctggtttcaagagtctgcaagaaattgtttcttctttcacaggaaatccgacgatgactcttgggtgagcaacggcacctatttggaacttaaaaaagatcttgggttttccaaactggaccatcctgtcttatggtgaaaaagttaagaagaaagacaacatttttgtatttctcctgtgcttgccttctgtagtggcacaaacctgtgtttatatatttaaaagatactctacgatgatctcttgtgcttagcttaacaaaagaagtgcttaag

SEQ ID NO: 88842 - DNA, 679 bp, Homo sapiens
aattatctgaatgaatgacgcagctgtgcaaactgagacaagtttcagttgaacaaatgaaaatcagtgtcacagatggcccagggataaggatgggcactaccagctagtgtgtttgtagagaacttggcctgtagatgctttctgccacacacgttgctcactctggatgtcccatgaaattcttgtcagtatagagcagaggttggtaagctttttaagaaaatggactaatggtaactattttaggctttatagactgactatagggtctctgttggaattactcatctctgccataatagtgtgaaagcagtatgtaaacaaatgaacatggctgtgttccatgaaaactttatttacaaaaataagcagcaggccagatttggcacacaagctgtagtttgcaaactccttgtataggttaacaaaacccactcttttcatgatttgaaaaagtattacaagatttttttaaaaagtattgattaaactaagggaataaacattaagaacattgaaaatgtaagttttacttaagtagttataaaacctgatgtaattgagctgtgtgtcgtggtgagcacctggagtcccagctacttgggaggctgaggcaggaggcttgcttgagctcaggagttcgagtccagcctgcacaacaaagtaagaccacttt

SEQ ID NO: 88843 - DNA, 927 bp, Homo sapiens
ttttttttttttcaccagtgaagcaggagttttattgagttcctccatgtcacattaatacattagcttcaagacacagtttcaaagaccccgggtccttctgacgtagtgtgttggaggcagctaggccagcttgaggcactgtgtgttaaagctgtccccctccttgccggcgacagcctccagcagggcctgtttcttctgcatgctccgtgaggactccagctcgtacatggtggtcaggttgaagagcacgctctcgtgcaggtagtgcctggggtcctgctggaccatggcctccagctgccgcagggagtccttgagcttgcccaggtagagcagacacacggcagcgttgttgttggcctagggaggagcacacgcccagggttggcccacacaaccaggacagacgcccgcccattccaggctgcgtgctgggccgtgttaggggcctgggggtggtgcagagctgctgggcagagcctaggtggccctgttgggtcacttcccctaagggccacagccactgcctggagctggtggactggagagagagagcgcaggcccctgctgagacgtgtgtgggtgtatgtttctagcgtctgtgaaaggcagaggatggaggatcctgcagcttggggatcttaccactgcgtttcttggatccatccttaagatctctgtgaagaacctgtgggcttctgcaaagttattctgcccgaggtaaaggaacgcgctgtaacacaagcaacggtggcagttagcggggaaagcccaggagctgctgtcccccaacacaacccacaggggctttggatcccacagagacccagcgtatggccctgtgtggcccggggttcctgatctccaggtagaggcggtgagctgcgttttgcattcaggctcgcacattaaagccactct

SEQ ID NO: 88844 - DNA, 548 bp, Homo sapiens
  misc_feature (1)...(548): n = a,t,c or g
cttcaccgtccagcaagatactgacactacatccgagtggataccgataccactccatttccttctagcgcaggcggccncccccnaatagatagcgtacgtagnacnaccnnnccggaatnccgggncgagccacgcgtccgcacgcatccacgctgagctccacagcatcttatgtattcacactgagctccacggcctctcacgcaggcacgctgagctccacgggctcttctgcatccacgctgagctccacggcctctcacgcatccacgctgagctccacggcctctcacgcatccacgctgagctccacggcctcttctgcatccacgctgagctccacggcctctcatgcatccacgctgagctccacggcctctcatgcatccatgctgagctccacggcctcttctgcatccacgctgagctccacggcctctcatgcatccatgctgagctccacggtctctcctgggaagccctggcttccttctctctgccagccctcatgggagggcctaacaccaccgcagcgcaaaggggag

SEQ ID NO: 88845 - DNA, 390 bp, Homo sapiens
gccgagtgggtggtgaccaatgacaagtccaaatacgacgagatcttctacaacctggcgcctgccgacggcaagctgagcggttccaaggccaagacctggatggcggggaccaagctccccaactcagtgctggggcgcatctggaagctcagcgatgtggaccgcgacggcatgctggatgatgaaaagttcgcgctggccagccacctcatcgaggccaagctggaaggccacgggctgcccgccaacctgccccgttggctggtgccaccctccaagcgacgccacaagggctccgtcgagtgagccgggcccccctcccatggccctgctgtggctccccagctccagtcggatgaacgcacacccctgctccggatacacacg

SEQ ID NO: 88846 - DNA, 392 bp, Homo sapiens
gaaaatgtggcaacagagaaaagcacttgtaaaatacacgcaggaggcaggtagtgttcacctccctggttaaaggaaaggcaccccccacatgctcacaggaactctccctcctgcccctcctcttcccctaccccacttccaccccaggggccaccggaagcagcagcagcaaccccggctcctcatcccctgccgtgatgtctgcaagtggctctggctagaagtggtgctggtgaagggctgtagatgagggtctcttctccagcctcttcacgtggcaggagtgacagaacaggtggtcctccagcggataacagcggtggccatcttcatcattgagctccagaccacagtcctgtggggaggcagacatgtccaggggaagcaaa

SEQ ID NO: 88847 - DNA, 397 bp, Homo sapiens
ttataccttcctcattccaacaaggcaccttgcagggctcagccgggaaagatggtgacctgaagcttcctctgcagagcgcccttcacctccttgttgcggaggctatagatgaagggattgagcatgggaattatgatggtgtagaagacggacactacttggccattggtattgttagtagatccatggggctgaacataggtgaaaaccacggtgccatagaaaatggcaatggccagaaagtgggaggcacaagtggagaggtccttctccctccctgctactgagcgcatcctcccaatggccaccaagaccaagcagtaggaggtgagaatgactgcagcaggcagaagggtgaccagagcagaaaagacatagaggaccactcttgctg

SEQ ID NO: 88848 - DNA, 392 bp, Homo sapiens
tgtcccagctctcctgtgaggtccatccatcctgatggttcatggggacgtgagcacagcctctgtgtgtgtgttggggacagtgtcccagttctcctgtgaggtccacccatcctgatggttcatgaggatgtgggcacagcctctgtgtgtgtgatggggacagtgtcccagtgtcctgtgaggtccacccatcctggtggtccatgagtacatggacacagcctctctgtgtgagatggggacagtgtcccaattctcctgtgaggtccacccatcctggtggtccatgagtacatggactcagcctctctgtgtgtgataaggacagtgttccaactctcctgtgaggtccacccatcttgatggttcatgaagacttgggcatggcc

SEQ ID NO: 88849 - DNA, 571 bp, Homo sapiens
ttttttttttttttacaactgcacaaaggctgtattgcaggggaggtgggagggggcaggcagaacgctcctcctcctgggtcttggggccccggagcagagcccagggatgggctgagtgaggggcttggcactctgtggaagctgcagatgagagaccagcaatgcatcagctgcacctgcagtagagcgcggagatagcgttggaccagtctcctaagatgccccggcggtactcctccaggcgcgggtaggtgccggcagagaacttgtgcgtcttgcccgccttgccttgccgggaccacacggtgagctcgcagcgcggggccaccacaagtgaggaggcggtgttggcccagttggagggcaggtagggcaggtctgcgcccgactccagcgacagctcggcgcccccgcagcagttctcatagtaggggtcgctcttgtcatagagcttggcgcaagtgcgcgtcccgtccgagtgcttgaggtcggcggaggcggggcaggcgccctgggcgcaaggcacggaggcaagggccagggccagcagcagcgggcgcagcgggga

SEQ ID NO: 88850 - DNA, 1599 bp, Homo sapiens
ggggtcagcttcttagaatactacaggaagcaatacaaccaagagatcaccgacttgaagcagcctgtcttggtcagccagcccaagagaaggcggggccctggggggacactgccagggcctgccatgctcattcctgagctctgctatcttacaggtctaactgataaaatgcgtaatgattttaacgtgatgaaagacttagccgttcatacaagactaactccagagcaaaggcagcgtgaagtgggacgactcattgattacattcataaaaacgataatgttcaaagggagcttcgagactggggtttgagctttgattccaacttactgtccttctcaggaagaattttgcaaacagaaaagattcaccaaggtggaaaaacatttgattacaatccacaatttgcagattggtccaaagaaacaagaggtgcaccattaattagtgttaagccactagataactggctgttgatctatacgcgaagaaattatgaagcagccaattcattgatacaaaatctatttaaagttacaccagccatgggcatgcaaatgagaaaagcaataatgattgaagtggatgacagaactgaagcctacttaagagttttacagcaaaaggtcacagcagacacccagatagttgtctgtctgttgtcaagtaatcggaaggacaaatacgatgctattaaaaaatacctgtgtacagattgccctaccccaagtcagtgtgtggtggcccgaaccttaggcaaacagcaaactgtcatggccattgctacaaagattgccctacagatgaactgcaagatgggaggagagctctggagggtggacatccccctgaagctcgtgatgatcgttggcatcgattgttaccatgacatgacagctgggcggaggtcaatcgcaggatttgttgccagcatcaatgaagggatgacccgctggttctcacgctgcatatttcaggatagaggacaggagctggtagatgggctcaaagtctgcctgcaagcggctctgagggcttggaatagctgcaatgagtacatgcccagccggatcatcgtgtaccgcgatggcgtaggagacggccagctgaaaacactggtgaactacgaagtgccacagtttttggattgtctaaaatccattggtagaggttacaaccctagactaacggtaattgtggtgaagaaaagagtgaacaccagattttttgctcagtctggaggaagacttcagaatccacttcctggaacagttattgatgtagaggttaccagaccagaatggtatgacttttttatcgtgagccaggctgtgagaagtggtagtgtttctcccacacattacaatgtcatctatgacaacagcggcctgaagccagaccacatacagcgcttgacctacaagctgtgccacatctattacaactggccagtaagtgcttctacttgttgatgtttagcaaataaaggacattcacttttcaaaatgaaatagctgtggtttaaaaggcttttagggttaatactgagatttgcaattgaaagaggctaagtctagagtaatagaacctttttt

SEQ ID NO: 88851 - DNA, 387 bp, Homo sapiens
ctggcctggattgacaacatcctcccagagaaggaaaaaaaggagacagacaagaagaggaagagaaaaaaaggggcccacgaggactgtgatgaggagccccagttccctcctccctcggttataaagattcccatggaaagtgtccaatcagatccccaaaacggtatccactgcattgccagaaaaagatcttccagttggagttactcactctgattcttccttcagggacacagaacttgaccgaagcatcaccttgcacttcaaaatatcctgtccagcttcacctgctttcagctactcacggaacccagtgttcatggtgccacaggtgaagatagagatggagtcagactatgacttcacagacatggataaataccg

SEQ ID NO: 88852 - DNA, 777 bp, Homo sapiens
  misc_feature (1)...(777): n = a,t,c or g
cacgctcgcggacggcggggaggggcagttcgacggcacattcgagcctgccaccgtggctcttccaggcggcgagcacgccgagaacgccgtgcagatccacaaggtggtcacgggcaccatggccctcatcttctccttcctcatcgnggncctggtgctctacgtgtcctggaagtgtttcccagccagcctcaggcagctcagacagtgctttgtcacgcagcgcaggaagcaaaagcagaaacagaccatgcatcagatggctgccatgtctgcccaggaatactacgttgattacaaaccgaaccacattgagggagccctggtgatcatcaacgagtatggctcgtgtacctgccaccagcagcccgcgagggaatgcgaggtgtgattgtcccagtggctctcaacccatgcgctaccaaatacgcctgggcagccgggacgggccggcgggcaccaggctggggtctccttggcctgtgctctgataatgctccttgactgaaaactttaaggggatctcttcccagagacttgacattttagctttattgtgtcttaaaaacaaaagcgaattaaaacccaacaaaaaaaccccaccccacaaccttcaggacagtctatcttaaatttcatatgagaactccttcctccctttgaagatctgtccatattcaggaatctgagagtgtaaaaaaggtaccaatcattgattttttttttttttgtaaactaaaatgtttaaaataaaatagcatttacagttaaaaa

SEQ ID NO: 88853 - DNA, 2305 bp, Homo sapiens
gccaagggtcccccagacgggcgggggctccttgcggccggctagctactctccccgcctccctgcgccctcgccctccgccccgctgtacccgcagagcgcgcggcccagcgcagccccttttggcaccgaggtttccaggtgcccagcgcgaaggcggagccgggttacagccgcctcctcggcgccacagagaagacccccgggagttcggcggcccaggcgctccggctctgcgtcccgagcctcccccggctctccgcgctcctccctctcggcgcgcccggcgcgaagcctgcgattcgtgagccgagcgcagagcgcagagccgagtggcgcacgctgggcagtggcctgggcaaccccaaacgcagccagagccctcacccgagtccgctggcccgcgcactcccggaccatgactgccgagggacccagcccgcctgcccgttggcacagacgcctccccgggctctgggcggcggcgctgctcctgctcggtctgccgcgcctttcggtgcgggcggatggaaagctctttgtgctggagtctcagaatggctctcagggcctacaactggaggctgctcggctttcctgcaagagcaggggcgctcacctggcatctgcagacgagctgcggagagtggtacaggattgctcctttgcggtgtgcaccactggctggctagcagatggtactcttggaacaactgtgtgtagcaaaggaagtggagaacagcaaatcatgagagctgtcgatgtgagaattgagagcaacccagttcctggtggcacatacagtgccctttgtattaaggatgaagagaagccgtgtggagacccgccttcgttcccacacaccatcctgcagggccgcaccggcttggaaatgggggatgaactgctgtacgtgtgtgccccaggccacatcatgggccaccgggagaccgccttcaccttgctatgtaacagctgtggggagtggtacggcctggtgcaggcctgtgggaaagatgaggctgaggcacacattgactatgaagataacttccctgatgacagatctgtgtcattcagagagctcatggaggattcccggacagaggcagatgaggacaggggtcagggagactcctctgaggaggctccaaaacaggaccgtctggtctccatttctgtggggagagaaaacatagcccgggataaagtctttgtgccaaccacaggctcgcctggtgctgggagcagtgtccctgcagattcaccaggatcacggctgctccagaagcacttgttctggtttcctgctgaggctttccacaagcctgggttggaaaaggaggtggatgatgacaccaaaaagcagttttctgctggagacaaccacagtggtgtaaaattggtcccaggtgaacctgaaaccaaggtgatctacggcaacactgatggtccctcggggccatttgtgggcaagaatgacagcaaggcaggagatccagtggtgagcagcagtgatgagtcctggttagatggctaccctgtgacagatggggcttggaggaagacagaggcagaagaggaagaagatggggacagaggggatgggtcagtagggctggatgaaaacgtcctagttactcctgatcagcccattcttgtggaagttaagaagcccaagagtagcaccctcacaccaagcgagggcatgacccatagttcagttcttccatctcaaatgctagatgtggaagctttggcgctcagacccgtgaatgcttccgagactgagggcattggggatggtgacttgacgaagtaccagtcaactctaccctggagattcatcacagaggaatctcccatggccaccctgtcctatgagctcaccagctccaccctggagatattaacagtgaacactgtcaagcagacacctaaccacatcccctcaacgatcatggcaaccacccagcctccagtagaaaccactgttcctgagatccaggatagcttcccatacctgctgtctgaagacttctttggacaggaaggccccgggccaggtgcaagtgaggagcttcatcccaccttggagtcgtgtgtgggggacggatgtcctggcctcagcagaggccctgtgatcgccaccattgtcaccgtcctgtgcctactgctgctcctggcaggtgtggggatggtgtggggctaccgcaagtgccagcacaagagctctgtgtacaagctgaatgttggccagcggcaggctcggcactaccaccagcagatcgagatggagaaggtc

SEQ ID NO: 88854 - DNA, 2006 bp, Homo sapiens; identical to SEQ ID NO: 63615

SEQ ID NO: 88855 - DNA, 421 bp, Homo sapiens
  misc_feature (1)...(421): n = a,t,c or g
ctacgatggaaccaaggtgccagtgagatgacaacagccctgctctggtcactctggaagctgaccagtccacgcacggctgaagcttgaggagacaacagccctgctctagtcaccccagaagctgactagtctatgcacggccgaagcttgagtcatcatcagggaagtaaatgtggttagaaatctgaagtccagtaattttccttgtcatattaattactttgctattaagctgccactttgcttagccttctccccccaggaaaaagccttttctgtccatgctgggtatgaacatgctactcatcactttgttcttgctactccccttatccatgttaaaaggagaaccctgggagggatgcctccactgcacccacactacgtggtcggggaacatcatgactaanaccctgtt

SEQ ID NO: 88856 - DNA, 450 bp, Homo sapiens
aactgacctgggagcgagtgagatctcaagttgaccatgtgatatggcctgatggcaagaggatagtactgctggcagaggtaaggctgagactggcaaaaatactcccccacaacaggagagactgcaatacccaggtcccctcctcctcatgttctcgaatactttcaactcctctgttaagcacaagtttgactactttcccaatggattttacttctaattgtgaaagatcttttcattcagcaattaagaaactattttggttccccacttttcaccaattatcctgtctctccacgtcaatccacaggttgagttagataattattactatagaaggaattcacagatagaaccagtgccactttgagtgatgcatacaaagagataatgtcacttgtgggatgttttaatcactaagcacaaagtagatatgcccgactgtac

SEQ ID NO: 88857 - DNA, 388 bp, Homo sapiens
ggagaaggagaaggaggaggaggagaagaaagaagaagaagaagaaggaagaggagcacaagaagaagaaggagaaggagaaagagaaggagaagggggagaactggagtccctcaaggggagctggagctcagcatgaggtcaggtccccaatagcctgggaggcaccaggggctttaggaacagggaggctcacactgctcaccctgctcccctaatcagaaacatcacccacactcctagaggtcattcatcagtgggccaaaaggtctaaggagggcccaccccagaatgtgacagcttaagtggggtggaaaggaacaggaagctgggcggtcagaccccagagcagggcacaggagaaagcagttctccgtgagccaatggc

SEQ ID NO: 88858 - DNA, 413 bp, Homo sapiens
atggccaggggtggcggccaggctagcatggaggcactcaccagctgagttgatgacatgtctgaccacctgcagggtgcccacgcgggtcctctcattgctggtgtccagcctgggcagcaggaaggccagtaggcggtcaggcgagctgcaggctacagggcaacgggtacagattaggctccatgtcatcttgttcatccctatacacagcgtccacctactctccagcacaggggaggagccagaggagagttgctgtgtgaaggtgagaagctggggccacctaatcgctgggcctggctccgatgcccctgtctaaggcagggttggagcacatgtagcccttatcccacggcgccagcaccacccgagcatgccgggacttagatcttggcccacccagcacaccg

SEQ ID NO: 88859 - DNA, 766 bp, Homo sapiens
  misc_feature (1)...(766): n = a,t,c or g
cacagatattcgtactcatggggttcacatggttttgaatcaccagggccgcccatcaggagatgcctttatccagatgaagtctgcggacagagcatttatggctgcacagaagtgtcataaaaaaaacatgaaggacagatatgttgaagtctttcagtgttcagctgaggagatgaactttgtgttaatggggggcactttaaatcgaaatggcttatccccaccgccatgtaagttaccatgcctgtctcctccctcctacacatttccagctcctgctgcagttattcctacagaagctgccatttaccagccctctgtgattttgaatccacgagcactgcagccctccacagcgtactacccagcaggcactcagctcttcatgaactacacagcgtactatcccagccccccaggttcgcctaatagtcttggctacttccctacagctgctaatcttagcggtgtccctccacagcctggcacggtggtcagaatgcagggcctggcctacaatactggagttaaggaaattcttaacttcttccaaggttaccagtgtttgaaagatgtatggtgatcttgaaacctccagacacaagaaaacttctagcaaatttcaggggaagtttgtctacactgcagggctggcagtattttcagcaaacttggattggggacaaacggggcctgtgccttnatcttttgngtgggagttgaaaaaattttgagnctagtgtaagccaantcggtgnactta

SEQ ID NO: 88860 - DNA, 662 bp, Homo sapiens
aatctttttttttcttttttttcccatatctctccaataaaatggcaaagtcaatgtttccttctttctattgccaattgtttcatatgttccatgtttgccaagagaacccacaaatgttctctgggtttgttcagagctctgctcaccagaaataagatcacaatttctcaagaaactctttttaaacacttttttctcagattgaaagttatctaatcttttactcctagcacgcttaagcttggccaagatttttttaacaatggttttatagttgtagcttcttttgaacctgcttggaattttgccacttctagcagcaaaacagctgtgttcattgagaatctgctctgattcaaaacacttttcacactttggacattgaaaagggacaatataaattgagtggacatcaagtggattattctcctcagattcaccaatctcaccattttcaaaaccaccctgatttgcatttaacttattaggcagggggcgagattctgtacgcctcttctttaataaaagagcccgaaaagccttattcctagtatggatttgtttatgcttcagaagtttgctttgaatcttaaatcctttttgacaaaaacaacattgaaaaggtctttcttctgaatgtgtaagttggtggattttta

SEQ ID NO: 88861 - DNA, 632 bp, Homo sapiens
  misc_feature (1)...(632): n = a,t,c or g
gattacgcatcaggtcagtgattcaccattagataatccaaggagagagaattattttaaacgtacttgtacattttctataactttgtgattgtttgaaagttaagtaacacaaataatttgtgtcctcatcctaaagctttcttctgtcatagaggattgtttatctgagacatatgagtataatggtattgtttcaaaatattttttaagattacacctgtttttaaaaattgtgtcagatagcctgtattcatgtattggaagattcaatattattaaaatggtagttctccccacattgctttataggttcaatgtaattcctaccaaaatcttggcaggctattttttgggggttttttggggcaaaaattgataatatcctgaagtaaatataaaggacccacaatagtgaaagcagttttaaaataggttaacaaaattggagaattcagaacttttgacccccgatttcaaaaatattgccccgccgccccccccagaacaatgtactggcattgagacccccccccccccctttgagaaaccgaatttccagnacccaccccccccctatattatgggtaaaaaattttttactagagtaccccaacattttatgataagat

SEQ ID NO: 88862 - DNA, 637 bp, Homo sapiens
cggacgcgtgggcggacgcgtgggcctgggtcagccagagtaatgatcaatctgctaattctaatctgtcagaaggcaatctggtgggatggaagtttatggactctggaagcaaggtattgtaggtctaattctagctctgccagtttatagctgtgtgacctaaaattcttaacctctcttggcctgactttatttatctcttgacaaatatttactgagggacaagtacatgccagtcacagaagatttagggtgaaaaaaaattcctcaaaaagctcatttataaaactgagtttattatattctcctcagaaatttgttatgaggataaaaggaactaatagttttatgatgactaggcacattctaattcagtaaatattacttcctcccactagatcaagctctttataaataataatgatgattatgctaatattactgttactttcttgaacagagtttaacaacctgactttatctataacaatggtaattgattttcttttactatacagagatttcatagtgaaaaagttccgccgaatataaaatggacagccaccgatgcatttggcgaagaatttggaactcatcttgcaaggtttgccccatattgagaagaaaatttgct

SEQ ID NO: 88863 - DNA, 681 bp, Homo sapiens
cccacgcgtccgtttttagctgccactgtggctgtgagtctctggagccgtttttacttaaaaatgtaccattaaccttgccctcatggctgtcttttccccagcttccttcttccagggggccagagacttaattaaagaccctttacctttctttacacttttggtcattttaatgggaatgtttgaattgggttctgtccagagaagccaagtcaaaaagcagttaactattatctctcaggatcatagtgtgtcagcgagggaatctgagacatcacccatcacagaggttctcaagcctggcggtagagtaaaaccatctggggagtttgaaaaggactagcggttaggcctgactaattcaatagcatctctagaggtggggctcaggcactgatgcttgcaagacctccttgggatgcttatgactaggcatggtggagaaccattcactaatcaaaactcctttatttttgatacgagaccagaagactgactggtggcggccgcctccatcagaagcgtgtttagacccgtgcttgggatagagacagggcctgtgccgggacgccaggaaagaaaaccccccctttttagccgtacggggaaacacgccacggttcagactccccttttggggagaacctaacggaggcctggtctgcttctcgcgccgtc

SEQ ID NO: 88864 - DNA, 1162 bp, Homo sapiens
ctgttccccacggatcagctcatctccaggaaaaaaaccccagagacaaggctgtagtgcctgtgtttaacccagtcaggtcccagacattggtgaagactgaggaagaaacagcccaggccgttgctgcagagaagtggtcacatctgagtctgactcggaggaacctctgtgggaactcagctcaggagacagttatgagcctcagtccgatgactgaagaaattgtaactaaagatagattgtttaaagcaaagcaagaaacttctgaagaaatggaacaaagtggagaagcctcaggaaagcccaacagagagtgtgcaccccagattccttgtagtactcctattgctactgaaaggacagttgcacatttgaacactctgaaggaccgtcacccaggtgatttgtgggcccgcatgcacatctcatccctggaatatgctgcaggagacattacccgaaaagggagaaaaaaagacaaagctcgagtgagtgaactgctccaaggcctctcattctctggtgactcagatgtggaaaaagataatgagcctgagatccagcctgctcaaaagaagttaaaggtatcatgtttcccagaaaagagttggaccaaaagagacattaaacccaattttccaagctggtcagcactggattctggacttttgaatctcaagagcgaaaagttgaacccagtagagctttttgaattattttttgatgatgaaacattcaacttaattgtcaatgaaaccaataattatgcttctcagaaaaatgtcagcttggaagtcacagttcaggaaatgaggtgtgtgtttggtgtcttacttttgagtggatttatgaggcatcctagaagggaaatgtattgggaagtctctgacaccgatcagaacctggttagagatgcaatcagaagggacagatttgaattgattttctcaaacctgcactttgcagataatggccacctagatcaaaaagataagtttacaaagttgagacctctcataaaacaaatgaataaaaatttcctcttgtatgctcccctggaagaatactattgctttgataagtcaatgtgtgaatgctttgatagtgaccaattcctgaatggaaagcctattagaattggctataaaatttggtgtgg

SEQ ID NO: 88865 - DNA, 389 bp, Homo sapiens
  misc_feature (1)...(389): n = a,t,c or g
gactggacctggagcatccttttcttggtggcaggatctacaggtggccactcccaggttcagctggtgcagtctgggtctgaggtgaagcaggttggggcctcagtgaggctgtcctgtcagatgtctggttatagttggaccagatatggaatcagctgggtgcggcaggcccctggacaaggacttgagtggatgggctggatcttcgggcataagggtgacacagcgcttgcacagaaattccagggcagagtcaccctgaccacagacagatccacgagcacagtgtacatcgaattgaggaacctgggatctgacgacacggccgtctattactgtgcgagagatgcgccgagtatatataatggctacggnggcggtgactt

SEQ ID NO: 88866 - DNA, 4260 bp, Homo sapiens; identical to SEQ ID NO: 64642

SEQ ID NO: 88867 - DNA, 1317 bp, Homo sapiens
tatttggacaggaggaggcggcacacccatatgcccaggctatcatcttggtcaaatctttgtagccatcttgaccaaaaaacctttaactttgactccttatgtgtttgaaggagacaaaccgcacaagtgtgagttctgtgacaagtgcttcagccggaaggacaacctgaccatgcacatgcggtgccacaccagtgtgaagccacacaagtgtcacctgtgtgactacgctgccgtggacagcagtagcctcaagaagcacctgcggatccactctgatgagcggccgtacaaatgccagctctgcccctatgccagccgcaactccagccagctcaccgtccacctgcgatctcacacgggggatacccccttccagtgctggctctgtagcgccaagttcaaaatcagctcggacttgaaaaggcacatgatcgtgcactcgggggagaagcctttcaagtgcgagttctgcgacgtccgctgcaccatgaaggcgaatctcaaatcgcacatccgcatcaagcacaccttcaaatgtctgcactgtgccttccagggccgggaccgggctgacctcctggagcacagccggctgcaccaggccgaccacccggagaagtgtccagagtgcagctactcctgctccagcgcggccgccctgcgcgtgcacagcagagtccactgtaaggaccgtcccttcaagtgtgacttctgcagcttcgacacgaagcggcccagcagcctggccaagcacgtcgacaaggtgcacagggacgaggccaagacggagaaccgggcccctctgggcaaggaagggctcagagagggcagctcccagcacgtggccaagatcgtgacgcagagggccttccgctgtgagacctgcggcgcctccttcgtcagggatgactctctgagatgccacaagaagcagcacagtgatcagagtgagaacaagaactcagacttggtcaccttcccaccggaaagcggtgcctcgggacagctcagcaccctggtctccgtggggcagctcgaggctcccctagagcccagccaagacctctagctcagccgaagagggtggtcagctgtcggaacttctgaccagtgctgttgcccagccctccagaggtgaggccactgagagacaggctttgggcaccacttctggggctggccgctccaacttcacaggccttcagaggcgatggctgggcgacagtgacgaaagcaaagcaaagcagggctgtggagacactcctcgcatttgtctcttccctccaaggattatctgagcaagtcgacttg

SEQ ID NO: 88868 - DNA, 537 bp, Homo sapiens
accacccaaagtccctggggtttctctactggacagcctggcagaagaggccagtgccttagagaacagcaggtggggaggtgagggagggcagaagttggagggaccctggcaagggcctggactctgtcctgagtgatggaagaagccctaacccaggcccccaaggcgccaccagccatagcttcccaagcccaccggtgggaagcagaccaacgcatcgtgtgcccagctgcgcactgccagcccctgcctgcccgccccgcagcgagctcaccatctcgtgaaggatgtcattggtcaggaagctgtcctggacgtaggccatctccacatccatggggatgccatagtcactgggcctttgctggcagggacacagaccagtgagagaagcctcaccagcccgcaacccatggcagctggggacaattggcagtgcccgggctgggaacgggagagtgcacaccccggctcagctctgcaccgggatcgggacctggtggtgggaccaaggaggcagtgtagcatccctag

SEQ ID NO: 88869 - DNA, 873 bp, Homo sapiens
  misc_feature (1)...(873): n = a,t,c or g
tttttttttcttcaatctgggaatgttattaagccctagacattattagacagactctgctgggaggagacctacttttcttcccttcagtgggtcttttcctactaaatttccatctctggagccagagggaaaaactatctgtccttaggtttgcacttttttctctttcccttgttaaatgttcaggtaaatataaaaatcataggaacctaaatttgaaaaaaggaaaaaaaaagagagaagaaagtgctgctaacactagagttggagagttatgtagccgtttttaccctgagtctcgtgattccagcccgtgtgatttgctggcagtcatagagttctatccgctcaaggctatgacagctcttcaagtgctccagggatgcatctgtgattagtgggcagttgtccagctcaatcacctccagctggtcatgggcgcaggccccattccccaggtgacgaattccatcatctgtgatcagctcacagtgagacagactctgcagccaaatagagcaaggaaggatgttgaaatatcttctggcattcctctagccagaggcttgtgtgaattggaaaggagacattttggtttgattttgatgaatatggagctggcactagatccacgtggtgaaatttaaaaaactagagatagtggggttatgcttttggcaatcagtgattgatattttggtgtgtgattctaaatatattttataaattcatgtaatgactatgaagtagttcataaacaaaataagacagccttaaaaattaccccttcctcaaattaacacttttcccctcgtgccaagcttggcgtagtcatctaataacgctctcaattnnnnnnncgggggggcg

SEQ ID NO: 88870 - DNA, 3410 bp, Homo sapiens
ttttttttttttgcacaggcaaaaaagtttatctggttgcctctgggtaggataccttttttctttttctctattttatacatcctgacaattatttccaagatgatacatgcctcaaaacaaacaaaacccctcgagacacactccccagcccccagggaaggcatgtgtctgggctgtgtaggggcttccgctctcctgggggtagctctgccacggtctctggggtcttggcatctgtcacagaaccctagtggttacagggctcactgtcccacagccccaggccacacggtgatgtgctgtggcccaggggaggccaccctggactcctggtcaggatctgcccacatgaggaagtgcgccttggggtagggccacaggctggctcagaggtgcccttctctccacagccagtcccaggagggagctgggttctggtttatgcgacgtcagagggacggcagggagtggagggcaagctagaaaagcccaagcttgttgtttcagccattttaatacattcaagaatatttactagaacaacatttaaacgtatcgtcggtccgcagaagcctgggatcgagagaaatagaaacgcgactggcccttttgcagtaaagcttgtgcttgaagggagaagaggcaaagtggcttcttggagacttcgtgccagatgccacaggactgagagcatctccaaatgtcactttaaacacgtgtgaggcatctataggcattcctaaagcccacagtgtccctaaggatccctattagacgaggccaaaagggcaatgctttcttggaaccctctcccttgcagctctgcacgcaaacattccccaagggaggggcccgaggcaagcctctagataggcggggccaagccctccccgtgcccaccctctttccctgttgctgacctcaggcctgatgctggacccatgagactcccagagggaaaacacagatacagcccatccatccatggccaccttcctccagaagatcctggggacccctacccccccatcccatgaggcaccagggctgggctcgcatggccagcaagggataaagttgggaactgcagaccaggggaagccccctcattcttagggcaaaacagcccctgaaggacaaaataaataaaccaaaccatgaccagacagctggatccggacaggtggagtggcctctgtgaaggcaaatgagagcaaaagtgggaactgaggacacctaagtggagagacacttaaaaacagtaattctcacatgaacatcagtggctcatgccaacagcagagctggccatcaacagaggaacagcaacaaaaacacaactcagacagggggcgggacggggccaggagtctgcgggggtctctgatatgctttgtggcatgactttgcttgcctggcctctcctttcttagctgaaaacaggcatttcaccaaagggcatccagccagcggcagcagcctgagctcccaggctgacatctgggcagggctgatgggcagcttctggccatctggtgaccaggtgtgccgccagctgcacccacatgcacagcccctttcctaataaccacattctaggttacgtagacacgttaaactcctattctagaacatcgtgcttgaatgcagacccctcagcccacaatcgggctggctgggcctcctgtgagcccctcattgcatccagtctgtggggcagtgaccccgcttccactggtggctggtcttcctcatggtgctatgcaggtgccaaacacagttatattctcaaaggtacaggtcttgtctggacattgttcaaaccaatagctactgcgttaggcacacgggagatccctattcccaaaaatagctgttgagttctggcctgagagcatctccagtgaccacctttaaataaggctttggttcaaacagcatggacccagcacctggggagggtgggcacagggggcatggacccagtacctggggagggcgggcatggtggtaggagacaactcaaccactgagtcttggaggtcctgccttggccatggagggcagtggctgccctcacaagaagagttaaggcactttctttaactctggcctaggagaattatgtcttagtgactcagtgagtttaaatgacactgcctgggctccctaaagttgtttacttttctcctatttcctgctttattccttgctctcaccatgctaatgtacagatgttgtttagatttctatgcttattgaaaacaatgtaactttggtactaatcagaacaggagcgaccttttccagcattgctcgtaacaaaacaaaaatgttaactagaaaaactccttatgatgaagaaatctaaagccagagctgggactccaaaccccttccaggctggaagacaggtcgctgagtccaggcaaggggcccccgtaactgcttcccgccagaaagcccagccgcgtgagtgcagcagcagcaccccagccctggcgtgcccgcaccacgccctctagatactctcctagctcaggctgaacacgcctggattgtgtcggccggggcagccccgtcaggtgtggggcagctgacccacgtctgtggtgaacatgctcctccaaactaggacggtgaagggcccagggcgctgggaactgccaggcgctgactctccttctgggttctcaccagcaccggaacccaccccagccaatagtcaggaagtgccgcggccgagccttcatcaaccctagtgagtttcccacagaactgaatcccttttcccaaattcagctgtgcatgagccctttttgtttggtgccctggagcactagtgtagttcaatattctcttcagaaggaaaactccagcagccaccggcctgcaggatgtgtgctgagcccacatgacctgaatggacgggtcatgtgggaggggccctggtgggagctgtgggccacacggctgagttcttccaatacggaagccccgagctggaggctcacacgctgtggggcagcccagagttgctggaagctttacaggggtgcgtagctaatggcgtcggtgtcgctcggtcgctgtggaggggtacccccgctattggggcggctcctcccggcatgctcaggtctcaaagtacttgtagatcgccgtcacatacagcatcacgttctgccagtcgggtcgttcagtccgtaccatttcattaatgtccagtgtggatttgatgccgacactttcagctgcctggaaagccagcatgaagttccttctcttatcctggctgttcagttcttgatatggaatgtgggcagggagatatgtatgcaggagggcacagaaggccagcccatcattccagctgctgctgaagtttgtaatgtcaatattctgcc

SEQ ID NO: 88871 - DNA, 1798 bp, Homo sapiens
ttttttttttttaggggggggagcatttattttaatttttgtcttgcagctctttgtagaggacctagcctttctttactgaactgaaggggtttggtcccatcacccgaagactggcccacctgcccacacaggtgggggcacaggaggtctgggaggccccaggaggtggaagttcaaaagccttgcctggccctgtccatcccactggctgaggccaggccggagggccaaccccaggggccctttgtatgcaagccgacccaaacaagggcccagtgcatagttaagacacaaacaccacacagctgtccagagcctccaaagcactgtttatccaggctccatggaaccaagtgcccccagctgcctgccctagtcctcaggggggcactggcaccgcagtggcctcggcctgagaccctcgatgagccccagcctaacctgctccaaagccactgacacatgcatgtttagcccttggcccatcaagatggggccctgggaatgaactggctgcagaccctcctccatcccacacccccaggggctccatcagtcctggctagctcagcaccatgttaaatagcttccttgcaatctcccttaaataaacccatccccagagcaacctacccaccctgcaccctgaatatattatcctattggcttatgccttctagactggaggcgctctctcctcttgccctctactccaggggataccatctccctaaaaaaccaggggaggaagtttttttctcaactctggggcagagacaaagggtggcctgggttggagtggaaaagccaggaatagcttcctctgtcccttccctccccagggtacttccttctccttgccctcttagcagcctgggtcaggcgcgacttacccaaggtcacagacccaggacccagagtcatgacccatgtaggaggttaccctggttttgacagcccaaaccagctccagggcaggaggactgaacttaagcctgcctccaccttggcccctgcagttctccaggctcggagtgagctgagggaggttccagctcttgactccactctgtcccggacccctgggactatctcccaggaccctccacccctggtgtctccaggtctctcttgctctggggatactcagacagcaccgggcatggaagcaatggggcccgggacatgggcaagcctgtccctggcccgatcagcatctgggcccaggccaggcctcacacccagtactggccattcttaagggcagggttgggtgtccggcagaactgcagcagctctgggtcaggctggcctcctggagggggcccctggccaggcacagctgtgagcgggatggcctggcctggctccaccttgcgaaaggtctcggtgtcaccagccaggccgttgcggggcttggcagtcaggacctggacgtcatgcttgcccgtcttgttgcgttttcggaggtagaagagcaggggcaggatgagcgccaggagcagaagtaccaggcacatggggatgatgacgctgaacatgttggcctcaaggaagctcaggaagcctcccttggccacagcgggctcagggctggatgccatggggcctggctcgcctgtgggggtgctgctctctggcttccctgcttccgtccgggcggcctcggggacactgagcagggccacgctgtagggccgggcagcattgtaaggctcagtggcaaagtccagggaggccacagcaggcgggacgccctgtgccccctcgtgccaagctaggcgtaatcgccgag

SEQ ID NO: 88872 - DNA, 991 bp, Homo sapiens
ctcattacgccaagcttggcacgagggttcctccaaggagtggctttgggtcaagaagacaggctggctctcctaaacaaacggctccccacggctgggagaggcagcaggcccttactctggcctgagtcttttgggaggggccctgctgggccttctcctgccacctaccttcctggaccatctgtgcccctgcccacgcagtaccacactccccagactgtggaacgcatctccagtgccatctgggggccagttactgtacctggtccccaggcagagctcttggcctggcagcatccaggcaggtattaagtgcccagtgatggtggcacatgggtggggacggagccacatccaagtctagccctctgattaggaggatgacagtcttggaatttcttggtctctttctcctagggttctcgttctcccagctccagcctttctagtttcgaggcatgaggcaaaccattgctgtgggaatagcagtgaccattggtagggccatggtggccgggagaggaaacctcagggtcaccccagagcctgtggggagacggagggtgagctgttgttggagctgcagaaacgccttgaagggcagcatgggcgatgaggaatgccattgcagcctagaaattcggtttctggaggtttagcctgattttgaagagtatttaagaacagagggctccagaccaggtgtggtggctcacatctgtaatcccagcactttgggaggcagaggtggggggatcgcctgagatcaggagttcgagaccagcctggcccacatggtgaaaccctgtctctactaaaaatacaaaaattagccgggcgtagtgacacacgcctgtaatcccagctgctcgggaggcagaggcaggagaatggcgtgaacccgggaggcggaggttgcagtgagccgagatcacgccactgcactccagcctgggtaacagagcgagactctgtctcaaaaaaaaaa

SEQ ID NO: 88873 - DNA, 435 bp, Homo sapiens
  misc_feature (1)...(435): n = a,t,c or g
atcgagatcctagntagagtggcggaattcgaaaagaaagaaagaaatccccgagggcttggcaccaaagagccctaacgaaggggactctctgacacgtgtccttgctctgtcccagtgagccaagccccccgagaggcccctgctcgtcgggccccatcctcagcgcagtacctggaagaaaagtctgaccagcaaaagaaggaggaggtaggcatgggagagagcagctgtgcggaggtgacagagtcctggctgcacctggccacggccccttagttctccatccccaacccagactgggacagcagccacatgtcacgtccccttcacaccagagcctggtggggagaccttccagagccctaccactgaccatggggcccgggaagtgggggagggcagtgggagccctgccctggccaggccaaaccc

SEQ ID NO: 88874 - DNA, 2090 bp, Homo sapiens
ggaattcagcgcatcagccgaggctatgacttctgccaggtcctgcagtggtttgccgagagggtggacaggatcatcctgctctttgacgctcacaagctggacatctcagatgaattctcagaggccatcaaggccttccggggccaggacgacaagatccgtgtcgtgctgaacaaggccgaccaagtggacacgcagcagctgatgcgggtctacggggccctcatgtggtccctaggcaaggtcatcaacacgcccgaggtactgcgcgtctacattggctccttctgggcgcagcccctgcagaacacggacaaccgccggctcttcgaggctgaggcccaggacctctttagagacatccagagcctcccccagaaggcagcggtgcgcaagctcaacgacctcatcaagcgagcgaggctggccaaggtgcatgcctacatcatcagctacctgaagaaggagatgccaagtgtatttggaaaggaaaacaagaagagagagcttatcagcaggctaccggaaatctacattcagctacagcgagaataccagatttctgcaggggacttccctgaggtcaaggctatgcaggaacagcttgagaactatgacttcaccaaattccactcgctgaagcccaagctgatcgaggcagtggacaacatgctgagcaacaagatctcgcccctcatgaacctcatcagccaggaggagacgagcacgcccacgcagctggtgcagggcggcgccttcgatggcaccaccgagggccccttcaaccagggctacggggagggtgccaaggagggcgccgacgaggaggagtgggtcgtggccaaagacaagcccgtctacgacgagctcttctacactctgtcgcccatcaatggcaagatatcaggtgtcaacgccaagaaggagatggtgacctccaagctgcccaacagcgtcctgggcaagatctggaagctggccgactgcgactgcgacggcatgcttgatgaggaggagttcgcgctggccaagcacctcatcaagatcaagctcgacggctacgagctgcccagcagcctgcccccccacctcgtgcccccctcgcacaggaagtccctgcccaaggccgactgaggggtgggctgcagaacggggtgggaactgggggacctgggcctcaggcctgctccaccactgactcaccgaatgaccttgggcaaggcactgccctctctgtgccttggtttccccatctgtagaatggggagggtggacactggaaactagatgacttctttcacctccaaaattcccttagtttctatgaaaatattgggggtaggggggtggattaggagattgaagggttgagaagaaagagaaattgtccaaagagtcctcagaacctgcctggagaaatgcgcatgggggtgggcctggtaagtcccaggaaccacaggaagtgagctaaggctcacccagagcagctgggtctccaggctgcctgggctttttgtcctcatgaacaactctggagcagctgtctgtccctcagagggcacctggaggcagcaaagattatcttatttattttattttgttttctgctatatttagagtggcaaaaaaatagagcagagggtttctgctgtctccagactgtctaccaaagagaaggcgacagatgcctcctgggtttggaagggggatgcactgtggatctgccatccattctgcagtctccagcagagcaggcagtcaggccccagcgtgcctccatcccagtgccccgatgaccatctggtcagccctcccaacctcccttccagggggcttaccagcaaagccatattcggctaggaatttggaattcacaacctttattaacccctggcaaaacttcccgtttgcatgtcaaatcacattgaagcctgaagattagcttttcttactggtttttccaataagtaatagcaaagcccacttatcatacttaaactacagtaaagaaaagaggtggttctctgcagtgatcgtttagtgtggccctcaaacattaaatatccccaggtctccttggtgggtgg

SEQ ID NO: 88875 - DNA, 457 bp, Homo sapiens
ctttcgtagatccctagtcagtgtggtggaattcaaaagtaactctttttttgaaggcgttgactgggaacatatcagagagagacctgctgcaatatctattgaaatcaaaagcattgatgatacctcaaacttcgatgagtttccagaatctgatattcttaagccaacaggtaacaccaccagcattgtctcctgctgccttataagcacattatttacccccaattttgggatgatgtttacaaatcagggtagtgaacatggagaggaatttcatttcttcaggttctttgtaagtacttttctaattctaatgctgggtagtggtgaaaccttggtgaatggaaaatgagtatcagctcccatgtttagactgctcaactgggtgagtaagtcacaaaaatctgttcttttgttatttactaagtgttaggtaatctgaaatgacaggaat

SEQ ID NO: 88876 - DNA, 1086 bp, Homo sapiens
cgttgctgtcgctcctttgtggcccctctgcaagagaaggtggtctttggattatttttcttaggagccattctctgcctttctttttcatggctcttccacacagtctactgccactcagagggggtctctcggctcttctctaaactggattactctggtattgctcttctgattatgggaagttttgttccttggctttattattctttctactgtaatccacaaccttgcttcatctacttgattgtcatctgtgtgctgggcattgcagccattatagtctcccagtgggacatgtttgccacccctcagtatcggggagtaagagcaggagtgtttttgggcctaggcctgagtggaatcattcctaccttgcactatgtcatctcggaggggttccttaaggccgccaccatagggcagataggctggttgatgctgatggccagcctctacatcacaggagctgccctgtatgctgcccggatccccgaacgctttttccctggcaaatgtgacatctggtttcactctcatcagctgtttcatatctttgtggttgctggagcttttgttcacttccatggtgtctcaaacctccaggagtttcgtttcatgatcggcgggggctgcagtgaagaggatgcactgtgatacctaccagtctccagggactatgaccctaaaccagggcctgcggcacttgcggggcctccctgctggctactgaatgccagtaaccagaggagccccaaaactttgacagcctcgtgggctttgtgacggcccaggggctctgcgtggtacatgactgagaagagaaaaacaaaaataaatcatacctcaaaggatggagtgcatcaattgggagaaaaggagacatagcccaaaccctggcttattcttgggatctactgattgcgggctctgcaagacccttggcaaactggcttctgatccatatcatatttatttgtagaagatggcgaaacagtttagctggtggttctttcttctccctttctctctctctatgacaataatacaaaccaatttaataaaggagttgaaagaaaaaaaaaa

SEQ ID NO: 88877 - DNA, 1828 bp, Homo sapiens
caactataagactttgattattatctgcgcactcttcactttggtcacagtacttttgtggaataagtgttccagtgacaaagcaatccagtttccacggcgttcgagtagtggcttcagagtggatgggtttgaaaaaagagcagcagcatctgagagtaacaactatatgaaccacgtggccaaacaacagtctgaggaagcattccctcaggaacagcagaaagcaccccctgttgttgggggcttcaatagcaatgtgggaagtaaggtgttagggctcaaatatgaagaaattgactgtctcataaatgatgaacacacaattaaagggagacgagaggggaacgaagtctttcttccattcacttgggttgagaaatattttgatgtttatggaaaggtggttcagtatgatggctatgatcggtttgaattctctcatagctattccaaagtctatgcacagagagccccctatcaccccgatggtgtgtttatgtcttttgaaggctacaatgtggaagtccgagacagagtcaagtgcataagtggggttgaaggtgtgccattatctacacaatggggacctcaaggctatttctatccaatccagattgcacagtatggattaagtcattacagcaagaatctaactgagaaacctcctcacatagaggtatatgaaacagcagaagacagagacaaaaacaagcctaatgactggactgtgccaaagggctgctttatggcgaatgtggctgataagtctagattcaccaatgtcaaacagtttattgcaccagaaaccagtgaaggtgtatccttgcaactgggaaacacaaaagattttattatttcatttgacctcaagttcttgacaaatggaagtgtgtccgtggttctagagaccacagaaaagaatcagctcttcactatacattatgtctcaaatgctcagctaattgcttttaaagaaagagatatatactatggcattgggcccagaacttcatggagcacagttaccagggacctggtcactgacctcaggaaaggagtgggtctttcaaacacaaaagctgtcaagccaaccaaaataatgcccaagaaggtggttaggttgattgcaaaaggtaagggattcctcgacaacattaccatctctaccacagcccacatggctgcattttttgctgctagtgattggctagtaaggaaccaggatgagaaaggtggctggccaattatggtgacccgtaagttaggggaagggttcaagtctttagagccaggatggtattctgccatggcccaagggcaagccatttctacattagtcagggcctatctgttaacaaaagaccatatattcctcaattcagctttaagggcaacagccccttataagtttctatctgagcagcatggagttaaagctgtgtttatgaataaacatgactggtatgaagaatatccaaccacacctagctcttttgttttaaatggctttatgtattctttaattgggctgtatgacttaaaagaaactgcaggggaaaaactcggaaaagaagcaaggtccttgtatgagcgtggcatggaatctcttaaagccatgctgcccttgtatgacactggctcaggaaccatctatgacctccgtcacttcatgcttggcatcgctcctaacctggctcgctgggactatcataccacccacatcaatcagttgcagctactcagtaccattgatgagtccccaatcttcaaagaatttgtcaagaggtggaaaagctaccttaaaggcagcagggcaaagcacaac

SEQ ID NO: 88878 - DNA, 471 bp, Homo sapiens
  misc_feature (1)...(471): n = a,t,c or g
cgtccgccttgacctggggcgtgcgcaangncncnaannnctagggctggagagttgtttttttgggtgnnnctccatgggtgccttcttttttttctaagaaccttttctaaatttatttatttgggtctatttagcattggatttggggtctactacagattctgggattccaagaaagtgctttaaatattgggatatttttactaatttaaagacctgtttcccataggagctcagtctgaatattcttggagaaagatgctgagtggcattgcagccttcctatttgggctaatcttccttctggtgggaatcgtcatccagctaagggctcagaaaggtaatgagcctgtgaggagtgccctgccacctgtcccagacctttcccactcccaccttccctaacgtcaatgatctgaagcaaagaaagctgattgtgcctctcatggatcacccgggataattttn

SEQ ID NO: 88879 - DNA, 474 bp, Homo sapiens
atcacttggatgcccatggggcttggctcccagagctgcccagcttgcccccaaatggagaccctccggccatctgtgagatatcgcccttggtgtcttactctggagagggtttagaagtgtacctgcaaggccgggagttccagtccccgctcatcctggatgaagaccaggccagggagccgcagctgcaggagtcctgacccgcccagactgcccccagactcccccgagacctgccagccccggcatcctggaagtcccgactccccccagacctgccagccccggcgtcctggagctgggggctacagcccagcctgagctctgggtgggaaagcagcctgccccatgcttccagcctgcagaacacagaatgaaacatgctggtagactccacgagggcagggcctctcctgtcgcctctggacacaagtggcgacagcctgctgggggctctgtggctccattcct

SEQ ID NO: 88880 - DNA, 5662 bp, Homo sapiens; identical to SEQ ID NO: 63816

SEQ ID NO: 88881 - DNA, 1861 bp, Homo sapiens
tgcagagctttgatgtcctgggactcagtgacttgatgtatatactggaaacagttctcaatctgaggaaggtcagttgaagtccttactgtacaagtccaaattttaaggaaaatgagtcccgcaatgagtttcctcatgcttcgcctgtgcgtggaccagtcagcttctgggtgtgactggagcagggcttgtctccttcttcagagtcactttgcaggggttggcaaagccgctcccatccacgtacagctcccagtctactgatgtttaagggtggtctcggaggttaggccaagtttcagatgtccggactccaagtgccagttccttcccagtgttcagccagtgtgttaatcctccacgggggcctgctacgcgctgctctggcaaggcgttccactggggcaatttcctacccgggagtgctctttggatcctgtcactcaggctggccggagtcccccgcagggatgctccacagggcaggcctaagccgcctaaggggctgcctcggctgtccatcagttacctcgtttcctgttcagggaaccaagaaatgtagcaggacgagccccagacaaaacctctcagacaccgagttgtagaaggaagggctttattcagctgggagcatcggcaagctactgccttaaaatccgagctccccaagtgcacaatttctgtcccttttaagggctcacaacactaaagatttcacatgaaagggtcgtcattgatttgagcaagcaggcggtacgtgacaggggctgcatgcaccggcggtcagagagaaacagaacacggcagggagtttcacaaatgttcttctatacaatgtctggaatctatgaataacatcggtttctaagttatgaattgattttcaactactgggtttaggccaggcaggcgcaggcctggtttcgggcctagcgccaggctgcctgcctgtctttggttttacttccttgttgttttttcttaaaacaggtactgagtataaaacactatgagagggtctctcttccctcattgccacaactcattctttgttgaagtatggagaaggctggagctgcagggtcagtgggccctcctgggagctgggggccatccctggtccagccaaggcctgtgactgcagctcaagccacatcccctactttctcccatcccctcctccggaagcctcttccctgatgtcccctccaggcaggcagcctcagccagagagcctggaaatcactggggcggtggagcctggagcctgctgtctggctcagcccgtggactctatgccctcacactccttctccccccctccaagttcaggcagcgcctggggcaggtccccctcaggcatctgggccacctcggcccactgcgtccgcaaaagtggggctggcccctcggctcaacaaaaagccccacggtagggcccatgccctcgctctgcaagcccaggtgtaggggggtctttcggagccagccggtagcatccacctgggcacccctgtccagcaggcagccggcaacctccacgtggccttcccgagaggcgtgatgcaggggtgtgaggcccagggtgtcccgcgcatccacctcggccccctgggtgaccagcaactggacggcaagcaggtgtcctcgggcggcagccctgtgcagcgcagagcggccatgcctgtccctgatgcctgggtctgccccgtggcccagcagcacctcaatgtcccaagggagctggctcaggagctttctgctctggctgagggtcctctgtagacgggttctggccgaggctcagcctggtgaccctctacacaaaatcccttctgcaggctttggggtggagtgt

SEQ ID NO: 88882 - DNA, 1038 bp, Homo sapiens
tttcgtccggccttccaaggcccggcagcctcagtccactgctgggcctggaacacggagcagtggctgccctgcgaggaggtcctagagcagctccagcaggatggcggctccagcgtctctaaggcctgcagggggtccagccccatggggggcgccctaggcctccgacagctccccatctgtgctcctgcctgccggccatcctcaggccactcgccatgggcggctgcttctccaaacccaaaccagtggagctcaagatcgaggtggtgctgcctgagaaggagcgaggcaaggaggagctgtcggccagtgggaagggcagcccccgggcctaccagggcaatggcacggcccgccacttccacacggaggagcgcctgtccacccctcacccctaccccagccctcaggattgcgtggaggctgctgtctgccacgtcaaggacctcgagaatggccagatgcgggaagtggagctgggctgggggaaggtgttgctggtgaaggacaatggggagttccacgccctgggccataagtgtccgcactacggcgcacccctggtgaaaggcgttctgtcccgtggtcgggtgcgctgcccctggcacggcgcctgcttcaacatcagcactggggacctggaggacttccctggcctggacagtctacacaagttccaggtgaagattgagaaggagaaggtgtacgtccgggccagcaagcaggccctacagctgcagcgaaggaccaaggtgatggccaagtgtatctctccaagtgctgggtacagcagtagcaccaatgtgctcattgtgggtgcaggtgcagctggcctggtgtgtgcagagacactgcggcaggagggcttctccgaccggatcgtcctgtgcacgctagaccggcaccttccctacgaccgtcccaagctcagcaagtccctggacacacagcctgagcagctggccctgaggcccaaggagtttttccgagcctatggcatcgaggtgctcaccgaggctcaggtggtcacag

SEQ ID NO: 88883 - DNA, 4235 bp, Homo sapiens
tttgaacactgcaaaaggcttttattttataggcaccactgcaaaatgaggaatcacatcaaaacatatcaaatagaaaataataatttattttaacttcattttactgtttgtaactaatcatgattttgtgaacttgcctgtataagtctgtaccttcaaatctacaaagcaaaagtttactacaatgagcacttaaaattccacaaaccgtctccatccacaactttcctgtacatgcaaattctttcagtgggctgcaatatttgcaaacatgctttaaacttccataaagatgcaagatattttgctttctgctaaaacctttacactctcttgggaaccttaaccaggaaaatgtttaaatgtatatcccaactctaaacgctgccggtttggttatatgtattaaatcgttaaccaccgggttgggtggttttgagttgaaaccttcacctaaatgataatatcttaacggtcacgcatatgaaacacattcagtaacgtaccattataaaatagggttccattaaaaatacatactggcagttgtatttgtgttttaggcaggaaaaaaagcgtgtttaacttttttatatgaatatagtttaaacaagttattctgtgaaagtatgcttaataaaagatctttctgaaatttaaacactttatgtaaaagggtacaggtagaaaagtacaattgctatttgaaaaaagctctgtttgttaatattgccttccaagatagtaagggtgtttttctctctcttcccttaaaatagacctatgacacccagagttgtagggtttgcaaatttggactataaacatgaagaccgtacttatcttatatacaaaaacttgccgcattgaacgaggcaggaatttctaccccagtggtagtggtctcctttatgtacataatgcagaagtgaaaattatacagtagtcaccgataggaaggaattgtatactctagtgccgtccggggattttgtgccgtgggttaagagttcttggatcgtcatccagttatcgaagattttcttattcctcttcttcatcatctttttgtggctcagttcgagaatgttcatctccttcctgtcatcggctgcttgctgctccttgagacaatccaacctgctctgcatcatgaactcgcgccgccgccgctgctccttggccttcaccaggtgctgcttcctctcctccttgctccagtagcgccccatcttcatctcgctcaccgcgtcgtcgtcggtggtcatgccgctgcgctcttcccggatcttcagggcgcgctcccgcagcaggcggtcccgcacgggcctcttggtgatgtagcgcgtcccgtcgctgcggatcttcaccttccactccatgcgcggctccgacggggtgggagagctcaggtccttgcacatgctcaccaggctcatctggctttgcgcgtactccacggccgacttctgctggatcagctgcatgtagctctggtagtgctgggcgtgcgccgggatgtgcgcgtgcttgtatggggagtggtgataggagggcaggtaggcgctgcccagcttctggctgggcgtggggctccggctcccgtcgctggctctccgctctttgctttccaggggctggttggggtccagctccttcagggacgggctataggtaggggtgcccacttcgggatcttccgtgatggagagcagattcttggaggctggcccgtaggcttccgtggtccccacagccccttcgctgctcgggcagctgatgccctccgccgctctcctcaaggagttgtcgggggagatctccagggtgagcggggtgctgcggcagctctcgcctgtgttgtaggcgctcgagctgtccttgtcggatttctccgggagctcggtgatatctgagagctcgtgtctgcgcacgtcgatgctggtgttgtagttgcggaagccgctgttgtgcagcatccaggactcgcggtactgctccttgagctgctgcatcttgtgggcgcgcacgatgctcaggcactccagctcgatgctgcgcagctcttcgttcagcagctccagctccttgtccacgctctcagggtcactcttgccggcgtccagggggccgctagggtagtacaggccgtaaggggtggcgctcttcacctggcacttgagctccaggagctcgcggaagcgctcgcactcgtccaccgggatccccaggtagtcggcgtccgtgcagtcggccgaaatgaaagactcgttgctgaagggcaggtcgccgctgcccaaggtgtcctggctgcaggtgagcttcctctgccccgccagcgggttggaggatgcggtggcgtcgtcgccattgttctcttgctccgagctctcgtcattacgggtgctctcgtcggtccgccccacaccgctgtccttctcgtgctggttggacaagatggtggctgtatctgtggtcccaccgtcttcgtcgtgcttcttctgctgcagcacgctagctgtgaattgcatggcctggtggtgctgctcctccagcatgtccatgtgcaggtcatccagaaagtcgttcctgtcatcatccatccagccctcatccagctggagttcagcccttgcaatcagcaatgaaaagtttttattttcttcactggttagaagagccacagcctcttcacggttctgcacctctatcccattaatctggataatgcggtctccttctcggatgcgcccatccttggctgcaatgctgttagggtcaatctcactgatataaatcccaatgtcgtcttcatcgtccgtccggtagcacacagtgaggcccagcttgtcctggctgttcattctgtagaggtccacttcctccagctccagctcctccctgtccatctcctgatggatgtctccaatgtagtcatttggatcgtagtattcatgggctgagggatgctcctctggcaagagatagggatccagcacgggtgggctgggagaggacatcttagtgagggccatgatatgttcaaaggtgatgtcggtttgggttcccgtgtccaccagctgagactctgatggaggcgtgaacattttggtccttggtgttcttctcaacacctgcaccactatgggctccttggctgtcttgaaagcttccacagcctggtcatgagttgctctggataagtctctgccgttgacctcaataatcctgtcatgaatttgcaggcctccttccttggctgcaggcccactgtcaactatcttggatacaaagattccttcactggatgatccatcgtggttatccacactcggccggccaccaataatattgaatcccagggagccggagtcccgatgcaggacaagagtcagacttttggtttcttcgcccttgccgccgggcggcgcggccacgcagcggctgagcgagtcgaggcgcgcgctgtattcggtgaatttcttctggtagcgcagcgcggtcatctgcagctcaagctgcgccgcggccagctgggccaccagcgacttctcgcgcttcccagcgcgcagcgcctccttcttgagcgccttgtgcagcgcgcccaggcgggcctggagcgcgccgttgtgcgcccgcagcgctcgcgcgcagcagtggccgcccgcgcgctgctcgccgtgcgtcaagggtagcccgcagccctcctggcagcggcccactggccgcgcgtcgcacgcgtcgcgcatgtgcgcctccacgtcgcgccgcagcagcacctggccgcaacccgcgtggcgacagcgcgcgggcgcgaagtcgcagcgctcgaggtgctccggcagctgctgcagcttgaccacccggccgcagccgcgcgtcgcgtacgcgcacttgatgtccagcttgaggataaggcgcttgagcggcaggacgtggttgagctctttggccgacaggcgaccgcggcagcgcgccgggcagctgccctcctgcaccacccagggcagcacgcagccggcgcagaagacgtggccgcacggcgtggtcagcgggtcctccaggaccttgtggcacagcgcgcacttcaggtccgggtccacgtcgccgtcgaagcggtccagctcgaagcccatggtggcggccaggccccggggtcgccgccgggcggccgggcgccccctccctccccacgaggcggcccagacaggccggctacgccgcccgcgcgc

SEQ ID NO: 88884 - DNA, 2575 bp, Homo sapiens
  misc_feature (1)...(2575): n = a,t,c or g
cagacggtgagtgaggggctcaagaaactctacaagagcaagctgctgcccttggaagagcattaccgcttccacgagttccactcgcccgccctggaggatgccgacttcgacaacaagcccatggttctgctggtgggccagtactccactgggaagaccaccttcatcaggtacctgctggaacaggacttcccaggcatgaggattgggcctgagcccaccacagactccttcattgcggtgatgcagggagacatggaggggatcatccctgggaacgccctggtggtggatcccaagaaacccttcaggaaactcaacgcctttggcaacgccttcttgaacaggttcgtgtgtgcccagctacctaaccctgtgctggagagcatcagcgtcatcgacacaccagggatcctctctggggagaagcagaggatcagccgggggtatgactttgcagctgtccttgagtggtttgccgagcgggttgaccgcatcattctgctctttgatgcccacaaactggacatctctgatgagttctcagaagtcatcaaagccctcaagaaccacgaggacaagatgcgagtggtgctgaacaaagctgaccagatcgagacgcagcagctgatgcgggtgtacggggccctcatgtggtccttggggaagatcgtgaacaccccagaggtgatccgggtctacatcggctccttctggtcccaccccctcctcatccctgacaaccggaagctctttgaggctgaggaacaggacctattcagggacatccagagtctgccccgaaatgctgccctgcgcaagctcaacgacctcatcaaaagggccaggctggccaaggtccacgcctacatcatcagctctctgaagaaggagatgccctcggtgttcgggaaggacaacaagaagaaggagctggtcaacaacctggccgagatctatggccggatcgagcgggagcaccagatctcacctggggacttccccaatctgaagaggatgcaggaccagctgcaggcccaggactttagcaagttccagccgctgaagagcaagctgctggaggtagtggacgacatgctggcccatgacattgcccagctcatggtgctagtgcgccaggaggagtcacagcggcccatccagatggtgaagggcggagcgttcgagggcaccctgcacggcccctttgggcatggctatggggagggggctggagaaggtatcgatgatgctgagtgggtggtggccagggacaagcccatgtacgacgagatcttctacaccctgtcaccggtggatggcaagatcacaggcgctaatgccaagaaggagatggtgcgctccaagctgcccaacagtgtgctgggcaagatctggaagctggccgacattgacaaggatggcatgctggacgacgacgagtttgcactggccaaccacctcatcaaagtcaagctggaggggcacgagctgcccaacgagctgcctgcccacctcctgcccccgtccaagaggaaagttgccgagtgatggggtggggggacattcagacgggcagtgttagaggaggagatgggagcggtgactacacacacacacacacacacacacacacacacacaaacatgcacacacacatatgcatatcttgacattgctctgtaggagagagaggaccatgacgcccacgtttgcagctgatacttgtttgggcacacctccaagttctcgggattagaaggacaagagcactcccaggccccagagtctaagcctaagtctctatcgctcttcccctctcctcggccactccccagataccagacctgaggcaattcacttgccagcacagatggccaacccacctccagattccccagtgcttccacacccgggctctgagcaaatggaaaagacttttcatttagtagacaattcacttctttttctgtgcttcccctatctgctttggcttcctaataagaaatccattcaagagctaggagatctgagggcaggcgggcagctgcagggaggagaggtgagaaaggaagcgtcttctagagacattggcccaggagctctgttctttcctaatctaagcctctgtcttcttcggcaaaccttgctttgaactctgccagtatttcattttaaagaatcccagagcgggagagagaagagaaaaaaattgataagagtgaggaaattgtcctgtagtctattgaaaaccagtcaaggtggttttagttcatagattttgttagatgttctttccacctggcctatgatgtttagatgttcatacttgactcacatttacccagcccctcctgcgtaccaggagctgtgttaggcactttatatacattattctatgtggccctcactgatgccccagggaagtatgcattagccttcccattttgcagttgaggaggcttgagtaagcctcaagaagggtttaaggcgaccttctgaaactcacagaagtcaccgtgatgggagaagaggantccaagccagggnctcagaccctcacacacttgtc

SEQ ID NO: 88885 - DNA, 15164 bp, Homo sapiens
tttcgtggacgcgaccgccgcagcctctgcggagccgggctcgggtcgccggagccgcgccccaccccgccagctccagagccacgtacggactaatggctgaaggataaatcaacatggcaactatgattccaccagtgaagctgaaatggcttgaacacttgaacagctcctggattacagaggacagtgaatctattgctacaagagagggagttgctgttctgtattctaaactggttagcaataaggaagtagtacctttgccccaacaagttttatgcctcaaaggaccacagttgccagactttgaacgtgagtctctttcaagtgatgagcaggaccactatttggatgcccttcttagcagccagctagcattggcaaagatggtatgttcagattccccatttgccggggcacttagaaaacgactgcttgtactccagcgtgtcttttatgcactttctaataaataccatgacaaaggcaaggtgaagcagcagcagcattctccggagagcagttctggttcagcagatgtccattctgttagtgaacgcccccggtcaagcactgatgcacttatagaaatgggtgttcgaactggtctaagtttattatttgcgcttctaagacaaagttggatgatgcctgtgtcaggacctggtctcagtctttgcaacgatgtcattcatactgcaattgaagttgtgagctctttgccaccattatcattagcaaatgaaagcaagattcctcctatgggcttggactgcttatcgcaagtaacaacatttcttaaaggagtcactattcctaattctggggcagacactttaggtcgtagattagcttctgagttgctgcttggtttggcagctcaacgaggctcattgcgatatcttcttgaatggatagaaatggctttgggggcttcggcagttgtacacaccatggagaaaggcaaactactctcaagccaggaaggaatgatcagctttgactgctttatgaccatattaatgcagatgaggcgttctttgggttcatctgctgatcggagtcagtggagagaaccaaccagaacatcggatggcttgtgctccctttacgaggcagcattatgtctctttgaagaggtttgcagaatggcttctgattattcgagaacatgtgctagcccagatagcattcagactggtgatgctcccattgtctccgaaacctgtgaggtttatgtttgggggagcaatagcagccatcagttggtagaaggtacacaggagaaaatactgcaacccaaactggctcctagtttctctgatgcacagaccattgaagctggacagtactgcacttttgtcatttctacggatggctcagttagagcttgcgggaaaggcagctatgggagactgggccttggagactccaataatcagtcaactttaaaaaagttaacattcgagcctcacagatccattaaaaaggtttcatcttctaaaggatctgatggtcacactttagcctttacgacagaaggagaagtcttcagttggggagatggtgattatgggaaactggggcatggaaatagttcaacacagaaatatcccaagcttattcagggacctctacaaggaaaggtagttgtttgtgtgtcagctggatacagacatagtgctgctgtcacagaggatggggaattatacacatggggtgaaggagactttggaagattaggtcatggtgacagcaatagtcgtaacattccaacattagtaaaagacatcagcaatgtaggagaggtttcttgtggcagttcacatactattgctctgtctaaagatgggagaactgtatggtcttttggaggaggagacaatggtaaacttggtcatggtgataccaacagagtgtataaacctaaagttattgaagctttacaaggaatgttcattcgcaaagtttgtgctgggagccagtcttcacttgctttgacatcaacagggcaggtctatgcttggggctgtggagcttgtctaggttgtggttcttcagaagctactgctttgagacccaagcttattgaagaactggctgccacaagaatagttgatgtttctattggagacagtcattgtttggctctttctcatgataatgaagtttatgcctggggcaataactcaatggggcaatgtggtcagggaaattccacaggtcctattactaaaccaaagaaagtgagtggcttagatggcatagctattcagcagatttcggctggaacatcacatagtctggcatggactgctcttcctagggacagacaagttgttgcatggcaccgaccttattgtgtagatcttgaagagagtaccttctcacacctgcgttcttttcttgagagatactgtgataaaataaacagtgagattcccccactccctttcccttcatcaagagaacaccacagttttctcaagctgtgcctgaagctactttcaaatcaccttgctcttgcacttgcgggaggggtagctaccagcattctcgggaggcaggcaggtccacttcgaaatttgctcttcagactgatggactcaactgtcccagatgaaatccaagaggtggtaattgaaactttatcagtgggagcaaccatgctgttacctccattacgagaacggatggaattacttcattctcttttacctcaaggacctgatagatgggaaagcttatctaaaggacagagaatgcaactggatatcatcctgacaagtttgcaagatcatacccacgtagcctccctacttggctatagttcaccctctgatgctgctgacctatcttctgtgtgtactggctacggaaatctgtcagatcaaccttacggcactcagagctgccatccagatacccacctggctgaaattttgatgaagaccctcttaagaaatttaggattttatacagatcaagcatttggagagctagaaaagaatagtgataaatttctacttggaacatcatcatcagaaaacagtcagcctgctcatcttcatgaactgctatgttcactacagaaacagctgctggcattttgccatatcaataacattagtgagaactcaagcagtgtggcattgcttcataaacatcttcagcttttgttgcctcatgccacagatatttattcacgttctgcaaatttgctcaaagaaagtccttggaatggcagtgttggagaaaaattaagagatgtgatatacgtctcagctgctggcagtatgctctgccagattgttaactccctgctgttactccctgtgtcagtggctcggcctttattgagttacctcctcgacttgttgccacctcttgattgccttaatagactcctgccagctgctgatcttttagaagaccaggagttacagtggcctcttcatggagggccagaactaattgatcctgctggtctgccattacctcagccagctcagtcctgggtatggcttgtggatctagaaagaacaattgctctccttattgggcggtgtcttggtggcatgcttcagggctcccctgtgtctccagaggaacaggacactgcatattggatgaaaacgccactgttcagtgacggtgtagaaatggacactcctcaattggataaatgtatgagttgcctgttagaagtagcactttctggaaatgaagaacagaagccttttgattataaattgcggcctgaaattgctgtctatgtagacttggcattgggttgttctaaagagcctgcccgaagcctttggatcagcatgcaggactatgctgttagtaaagattgggacagtgcaactttaagtaatgagtcactcttggacactgtgtctagatttgttcttgcagctcttctgaaacacacaaatttacttagtcaagcatgtggagaaagccgatatcaacctggtaaacacttatcagaagtgtaccgttgtgtatacaaagttcgaagtcgtttacttgcttgcaagaaccttgaacttattcaaacaaggtcatcatcacgggacagatggatatcagaaaaccaggactctgcagatgttgatcctcaggagcattcatttactcgaactattgatgaagaagctgaaatggaagaacaggctgagagagaccgggaagaggggcatccggagccagaggatgaagaggaggaacgggaacatgaagtgatgacagctggcaaaatctttcagtgtttcctctcagcccgtgaagtagctcgtagccgagaccgagatagaatgaacagtggggcagggtctggggctcgagctgatgatccacctcctcagtctcagcaagagcgaagggtcagcacagaccttcctgagggtcaggatgtgtacactgctgcatgcaactccgtgatccatcggtgtgccctgttaatattaggagtaagtcctgtgatagatgagcttcagaagcgaagagaagaaggacagttgcagcaaccttcaacaagtgcctctgaagggggtggacttatgaccaggagtgaaagtcttactgcagagagccggctagtccacacaagcccaaattatagactgatcaaatcgaggagtgaatctgatttgtctcagcctgaatcagatgaagagggttacgcactgagtggcagacaaaatgttgatttggatttggcagcatctcacagaaagagaggtcctatgcacagtcaattggaatccctgagtgactcttgggctcgcctgaaacatagcagagactggttatgcaactcctcctattcctttgagtcagattttgatcttaccaagtctttgggagttcacactttgattgaaaatgttgtaagctttgtgagtggagatgtggggaatgccccaggttttaaagagccagaggaaagtatgtctacaagtccccaggcctccatcattgcaatggaacagcagcagttaagggcagaacttcgtttagaggcacttcatcagatcctcgttctattgtctgggatggaagaaaaaggtagcatctcactggcaggaagcagattgagttcaggcttccagtcctccacactactcacgtctgtgaggctgcagttcctagcagggtgttttggtttaggcactgttggacacacaggagccaagggagagagtggccgattgcatcactatcaggatgggatcagagcagctaagagaaatattcagattgaaatccaggtagctgtgcataaaatttatcaacagttgtctgctaccctggaaagagccctgcaagcaaacaagcatcacattgaagcccagcaacgtctgcttctggttacagtttttgccctaagtgttcattatcaaccagtagatgtttctttggcaatttccactggtctgctaaacgtattgtcacagttgtgtggtacagacaccatgctaggacagcccctgcagttgttgccaaagacgggtgtttcccagcttagcacagctttgaaagtggccagtacaaggttgctccagattctagccatcactactgggacctatgctgataaactgagtcccaaagtagttcaatccttgttggatctactctgtagtcagttgaagaatttattgtcccaaactggtgtactacatatggcctctttcggagaaggggagcaagaagacggtgaagaagaagaaaaaaaagttgactccagtggagaaactgagaagaaagatttcagagctgctcttaggaaacaacatgcagccgaactccatctaggggattttttagtttttcttcgcagagttgtatcttcaaaagcaattcaatcaaaaatggcttccccaaagtggaccgaagtgcttctaaatatagcatctcagaaatgttcttcaggtatccctctggttggtaacttaagaacaaggctccttgcacttcatgtccttgaagctgtgctgccagcttgtgaatctggtgtagaagatgatcaaatggcccagattgttgagcgcttattttcccttctctctgattgtatgtgggagacacccattgctcaggccaaacatgctattcagataaaggaaaaagaacaagaaataaaactacagaagcagggcgagttggaagaagaagatgagaatcttcctatccaagaagtatcctttgacccggagaaagctcagtgttgcctagtggagaatggacagattttaactcacggcagtggagggaaaggatatggattggcatctacaggagtaacttctgggtgctatcagtggaagttttatattgtgaaggaaaacagaggtaatgaaggcacgtgtgttggagtttctcgctggccagtacatgactttaatcaccgcactacctcggatatgtggctctatagggcctacagtggtaacctctatcacaatggagaacagactctcacattgtccagctttactcaaggagatttcattacctgtgtgttagacatggaagccaggaccatttcttttgggaaaaatggagaggaacccaaattagcttttgaagatgtggatgcagcagagttgtacccatgtgtgatgttctatagtagcaatccaggggaaaaggtgaaaatttgtgatatgcagatgcgtggcacaccccgagacttacttccaggagaccctatttgtagtccagtagcagcagtgctggctgaggccactattcagctcgtccgtatccttcaccgaacagaccgttggacttactgcattaacaaaaaaatgatggaaaggcttcacaaaattaagatatgtattaaagagtcaggtcagaagctaaagaaaagccgctcggttcagagccgagaggaaaatgaaatgagagaggagaaggagagcaaagaggaagagaaaggtaaacatactaggcatggcctcgctgacctctcagagctgcagctgaggactctttgcatagaggtgtggcccgtgctggctgtgataggaggagttgatgctggtcttagagttggaggtcggtgtgttcacaagcaaactgggcgccatgccacgctgctgggagtggtcaaagagggcagcacgtctgccaaggtccaatgggatgaagcagaaattactatcagcttcccaactttttggtcgcctagtgatactccattgtataatctggaaccctgtgaaccattgccgtttgatgtggcgcgattccgaggcctgacggcttctgtgctgctggacctaacatatctcactggcgttcatgaagacatgggcaaacagagcaccaaacgacatgaaaagaaacaccgacatgaatccgaggagaaaggggatgttgagcagaaacctgagagtgaatccgctttagatatgcgaacaggcctaacatctgatgacgtcaaaagtcagagtaccacaagctccaaatcagaaaatgaaatcgcttcattttctttagatccaacactgccaagtgtggaatcccaacatcaaataacagaagggaaaagaaaaaatcatgaacacatgtccaaaaaccatgatgtagcccagtcagaaatcagagcagtccagctgtcctatctttacctcggtgctatgaagtcacttagtgcccttcttggctgtagtaaatatgctgagctgttgctgataccaaaagttctggctgaaaatggccacaactcagactgtgcaagttctccagttgttcatgaagacgtggagatgcgagcagccctgcagttcttgatgcgacacatggtgaagcgagcagtcatgcggtcacccataaagagagcattgggattagctgatctggaacgagcgcaagccatgatctataaattagtggttcatgggcttttggaagaccagtttgggggcaaaattaagcaagagattgatcaacaagctgaagaaagtgaccctgcccagcaggcacagacaccagttactactagcccatcagcctcaagcacgacctcctttatgagcagctctctggaggacaccacaactgccaccactccagtcactgacacagaaacagtgcctgcatccgagtccccgggagtgatgcctcttagtcttctcaggcaaatgttctctagttacccaactaccactgtacttcccacacgtcgggcacagactcctccaatatcttcgttaccaacctctccttctgatgaagtaggaaggaggcaaagtttaacttctcctgattcccagtcagcaaggccagctaaccgcacagccttgtcagacccaagcagtagactttcaacttctcctcctcctccagcaattgcagttcccttgctggaaatggggttctctcttcggcagattgccaaagccatggaagctacaggtgctaggggagaggctgatgcccagaatatcactgtccttgccatgtggatgatagagcaccctgggcatgaggatgaagaggagccccagtcgggcagcacagcagactctaggcctggagcagccgttctaggcagtggcgggaagtcaaatgatccctgttatttgcagtcacctggagacataccatcagctgatgctgctgaaatggaggaaggttttagtgaaagccctgataatttggatcatacagagaatgcagcttctggaagtggaccatcagctagaggtcgctcagcggtaacaagaagacacaagtttgacttagctgctcgcacactgctagcaagagcagcgggattataccgctctgtgcaggcccacaggaatcaaagtcggagagaaggaatatctttgcagcaagacccaggggcgttgtatgactttaatttagatgaggaattggaaattgatcttgatgatgaggcgatggaagctatgtttggacaagacctgaccagtgacaatgatattctgggaatgtggatcccagaggtactggattggcctacctggcatgtttgtgagtctgaagacagggaagaagtggtggtgtgtgaactgtgtgaatgcagcgtcgtcagcttcaatcagcacatgaagagaaaccatccaggctgtgggcgcagtgcaaaccgccagggctatcgcagcaatggttcctatgtggatggctggtttggcggtgaatgtgggagtggaaatccatactacctgttatgtggcacctgcagggagaagtacttagccatgaagaccaaatctaagtcaacaagttctgaaaggtacaagggacaagctccagatctaattggcaagcaagacagtgtgtatgaagaagactgggacatgttggatgttgatgaagatgaaaagctaactggtgaagaagaatttgaattacttgctggaccgcttggtttaaatgaccggcgcattgtaccagaaccagttcagttccctgacagcgatccactgggagcatcagtagcaatggtcacagccaccaacagtatggaagagactctgatgcaaataggttgccatggctccgtagaaaagagctcctctgggagaataacgttaggagagcaggcagctgccctagcaaaccctcatgaccgtgtggtggctttaaggagagtgactgctgctgctcaggttcttctggccagaaccatggtcatgagagcgctgtctcttctctcagtcagtggttccagttgtagcctggctgctggtcttgagtctctggggctaacagatatccgaacgctagttcgattaatgtgcttggcagcagcagggagagctggcctctccaccagcccttctgccatggctagcacctcagaacgatcacgaggtgggcatagcaaggctaacaagcctatctcttgcctggcctatttgagcacagcagtgggatgtctggcatcaaatgctcctagtgctgccaaactgcttgtacagttgtgtacacagaacttgatttctgctgcaacaggtgtaaatctaaccacagttgatgactcaattcagcgaaagtttctacccagctttctccgaggaattgctgaagagaacaagcttgtgacctccccaaactttgttgtaacacaggcccttgtggcattgctagcagacaaaggggccaaactaagacctaactatgataagtcagaagttgaaaagaaaggccctctggagttggctaatgccctggcagcctgctgcctctcctccaggctgtcctcacagcatcggcaatgggcagctcagcaactcgtgcgcactcttgctgcacacgaccgtgacaaccaaactactctgcagacacttgctgatatgggaggagatcttagaaaatgctcctttatcaaattggaggctcatcagaacagagtaatgacatgtgtttggtgtaataaaaaaggtcttttggctacaagtggcaatgatggcaccatccgcgtatggaatgttaccaagaagcaatattcactgcaacagacctgtgtgttcaacagattggaaggggatgctgaggaaagcctgggatcacccagtgatccaagtttctcaccagtttcctggagtatcagtggcaaatatctagcaggcgctttggaaaagatggtgaatatctggcaagttaatggaggaaaaggattagtagatattcagcctcattgggtatctgccctggcttggccagaagagggtccggctacagcctggtcaggagagtctccagaattgttgttggtgggacggatggatggatctctgggactgattgaagttgttgatgtgtccaccatgcaccgtcgagaattggagcattgctatcgaaaggatgtgtctgttacttgcattgcatggttcagtgaagacagaccatttgcagtgggatattttgatggaaaactgttactgggaacaaaggaaccacttgagaaaggaggcattgttctaattgatgcacataaggatactcttattagcatgaagtgggaccctacaggtcatattcttatgacatgtgccaaagaagacagtgtgaaactctggggctctatttcgggatgctggtgctgtctacattcactctgccatccatctattgtaaatggcattgcttggtgccgccttccagggaaaggatccaagttgcagttactgatggctactggctgtcagagtggcttagtatgtgtttggcgcattcctcaagatactacacagaccaatgtgactagtgcagaaggatggtgggaccaggaatcaaattgccaggatggatataggaaatcatcaggagccaagtgtgtttatcagctgcggggacacatcactcctgttcggactgttgcctttagttctgatgggttggccctggtgtctggtggactaggtgggctcatgaacatttggtctttaagggatggctctgtcttgcaaactgttgtgataggctctggagctattcagaccacagtatggattccagaagttggagtagctgcttgctcaaatagatcaaaggatgttttggtcgtgaattgtacagcagaatgggcagctgccaatcatgttttggcaacctgtaggacagcattgaaacagcagggtgttctgggattgaacatggctccctgcatgagagcatttttggagcggctccccatgatgcttcaggagcagtatgcctatgaaaagcctcatgtggtttgtggtgaccaacttgttcatagcccctatatgcaatgcttggcttcccttgctgtgggacttcatctggatcagctgttgtgtaaccctccagtgccaccacaccaccagaactgtctgcctgaccctgcatcctggaatccaaatgaatgggcctggttagaatgtttctcaaccactataaaagctgccgaagccctgaccaatggagcccagtttccagaatcttttaccgttccagatctagaacctgttccagaggatgaacttgtatttctaatggataacagtaaatggattaacggcatggatgaacaaattatgtcttgggcaacttccagacctgaggactggcacctgggaggtaaatgtgatgtctacttatggggtgctggtaggcatggacagctggcagaagctggaagaaatgtaatggtacctgcagcagctccctcattctcacaggcccaacaggtcatttgtggtcagaattgtacctttgtcatccaggccaatggcacagtgttggcttgtggggaaggaagttatggcagattaggacaaggaaattcagatgaccttcatgtgctgacagttatttcagccttacaaggctttgtggtgacccagctggtgacttcctgtggttctgatgggcactctatggccctaactgaaagtggtgaggtctttagctggggagatggtgactatggtaaacttggccatgggaacagcgacaggcagcggcggcccaggcagatcgaggccttacaaggagaagaagtggtgcagatgtcttgtggcttcaagcactcagcagtggtcacttcagatggcaaactgttcacctttgggaatggtgactatggtcgtctgggtcttggaaatacctctaacaaaaaacttccagagagagtgactgcactggagggatatcagattggacaggtggcctgtggattaaaccacactttggcagtgtcagcagatggttccatggtgtgggcttttggagatggagactatggaaaactaggcttaggaaattccactgcaaaatcttcacctcagaaaattgacgtcctttgtggaattggaataaaaaaggttgcttgtggaactcagttttctgttgctttgaccaaagatggtcatgtgtatacctttggtcaagatcgcctgataggcttgccagaggggcgtgctcgcaatcacaatcgaccgcaacaaatccctgtcctggctggagtaatcattgaagatgtggcagttggagctgaacacacacttgctttggcatcaaatggagatgtgtatgcctgggggagcaattcagaagggcagctcggcttaggccataccaaccatgttcgagaaccaaccctggtaacaggtctgcaagggaaaaatgttcggcagatctcggctggccgctgccacagtgctgcatggacagcaccacctgtcccaccaagagcaccaggtgtgtcagtacctctgcagctgggcctgcctgacacagtgcccccccagtatggggcgctgagagaagtcagcattcacacggtgcgggccaggctccggctgctctaccacttctctgacctcatgtactcatcctggagactgctgaaccttagccccaacaaccagaacagcacatcccattataatgctggaacttggggcattgtacagggacaacttcggcctttgttagccccaagagtctacactctgccaatggtgcgctccataggaaaaaccatggttcaaggcaaaaactatggacctcagataactgtaaagaggatatcaaccagaggacggaagtgtaagcctatttttgtccaaatagcgagacaagtagttaagctgaatgcttcagacctccgcctgccttcccgagcgtggaaggttaagctggttggagaaggggctgatgatgctggaggagtgtttgatgacaccatcacagagatgtgccaggaacttgaaactggtattgttgaccttcttataccctctcccaatgccaccgcagaagtgggttacaatagggacaggttcctttttaacccttctgcctgcctcgatgaacacttaatgcagtttaagtttttaggaattttaatgggggttgccattcgcacaaagaagcctctggacctccacttggcccctctggtgtggaagcagctgtgctgtgtcccactcaccctagaggacctggaggaggtggatctgctctacgtgcagactctcaacagcattcttcacattgaagacagtgggattaccgaggagagtttccatgagatgattcctcttgattcttttgttggccagagtgctgatggcaaaatggttcctataatccctggtggaaatagtatcccactcacattttccaacaggaaggaatatgtggagagggccattgaatatcgacttcatgagatggacagacaggtggctgcagtccgagaagggatgtcctggattgttcctgtgccgctgctgtccctcctcacagcaaaacaactggagcagatggtgtgtgggatgcccgagatctctgtggaagtcttgaagaaagtggtgcggtaccgtgaggtggatgagcagcatcagctggtgcagtggttctggcacacgctggaagagttctccaatgaggagcgggtgcttttcatgaggtttgtgtcaggaagatctcgactaccagccaacactgctgacatttctcagagatttcaaatcatgaaggttgataggccttacgacagtctgcctacctcacagacctgcttcttccagctgaggctgcccccgtactccagccagctggtcatggccgagcgcctgcgctatgccatcaacaactgccgctcaatcgacatggacaactacatgctctcgagaaacgtggacaacgccgagggctccgacactgactactgaccgtgcgggtgctctcaccctcccttctctccctcaataatgctcacttctgatttgatgttgatatacttttatggtaactacatagatgttataagaacataaaccaacattataaacaatggccacatttagttactctaaatgtaacaaagaaattagatgtttttatttttctgtgattgtacaaaaacaacaaaaacgaagtgctctcagtcaggtttttccctccatatttttggtcacttttgataagtttgcatgaaaccattttggtgcatttttagttgggaatggtacatttttgtaaatccacccagtgaacatgaaattgtacattgtgtataattgttcattagaaaggacagttttacatgaatattcatatatttattttgttttaatttgaattgcctgttcagggttccttatgcagagaaataaagcagattcaggaattgg

SEQ ID NO: 88886 - DNA, 2863 bp, Homo sapiens
  misc_feature (1)...(2863): n = a,t,c or g
ggcagatctccaccgaggtcagcgaggcccctgtggccaatgacaagcccaaaaccttggtggtcaaggtgcagaagaaggcggcagacctccccgaccgggacacgtggaagggccgcttcgacttcctcatgtcctgtgtgggctatgccatcggcctgggcaacgtctggaggttcccctatctctgcgggaaaaatggtgggggagccttcctgatcccctatttcctgacactcatctttgcgggggtcccactcttcctgctggagtgctccctgggccagtacacctccatcggggggctaggggtatggaagctggctcctatgttcaagggcgtgggccttgcggctgctgtgctatcattctggctgaacatctactacatcgtcatcatctcctgggccatttactacctgtacaactccttcaccacgacactgccgtggaaacagtgcgacaacccctggaacacagaccgctgcttctccaactacagcatggtcaacactaccaacatgaccagcgctgtggtggagttctgggagcgcaacatgcatcagatgacggacgggctggataagccaggtcagatccgctggccactggccatcacgctggccatcgcctggatccttgtgtatttctgtatctggaagggtgttggctggactggaaaggtggtctacttttcagccacatacccctacatcatgctgatcatcctgttcttccgtggagtgacactgcccggggccaaggagggcatcctcttctacatcacacccaacttccgcaagctgtctgactccgaggtgtggctggatgcggcaacccagatcttcttctcatacgggctgggcctggggtccctgatcgctctcgggagctacaactctttccacaacaatgtctacagggactccatcatcgtctgctgcatcaattcgtgcaccagcatgttcgcaggattcgtcatcttctccatcgtgggcttcatggcccatgtcaccaagaggtccattgctgatgtggcggcctcaggccccgggctggcgttcctggcatacccagaggcggtgacccagctgcctatctccccactctgggccatcctcttcttctccatgctgttgatgctgggcattgacagccagttctgcactgtggagggcttcatcacagccctggtggatgagtaccccaggctcctccgcaaccgcagagagctcttcattgctgctgtctgcatcatctcctacctgatcggtctctctaacatcactcaggggggtatttatgtcttcaaactctttgactactactctgccagtggcatgagcctgctgttcctcgtgttctttgaatgtgtctctatttcctggttttacggtgtcaaccgattctatgacaatatccaagagatggttggatccaggccctgcatctggtggaaactctgctggtctttcttcacaccaatcattgtggcgggcgtgttcattttcagtgctgtgcagatgacgccactcaccatgggaaactatgttttccccaagtggggccagggtgtgggctggctgatggctctgtcttccatggtcctcatccccgggtacatggcctacatgttcctcaccttaaagggctccctgaagcagcgcatccaagtcatggtccagcccagcgaagacatcgttcgcccagagaatggtcctgagcagccccaggcgggcagctccaccagcaaggaggcctacatctagggtgggggccactcaccgacccgacactctcaccccccgacctggctgagtgcgaccaccacttgatgtctgaggataccttccatctcaacctacctcgagtggcgagtccagacaccatcaccacgcaggacaggggaggtgggaggacagttagacccctgggtgggccctgccgtgggcaaggatacccggtggcttctggcacctggcgggctggtgacctttttaatccaggccccatcagcatcccacgatcggccttggtaaccgccgcggtagatcatttttatcccgccagggagtgtgatgcaggaagaccacatgcgctcctggcttttaaacctgttcctgactgttctcttactgccgaaacccttgactgttatctcggactttgcaggagttcctttccctccgaacgctgctccatgcacaggaaaagggcattttgttacaatgggggactttcccgggaacgcttgctcttaagtaccagaagccggcggagctctggctttcgtgattttggttttctccttcccaaggcagctggattgaaaaaacaaaacaaaacaaaaaaacccaggggcgtcagtcgatattctcagggccgcttctcctgcagtctgtggagcgtccttgtccccgccgccggaatgaatgagcattctgcagcccgatgtccctgtcccctcctcgccgggccattctgattggacctggcccagtgcaatctgtccagacaagccctgcttgctggaaaactgccacaagcacaattgatctctttttatcgccattccaggggcctcaggtcctactggggaaacttcctataccggagctccagtttctcttaagctgcccaatttcacagagtacaaaatagttgtaggggaaatcaaggtgaaggatctgtccgacagtcaagacggatccacaggaatctttcggtctccttaaactaccaccctcgctgccacccaccccaaggtgnttgccgcctcaccttccttgaaatttctcagcgggagtctcaacacaaccactaaaacccacccagaccgtgtattgcggccgctcgagaggat

SEQ ID NO: 88887 - DNA, 483 bp, Homo sapiens
  misc_feature (1)...(483): n = a,t,c or g
agggtgtccgngnnttnntttccccgaaagttcggangtaacnnncnnnngnnnnggaanagccgggtcgacgatttcgtccgcgctgggagccaggggtgcccgacccctgttcgccgccgccgccgccgccgcgcatagccgcgggagagccctctggggaccccgaccagaagggaccttgccctgggagaaggctgtggagacctgggccttctgcgatcaccctaggagttgatccagatatgtgcctcacgccctgatcactccccccaaattagtatccgcagagattcgaggacatgccgttgaccttgttacaggactggtgtcggggggaacacctgaacacccggaggtgcatgctcatcctggggatccccgaggactgtggcgaggatgagtttgaggagacactccaggaggcttgcaggcacctgggcagatacagggtgattggcaggatgtttaggagggaggagc

SEQ ID NO: 88888 - DNA, 1715 bp, Homo sapiens
ggcaaggcgaggcgaaagctgcacagggccctacgcggccgcctcagcatgtcggacttcgacgagttcgagcggcagctcaacgagaataaacaagagcgggacaaggagaaccggcatcggaagcgcagccacagccgctctcggagccgggaccgcaaacgccggagccggagccgcgaccggcgcaaccgggaccagcggagcgcctcccgggacaggcgacgacgcagcaaacctttgaccagaggcgctaaagaggagcacggtggactgattcgttccccccgccacgagaagaagaagaaggtccgtaaatactgggacgtgccacccccaggctttgagcacatcaccccaatgcagtacaaggccatgcaagctgcgggtcagattccagccactgctcttctccccaccatgacccctgacggtctggctgtgaccccaacgccggtgcccgtggtcgggagccagatgaccagacaagcccggcgcctctacgtgggcaacatcccctttggcatcactgaggaggccatgatggatttcttcaacgcccagatgcgcctgggggggctgacccaggcccctggcaacccagtgttggctgtgcagattaaccaggacaagaattttgcctttttggagttccgctcagtggacgagactacccaggctatggcctttgatggcatcatcttccagggccagtcactaaagatccgcaggcctcacgactaccagccgcttcctggcatgtcagagaacccctccgtctatgtgcctggggttgtgtccactgtggtccccgactctgcccacaagctgttcatcgggggcttacccaactacctgaacgatgaccaggtcaaagagctgctgacatcctttgggcccctcaaggccttcaacctggtcaaggacagtgccacggggctctccaagggctacgccttctgtgagtacgtggacatcaacgtcacggatcaggccattgcggggctgaacggcatgcagctgggggataagaagctgctggtccagagggcgagtgtgggagccaagaatgccacgctggtgagccccccgagcaccatcaatcagacgcctgtgaccctgcaagtgccgggcttgatgagctcccaggtgcagatgggcggccacccgactgaggtcctgtgcctcatgaacatggtgctgcctgaggagctgctggacgacgaggagtatgagaagatcgtggaggatgtgcgggacgagtgcagcaagtacgggcttgtcaagtccatcgagatcccccggcctgtggacggcgtcgaggtgcccggctgcggaaagatctttgtggagttcacctctgtgtttgactgccagaaagccatgcagggcctgacgggccgcaagttcgccaacagagtggttgtcacaaaatactgtgaccccgactcttatcaccgccgggacttctggtagaggcggctgggggagggtgggggcagggctggctgggggcttctccccactcccgcccccccccttatccccctctgaagacgatgggcagaggagtgacagccgcagacacacgacagccggcagcaactggaatggcagcaattaagggtggggagcgggggttggggggttggggggttagggcagggaggggactggggaagtgcgcacacagccccacacagacaacacgcacg

SEQ ID NO: 88889 - DNA, 1891 bp, Homo sapiens
caagaatggcagcacaggcccccacttagataagaagaaggtccagcaactccctgaccattttggaccagcccgtgcctctgtggtgttgcagcaggctgtccaggcctgtatcgactgtgcttatcaccagaaaaccgtcttcagcttcctcaagcaaggccatggtggtgaggttatctcagccgtgtttgaccgggaacagcataccctcaacctcccagcagtcaacagcatcacctacgtcctccgcttcctggagaaactctgccacaaccttcgtagtgacaatctgtttggcaaccagccctttacacagactcacttgtcactcactgccatagagtacagccacagccacgacaggtacctaccaggtgaaacctttgtcctggggaatagtctggcccgctccttggaaccacactcagactcaatggactctgcctcaaatcccaccaaccttgtcagcacctcccaaaggcaccggcccttgctttcatcctgtggcctcccaccaagcactgcctcagctgtgcgcaggctatgctccaggggagtgttaaaaggatcaaatgaaagaagggatatggaatcattttggaaactaaatcgttccccagggtcggaccgatacctggagagccgcgatgcctctcgactgagtggccgggacccctcctcatggacagtcgaggatgtgatgcagtttgtccgggaagctgatcctcagcttggaccccacgctgacctgtttcgcaaacacgagatcgatggcaaggccctgctgctgctgcgcagtgacatgatgatgaagtacatgggcctgaagctggggcctgcactcaagctctcctaccacattgaccggctgaagcagggcaagttctgaaccaggagaggcagcctagacaaccaagtggcagcaggtgggggcattcttctaggaatgaggggcatcagcccaccccaggcacctcagtggggttccgggccacctcaggactccaagaggctgtgtggagccaccactcctagccacagctgccatgataagtccttccatgaaggactgaggagggagagtgggggtccagggctggtgctgctcttccctcagctctgccggggctctaaggtccctctatttatttctcaaccctggctggcctctcaccaggagtttaggctgaatgccttccacgtgatggaggaaaaggccaactctgtcctggtcttgctgtggcaccccatcgccccacagctcgtaccttctcaccagattcccctgaatccaaactcgtggtgcaaacctctaccttttttacaaaaagatcttattgttaatttattgtttctggcacttgggcaaaccctgtagttaatactcctcccacactagacactgggtttcaggaggagggagactgccctgctttggtcccagagaggccctctgcagataggcgtggcccctcttcagaggacactaccctagggcactttctctttgaggtggagagacccataaagccttgaccacatcactccatatggggaggagaaggatccctgtcaccttctcctctcttcacggggcccttttgcagccctaggcctcatctgtgggaagggagtccctggcttatactgcccccaccacagctccttgccctggccagaactgctgtcgaagaaaatcaggccggaaggccaagaaggcgctaagggggatgggagggcaggttttccaggctggagtcggttccacccactcgcctgtccacaggcttccttgtaagcaagtcagcagcacagctactcacgctgccatctggacttattttatgtcaatctgtttataaataaaaaccaatatagaaaaaaaaaa

SEQ ID NO: 88890 - DNA, 423 bp, Homo sapiens
actggaattcccgggtcgacgatttcgtggggaatggattggactccggtggggaaagcgggtgtctagaagtggtgctaatgggaagagaattctggtttcaaaagaggatgctctgccacaaagagcggctcgcgcgctggcctgggccctagccgaggagagatcccgggagaactccagagctccgggggagcgctcctcggaagaccggggccaacatgcctgtgcgcagggggcatgtggcaccacaaaatacatttctggggaccatcattcggaaatttgaagggcaaaataaaaaatttatcattgcaaatgccagagtgcagaactgtgccatcatttattgcaacgatgggttctgtgagatgactggtttctccaggccagatgtcatgcaaaagccatgcacctgcgact

SEQ ID NO: 88891 - DNA, 688 bp, Homo sapiens
tctggattcccgggtcgacgatttcgtggaagggagggagagagaggtagagtgtgtctgtatgcggcgtacatgtggtacagccagggagatcagaacgctcacagaacaggcagtgcaattccatgttcctcttaagtatgttagccctaccgggagctgagctggccagtctacttggagaggaaaagtagatctggggaaggtggaagggtcagttcctaagtgacttcctcctcggggatggtaagggcatttgctgatctccagtgactgcctggtgcctcatggtcagactcggctgtctcactcccagatatctgattttgcaaaaagggacacacctatctgcagcaaagaagacactgaccagattgcgagcggtgcttttggatgctctgtagccacccggggcccaggaggactgactcggcagcaggattcgtgcatgggaatcggagaccatggcagtgcagctggtgcccgactcagctctcggcctgctgatggtgagtgttcagacaggaggtggggcccgggcagcgtccactccagcctcccctgcaccgtgggctgctgctgccgctgcagtggctgcagacatgttcaacattgctccgctttatcccgcaggctctttggaaatgctttcttgggtcagagtatcagcatgacaaagcacttgcag

SEQ ID NO: 88892 - DNA, 2818 bp, Homo sapiens
ttacaggtcctaaatctttttggccactttatgaatgaagaattgggagagagtgaggtagggcctgagccaagactggctcttgggcaggactcgaagcaggaattcagcctcctagaacacattcaggctgagggcaggagccaagcacaaaggtgatcacagggcaggagatgcacgttgtcaggaaagatgagccaggctggcagctttagttacaaagactgctctggctgaagagggggagtcagggtaacaagcaaaatggacagcagccagtggggagatatatcctgtagggtttgaggaatcctatgcagcacctggggtctgcaggaaacccagtttctgtatgaacagatgctctgacaaggtgaccccatctacattgagccttggcactccctaaaccatgctagagacaggaatgtaagggatttattatagtaattatagtaatctgtgttttcaaggtcaccgaaaactcctgttagtgcatacaggattacaggttacagtttagtggagtaaagaacaagggctttaaaagctgggtttgagtctaggctctactaacaccagctgttcgacattggacaaattaatgagtctcagttttcccatccacataaatggacaaaatcaatgtcttcccaaaaatattattttaaggattaaataaactgggtccacagaggaacacaccaaatagcagttcctttccttatttattcaattacattttcaattgctatctccctgaggaagtatgtagagacactgccaggtctcatccagaagccacttacaattactcatgaacatggcttgtttaggttgttttgtggtggctttaattatattacctttctccaacccagctcccccacccttaaaatccaacttcttatactcaggctcttggggaggagaagatgcaccaactttctactctttctcttcctttcccgcttacttcttctagaagctcaaagtactcttaggcctgctcttctggtttggtagtaggtttttcctcctagggttgattcacacacaagccctggcaaccaatctagggtccagcccctagtagatcagtgttgtctctcataaagccagtctgcaaatatcaccttgaatcctacagtctgtagaagcctccagtctactgctttctagctccaggttttttaaggtctttggaccttggcaaccagactgctgtatctcggaagcgggttccacccaggctgaaaatctccgtgatcacgggtgtgccagcccctcctgcctcttcctctggggccaatttggaggcagaatcatccttgttctcctccttgtcctcctctgggtcaggtggctcttgcttcacagaaggcaggcctgggtctactgccttgctagggcagccaggcaccaatacgggagaagtcaggacagctgtgcctggtgtccactcgtcctgggtatccgccttctcttgcttcacctggggtaaggccacaacccaactcaggccagagcactgggcctcctgcaacagggcttctgtggaagctgcaacagggcccggcacctgcacaggactgcttgcgccttcccgtaaaaacacaaggtcagtgccaggcgggggcagcacaaagccaccacctgcttcctgcttcgttggagcctgggtatggtctggttgggctgtgcgtgtagccaaggtgggcttcaaggtagggccaagatggtgccgtcgggcagagctgggcctctttcgacgacggtaaggtgggggcgatcctgccccatcctcagactctgaccagacactgggcagcagccgctgtagctcgtcctcgtctacacagtaatagatgaactcggcaggtggcgagggggccagggctctggggtgcggctctgtgggctctggggactgtgatgggggtggtggaggcagtggctgggctccggggcgccgcctggcagccatcttggagtcacagcctcccttgcggcgggcatgtttaccccgtaggcaacgtcgctggacacatttccactggcgcctgagaccagggcggggagggcgaaggcagatggggcaatggccacaatcctcttgggtctgacagccccggcatactccacaccctcggctcctttccacaatccggaggcagcgtctccgttcacacttgcagaacagccccgatgccacatcatggggcagctgcaggaggcaggtggagcaggccccacagtcttctgttacctggcaggctgcacactccccacagcccacacgcttaaacattctctgttcccggttgaaggcaattctctgtgctcgacagtctttgcacaacgttttgagccgctgcctttgggtgccatcccctgagaagctgattccacagttctcacagcacccaggagcagggaatgaagctggggctgtgtcagtgtcagccttggtctcatccctcggggcctccttcctgacctcaccactctggggtccaacctgacgtttccgagtcttggctggccttgaaggcttctttcgcttcttgctggcaaccgccacgggatgggccttgggggctggatagcacaagatgccttgtttgaagtcgaagagggtgagatcacacgcagggcccaggtatcgagtcagctcaactttgcttcggatcctgtctcctgtggggctctggtaataggtgtctgagcgtccacaggtggcccctgacttgcgaaagacttcgcggcgcttccagccagggcccagggccgggcagtccagccagtcctcagccat

SEQ ID NO: 88893 - DNA, 4715 bp, Homo sapiens; identical to SEQ ID NO: 63930

SEQ ID NO: 88894 - DNA, 575 bp, Homo sapiens
  misc_feature (1)...(575): n = a,t,c or g
ttttttttttttcaggatacaaaaggtttattgcttataaaaataagttaccaaaacccaagccccacaaaacacaagaaccccgcatgacgatacccatgaacacaagggctcattccagtaacagctcgcggagacgacagacaccagcactgccgacacacatggacgaggagcatgctgcacagcttccttctaccaggttctagaaaggtcttctttgccttcagtccgctggctagtgggaataattagtcccatcagccacagagggagtctgctcttcaagagtggcctctgcacacatggcgctgctttatgaaagggaggagcagctgtacacatctgggcagtgaggaaccagctgagccttctgtgggcttcctgcgtgtctgggaaggtgctgggtggggtctgaggctggggccagcgtgggggctactgccggcaggtgtcatggaaggcttcgagggttcggaaatccctccatgtcgggggaaggccgtctctctctctctctctctctctctctctcctcgtgccgaattcctgcaggctgctccaagcggntccat

SEQ ID NO: 88895 - DNA, 395 bp, Homo sapiens
cccacgcgtccgaatattttttcaaactttgctcttttcaggtgtttttgtcatttccattagcaacaatagtcatcgacgtgggcttggttgtgataccattggtaaagtctccaaatgtgcattatgtctacgtgcttctgttagttctcagcggattactattttacatacctttaatacattttaaaataagattggcttggtttgagaagatgacttgctatttacaattactatttaatatttgcctccctgatgtgtctgaggaatagatgtcggaagtgcaaactcttaaaaaattggccttctaaaaaacatatatcagattccaaatcaaggttaaacatatgatagaacattcatggtgaaattcctatggtaaatattttttt

SEQ ID NO: 88896 - DNA, 487 bp, Homo sapiens
  misc_feature (1)...(487): n = a,t,c or g
ccgcgccccnnaatagaagactcttagncagtgcggnggaattcgaaagtatcgagagctggcctcaaagaagtgctcacatttgccgaagcccagcctggagctggaacgtgcctgcgccccgcttccatgccccaggcaccccccatttgctgctgcgggaccctcgaggggcagctggtttgcctcaccctggtctcagtgcacggccagctgtgggggaggcgttcagacgaggtccgtgcagtgcctggctgggggccggccggcctcaggctgcctcctgcaccagaagccttcggcctccctggcctgcaacactcacttctgccccattgcagagaagaaagatgccttctgcaaagactacttccactggtgctacctggtaccccagcacgggatgtgcagccacaagttctacggcaagcagtgctgcaagacttgctctaagtccaacttgtgagttgngaccgctcttcgtacn

SEQ ID NO: 88897 - DNA, 283 bp, Homo sapiens
  misc_feature (1)...(283): n = a,t,c or g
aataccaatccgcagctttttgaaagcacgtatcttgtaatttggtaccttggtaccttactctaatttagttcagctctcagtgagacatccccctttaaaaacacatcgcctgaccatgttttatattccaaatataattgtattgggngccgncngggccgcatgtattaaccacatataccgacagggcttacgagttctctccatccttgcttggagcctcgtgtaaagtctcttttattgacaaagaagcgcgttctctgatgttacaagactcgga

SEQ ID NO: 88898 - DNA, 475 bp, Homo sapiens
  misc_feature (1)...(475): n = a,t,c or g
ntttgatcgacgatcactaggccacagcgctggnccagcagtcgggacaggaggatctgccagatttcaacaggagacgggcgagaactggtttcctgcccgggtaatacaggtaatgttttcatactgaagattttcctgatatgcggatataaaaatggaaaagtggcgtggtgaaaacaccaggccgtagcagaaggctattctggagagttaatttttcatttcgggcgtcggataaacagccagataaacgtaatcacaactgctgagggtatcggctttgcaggtcagcccttttgcatacagcgtgacggtatgctgatggcggggattcagttcaccgctggtgagcatgagttccagttgtttcatcagcagcggaaaggcctggtccaggtggtacgcatctgcatcgctgaacaggcctctgataccggcgcggtcggcaaggtaatgcaaccgggtaccctcc

SEQ ID NO: 88899 - DNA, 1197 bp, Homo sapiens
aagcttaaaaaggagtaggcgggaggcgggggcacgatggttccccagaccaccccagcccaggggggttgtgttctggggattcaggaggtcgaggcacccagtccgtggtgagcagggccaggtctccttccttcccaagagcacggtgcgagtgccttccccacagctctcccaggtgtctgtctccctcactcccccagggccaggacagcgagcagggagcacgccttcctcctggtccctcccagaccctcgccaggctcagcagacccctctcctgttgcgttgctccttcggcaggaggtcagcgtgggtgagaagggagcagaggccagatgacccttcatgtcagttcaaggagaggcccccaggtcctcctcacgggttccactcccctcaccctcccagtatccatgagcatcccaccgccaccaagtgcagggcatccagggggtggagagtggatgggcttgaaggggagtgggtatgaggtttggacaaccccagatgtgaagagtgtgtgtgtgtgttgtgcacgtggattgcctgtatggtattgcaggggagaagaggatttggaaaaggtgcaaggaaattgcaagaatagaaaatgaaagaggaagtagaaaggtttgcggtataagaagggtgagagaaaggggagtggggttatggagggatctagaagagaatagtggggagggaaagggcaggaatggaaggcaagcccatcaccccaaggccccttccccatgtctacccctcccccaactccaaagaaggaaattaggaggccactgcggattatgtttgggtcatttccacatgctttattccagcaatcaaaataattaaaaacatctcaaattattatacacatacaaaataggtacagagtcttttgcttcctcccacccctagggggaaaaactgctttgtgctttgggaagttgtctctgaaacccggggacagaggacgcaggacagactaggagggagccgggaggatgggctgcagctgtggaggagggtttcagaggagagaggtcggagagcagaggcctgagaagccagaggcaggtggagagagggtggaaagtgagcagcgggctgggctggagccgcacacgctctcctcccatgttaaatagcacctttagaaaaattcacaagtccccatccacaaaaaaaaaa

SEQ ID NO: 88900 - DNA, 1811 bp, Homo sapiens
ggaggcaggaggagcaagaagtggaaacaagagcagtgccgtcccctcctcctccccccatcgtgaagaagccattgaagcaaggtggggccaaagctccaaaagaggctgaggctgagccagccaaggagacagcggccaagggccatggccaagggccagcccaaggcagggggactgtggtgcgcagctcatactccaagcccaagcggccacaacccagcagggaaattggcaacatcatccgcatgtaccagagccgcccgggccccgtgcctgtgcccgtgcagccatccaggcctcccaaagctttcctgaggaaaatcgaccccaaggacgaggctctggccaagctgggtatcaacggtgcccactcgtccccgccgatgctgtcccccagcccaggaaagggccccccgccagctgtggctcctcgacccaaggccccgctacagcttgggccctctagctccatcaaggaaaagcaggggccccttctggacctgtttggccagaagctgcctattgcccacacacccccacctccaccagcgccaccactgcctctgcccgaggacccagggaccctttcagcagagcgtcgttgcttgacacagcccgtggaggaccagggggtctccacccagctactcgcgccctctggcagcgtgtgcttctcctacaccggcacgccctggaagttgttcctacgcaaggaggtgttctacccacgggagaacttcagccatccctactacctgaggctcctctgtgagcagatcctacgggacaccttctccgagtcctgtatccggatttcccagaatgagcggcggaaaatgaaagacctgctgggaggcttggaggtggacctggattctctcaccaccaccgaagacagcgtcaagaagcgcatcgtggtggccgctcgggacaactgggccaattacttctcccgcttctttcctgtctcgggcgagagtggcagcgacgtgcagctgttagccgtgtcccaccgtgggctgcgactgctcaaggtgacccaaggccccggcctccgccccgaccagctgaagattctctgctcatacagctttgcggaggtgctgggtgtggagtgccggggcggctccaccctggagctgtcactgaagagcgagcagctggtgctgcacacagcccgggcaagggccatcgaggcgctggttgagctattcctgaatgagcttaagaaggactccggctatgtcatcgccctgcgcagctacatcactgacaactgcagcctcctcagcttccaccgtggggacctcatcaagctgctgccggtggccaccctggagccaggctggcagtttggctctgccgggggccgttccggactctttcctgccgacatagtgcagccggctgccgctcccgacttttccttctccaaggagcagaggagtggctggcacaagggtcagctgtccaacggggaaccagggctggctcggtgggacagggcctcagaggtgaggaagatgggagagggacaagcagaggcaaggcctgcctgagactgaggaaggaaaggggtttgaccactcccgaggctgccatgcggtgggaccaccctgctgtccgtctcctgtggctgcccctctgcccgctcctgatggctcgccttgtctctccagcaagactgtgcactccttgcaggcaggggctgggctggatgctgctcttgtgtcccacgtggtacttagttcaaggctgccccagcagatgcttaataaacagctcttcactttcctaaaaaaaaaaaa

SEQ ID NO: 88901 - DNA, 3306 bp, Homo sapiens
  misc_feature (1)...(3306): n = a,t,c or g
tttcgtggaccctgcttggtgtcccagggctcctggggaagctcctagccccacctgttctgcttccacccccaggcccatgagaggctggaggagacgaagctggaggccgtgagagacaacaacctggagctggtgcaggagatcctgcgggacctggcgcagctggctgagcagagcagcacagccgccgagctggcccacatcctccaggagccccacttccagtccctcctggagacgcacgactctgtggcctcaaagacctatgagacaccaccccccagccctggcctggaccctacgttcagcaaccagcctgtacctcccgatgctgtgcgcatggtgggcatccgcaagacagccggagaacatctgggtgtaacgttccgcgtggagggcggcgagctggtgatcgcgcgcattctgcatgggggcatggtggctcaacaaggcctgctgcatgtgggtgacatcatcaaggaggtgaacgggcagccagtgggcagtgacccccgcgcactgcaggagctcctgcgcaatgccagtggcagtgtcatcctcaagatcctgcccagctaccaggagccccatctgccccgccaggtgggcccctcacccagcacaaggcccaagggatggctgagcctcctggctgtcaaggttgcaggtctcacggaggccctcctctcctactggtttcctccagggaagatgggggtgggacctgcagcccaggggcagctgaccgcagccgccgacaggcctctgccgctgctgcacctgcacatgctcccacattggctggtattatgcacgcagccacagcctggggtacaagtgtatgagagagcgcctgcattatggtcagcgttcttcacgtttgtgcgcgtgcgcagggtatttgtgaaatgtcactttgactatgacccggcccgagacagcctcatcccctgcaaggaagcaggcctgcgcttcaacgccggggacttgctccagatcgtaaaccaggatgatgccaactggtggcaggcatgccatgtcgaagggggcagtgctgggctcattcccagccagctgctggaggagaagcggaaagcatttgtcaagagggacctggagctgacaccaaactcagggaccctatgcggcagcctttcaggaaagaaaaagaagcgaatgatgtatttgaccaccaagaatgcagagtttgaccgtcatgagctgctcatttatgaggaggtggcccgcatgcccccgttccgccggaaaaccctggtactgattggggctcagggcgtgggacggcgcagcctgaagaacaagctcatcatgtgggatccagatcgctatggcaccacggtgccctacacctcccggcggccgaaagactcagagcgggaaggtcagggttacagctttgtgtcccgtggggagatggaggctgacgtccgtgctgggcgctacctggagcatggcgaatacgagggcaacctgtatggcacacgtattgactccatccggggcgtggtcgctgctgggaaggtgtgcgtgctggatgtcaacccccaggcggtgaaggtgctacgaacggccgagtttgtcccttacgtggtgttcatcgaggccccagacttcgagaccctgcgggccatgaacagggctgcgctggagaggggaatatccaccaagcagctcacggaggcggacctgagacggacagtggaggagagcagccgcatccagcggggctacgggcactactttgacctctgcctggtcaatagcaacctggagaggaccttccgcgagctccagacagccatggagaagctacggacagagccccagtgggtgcctgtcagctgggtgtactgagcctgttcacctggtccttggctcactctgtgttgaaacccagaacctgaaatccatcccccttccttgaacctgttgaccccctgccacaatccttagcccccatatctggctgtccttgggtaacagctcccagcaggccctaagtctggcttcagcacagaggcgtgcactgccagggaggtgggcattcatggggtaccttgtgcccaggtgctgcccactcctgatgcccattggtcaccagatatctctgaggggccaagctatgcccaggaatgtgtcagagtcacctccataatgggtcagtacagaggaagagaaaagctgctttgggaccacatggtcagtaggcacactgccccctgccacccctccccagtcaccagttctcctctggactggccacacccaccccattcctggactcctcccacctctcacccctgtgtcggaggaacaggccttgggctgtttccgtgtgaccaggggaatgtgtggcccgctggcagccaggcaggcccgggtggtggtgccagcctggtgccatcttgaaggctggaggagtcagagtgagagccagtggccacagctgcagagcactgcagctcccagctcctttggaaagggacagggtcgcagggcagatgctgctcggtccttccctcatccacagcttctcactgccgaagtttctccagatttctccaatgtgtcctgacaggtcagccctgctccccacagggccaggctggcaggggccagtgggctcagcccaggtaggggcaggatggagggctgagccctgtgacaacctgctgttaccaactgaagagccccaagctctccatggcccacagcaggcacaggtctgagctctatgtccttgaccttggtccatttggttttctgtctagccaggtccaggtagcccacttgcatcagggctgctgggttggaggggctaaggaggagtgcagaggggaccttgggagcctgggcttgaaggacagttgccctccaggaggttcctcacacacaactccagaggcgccatttacactgtagtctgtacaacctgtggttccacgtgcatgttcggcacctgtctgtgcctctggcaccaggttgtgtgtgtgtgcgtgtgcacgtgcgtgtgtgtgtgtgtgtgtcaggtttagtttggggaggaagcaaagggttttgttttggaggtcactctttggggcccctttctgggggttccccatcagccctcatttcttataataccctgatcccagactccaaagccctggtcctttcctgatgtctcctcccttgtcttattgtccccctaccctaaatgcccccctgccataacttggggagggcagttttgtaaaatagcagactccctttaagaaagaatactgacctngatgtaaa

SEQ ID NO: 88902 - DNA, 1427 bp, Homo sapiens
ttttttttttttgatttggtaattaaagtttatttgaacacaaaatactttctctgtctataaaattggctgttagcagtagcagcagcatgtcctggccaaggggagtagatttctccagactactaaagccatgtatatagccattcccacttcccatattctgtggatatgtacatgtgcatggtagctagagtccctccaccaggagtatctctctcatggatggtttcttcagggagaggaagaggagacctggggtgaagagctgggatggttttgaagtggggcaaagccattaggcttgtaccttgaaagccccagtctctctgggaatagcttgtactgccaggtgtcctctgaggccccttctctgtactctgtcctgcttgaggggaatgggggtatttgggactcccataggaaaggcacttagcctaagtcaccaaatgactgcttggtccccactgaagcagtgtagctctccatagtatttttggtggttatggattacatgtgtggccagctcatgctttttcttgagcaggggctgtccatgacctgtgctcataccatgctttctaagttctctttggacagggcctcagctgctgcctcagcctgagtttcagagagtgtgtaggagtcctggtaatcttgaagcagtttgaccacctccagatggttgaactgcacagcatcatccaggggaatgttgccccacctgtccttggcaaaaggattcactttgcaagcctcgatcaggaatttaacaacttcgatgtgtcctaggaatatgggcagaaggaaaatgagaaggcgcaggtcttgaaccctttggtgcagacacttagccactgaagtctttaccaagaggggaggggaaaaggcctcttcccattttgtaccctgcagcactcagtcatagtctagctgcaaaccgaagggtgtctagataaaactagttgctgcccctataaccttgagggcacatataatgaaggtacttttggtgaaaaagaaagggtcttatgattaccctcctcctcccctccttaacccttcaagtaccttcaagctgcagcaacatgcagagctgtgcgcgagtcatagtctttctgttccatatccatggctgacaaggcaaacctgagggtagtgggaaagcagctagagttgcctagatcagactggaatcacaggtgttctttgtgaactggtgtcagactggatgagtttcagagaaagtgaaacagcctatagccagatttgttggctctgaataatcttttttccatatccagatgagactgttatactcatattagagagatgggaatgtgatccttccagaaatatcactcactgcctacctgggtaagtgcccatttgaggcagggtacctacttcctaggacactgctctcc

SEQ ID NO: 88903 - DNA, 666 bp, Homo sapiens
ggtagactacgaaaatccaagtaacctagcagccggcaataaatatacggtgataatccaggttactgtgaacatccttgaagaaaatgatgaaaagccaatttgtactccaaactcttatttcctggccctcccagtggatctgaaagttggcacaaatattcagaatttcaagctgacatgtaccgaccttgattccagccccagatctttccgttattccattggcccaggtaacgtcaacaatcatttcaccttctctcccaatgctggttccaatgtcacacgcctgctgcttacatctcgctttgactatgctggtgggtttgataagatctgggactacaagctacttgtctacgtaactgatgacaacttgatgtctgacaggaagaaagcggaggctcttgttgagacaggaacagtgacactgagtattaaagtcattccccacccaaccactatcatcaccacgacccccaggcccagggtcacctatcaggtcctgaggaaaaacgtttactctccatctgcatggtacgtgccgtttgtcatcactttgggctccatattgcttctgggtctcctcgtgtacctggtcgtcctattggccaaagccatccacagacactgcccctgcaagactgggaagaacaaggaacctct

SEQ ID NO: 88904 - DNA, 475 bp, Homo sapiens
gggtgacggcagtcgcaaggctggtgtcctacccctttgacactgttcgtcgtaaaatgatgatgccttccggccggaaagggggtaagcttgagctctactcatctaaacttggttggctctgcccgatgagaacattttacagggctcctttcagtcttccttactggaaattaattttcaaaattatttgataaggacttagggaagaaagatggtattaattccccctaacgttctcaactatcctattagggaaaagtattttccattttattagagatgataagaacatgaatagtaagacatttatatgtgaatttaactaggtatccagcattatagagacccctaggccctccttccccttagagccctgggtgcaaaagctagggaaaagaagtagttagctacttcttacaaagaactcttgcttccctcctaagttacaggtgttagtggggatggggtgttt

SEQ ID NO: 88905 - DNA, 1578 bp, Homo sapiens
ttctctgcgacagaaagcatattcctacaattgtaagactaaaatacttcttgcgataataactacaactgtaagataaccctttcaaaatgaccgttgctctctgatttctcatttcatgctcacccaatatgatggcggcgttttctaaaactgttaaagaatgaggtaagtatgaaacgtttaattatggccacgatggtcacagcaattctggcatcttcaactgtatgggctgctgataatgctccggtagcggcacaacagcaaactcagcaagttcagcaaacccagaaaacggcagcggcagcagagcgtatctctgaacaaggtttatatgcgatgcgtgacgtgcaggtagcgcgcctggctctgtttcatggcgatccagaaaaggcaaaagaactgaccaatgaagcttccgctttgctgtcagatgacatgaccggtctgaaagcgggtacgcccgttgttggcggcctgtttgatgtggtttccaccgcactctgcgccgggatcgaagacgaatttaccctcaatgcggtgatggggacctgggcggtgaccagcggcataacccgcggtttacgtgacggtgaagcgcatccgtatgtctatggtcgctacgttaacgatggtgaatttatcgttcacgaagccagccctacctcttccggcaacctcgaatggtttaccgcacagtggggagaaatctcgtttgatgagatcaatcaggccgttgccagcttgccgaaggctgggggcgatctctttttcctgccgttcctgtacggcagcaacgccggactcgagatgaccagtggtttctacgggatgcaggccattcacacccgcgcgcacctgttgcaggccatctatgaaggggtggtgttcagccatatgacccacctcaaccgaatgcgcgaacgttttactgatgttcacaccctacgcgtcactggcggcccggcgcactccgatgtctggatgcaaatgctggcggacgtcagcggtctgcgtatcgagctgccgcaggtggaagaaaccggctgctttggtgcggcccttgccgcccgcgtcggcaccggggtttatcacaacttcagcgaagcccaacgtgacttgcgacacccggccatgcctggggggtctccatctttattgatgacgatctgcgtagaaagctattccgatgtgctgtggtcggtgaaaacggaacaaggaccaggatacatctattgtctgattgaacatcaaagcacctcaaacaaactgatcgcatttcgcatgatgcgttacgctattgccgcaatgcaaaatcaccttgatgctggatacaaaacgttgccgatggtggtgccattgttgttttaccacggtattgaaagcccctatccctattcgctgtgttggctggattgtttcgccgatcccaaactggcaaggcagctttatgcctccgcatttccgctgattgatgtcaccgtcatgcctgatgatgaaatcatgcagcaccgacgtatggcgctgctggagttaattcaaaaacatattcgtcaacgcgacctgatggggctg

SEQ ID NO: 88906 - DNA, 516 bp, Homo sapiens
  misc_feature (1)...(516): n = a,t,c or g
gggttaattcagaaatttaggtgatgctggttaaaaagtctgcctggtgtggggcctcgtccatgcactgtccctgttcagctgcatcccctctgttcccctagcttcagtttgtgctgacaatcatccagaccagctgcggggtcatctggccgtgcacattccctcttggttgggtgtatttccagattggatacatgatttccctgattgctctcttcacaaacttctacattcaggtaaatctcacccttctctgggacttggaatctggggcctttaccaacaaaggccctcatctatttacttaatgggcatgtggagcccttgctgggtgacaggctctggcctctgaatggagtcactatgacaagagcagcccctgcctctggggggctgcacagctcactgggaagacacgagaatcctgttcttagagcctggggtgaggaagtcttgggatttcccctgggaaatggaaaactgtgcagcangaccctatgtttgcttcccttt

SEQ ID NO: 88907 - DNA, 435 bp, Homo sapiens
acttttaaaaaatatatgttcatttttagaaaaagtcattactgtgcttgctgcctgtctggaaagtgagaatcaaaatgctcagaggattggagcagctgccctttgggctctgatttacaattatcagaaggtcagttttaaaaatcattgttacacctggggagcaaacaacaaggtataacccaggtataaactcttaggatacatccaaaggtgtcaagagttacagcaaaagaaaaaagacaaaattaaagatccatgttccctttgctgattcatacaattagtaaaccatcagttgaaatctttttatttaatcatttcaacagaatgtcttcagtttaggaggaggatctctgaactgactttttcctcttaatttaaattgatttactttattattgcaattttagtatagattgtttcttctaa

SEQ ID NO: 88908 - DNA, 735 bp, Homo sapiens
gggtggtaactgggggacttctgctctaagaggacccgtgaaacagcaaacaggaggaaggaacttggtggtgggggcaaggggcagccacccagcaacacccccactaggagcacttctgtcctctaaaggcagtgagtttggggataattcattggacgaagggaaaagacaaggctgctacaagaagagggatgagggcaaccctggtgcctcccgccactgcagtggtatgcaggggaaagcaacaatgaaaagaggtacgtgccattgggtttcccgaaaaccaggggtctcgatgttgacaacagaggattcctcaacggcgactggctgtctcggtcattttcagtgagtgcttaaaaaaagatgagaggtttaaattaaacaaattttctgccttaccaaaactgacagtaatgtagctttctaggcaactaaaggctaagccagcagctcccagcctgtggactgtagtttttgcagggtccacgaacccaaatgcacaccaagcactgtctggatacccagagaaaataaaatgtcccccacaccaagtgtgccttttcccagaggtatgtggagactgttgtaattaacaacatacacattcatagaaggacactgctaatactgatttggaaaaaatgtatgtagtgaaatcccattttgtaaaactgaaatatatccatgcacacataaagtactctagaaataaatacactaaatctctga

SEQ ID NO: 88909 - DNA, 481 bp, Homo sapiens
  misc_feature (1)...(481): n = a,t,c or g
ggcttggtgttctgggttccaggacaaacaagctgctgccaatgcaagtggatggagaaccctggatgcagccatgttgcacggtgagtcttgccaatctttgagatggggatgagaagccttatttttgagcccttttgggcactgacttaatatgaaatcactgaatctcagagtcgcagggactgtggaagattatctagtgcaacccctcttccactttattatccatccactcatttacctggcaactcttaatgaaaacctgctatatgccagacactgtgaagcgccggtcacaaaattgaatgagacataggaaccaacttcgagggagtttcacagttctagtcagtgaattctgagacttcatctacttgtatcctgggacagcctcagcttgaattcatgtccaatgggcaagggattttacttacctccaaaangggaaggactnttcctgcttgatgnaccangtcaa

SEQ ID NO: 88910 - DNA, 1586 bp, Homo sapiens; identical to SEQ ID NO: 73982

SEQ ID NO: 88911 - DNA, 902 bp, Homo sapiens; identical to SEQ ID NO: 64103

SEQ ID NO: 88912 - DNA, 412 bp, Homo sapiens
ggggaagatttatcagcgtgcatttggcggacacagcctcaagtttggaaagggcgtgcaggcccatgggtgctgctgtgtggctgatcggaccggtcactcaatattgcacacctcatatgggagggaaaggccggcacccgtccacctgagacaggacacgtaacgttgtggctaggggggaccgcggggaccgggttagcgtgcccagtgagtcagccacagattgcgtaaaaagcaacagagaacagtggtgtggggcacatgcagcgactgtggaggtgacaggagcttacgtgtgccttgagaagatgctctttaaggcctgtgggaaatgttgcctctatgttggaaagttgaattgataatcttatataccaggctttcacttgggatatgtgacactcagcct

SEQ ID NO: 88913 - DNA, 3611 bp, Homo sapiens
ggaacatgctacgcatgcttacgccaagcttggcacgaggcggagacaccgagaggtcactgtgtttgtacccacctggcagcttaagaagaaccggagggtgagagagagccactttctgacgaagctacactcgctcaagatgctttcaatcacaccctcccagcttgagaatggcaagaagatcaccacctacgattataggttcatggtaaagctggcagaggagacagatggcatcattgtcaccaatgagcagattcacatcctgatgaatagttccaagaaactgatggtcaaagatcgcttgctgcctttcacctttgcggggaatctcttcatggtgcctgatgaccccctgggccgtgatggccccaccttggatgagtttctgaagaagccaaacaggttggacactgacattggcaacttcctgaaggtgtggaagacccttcctcccagctcagccagtgtcactgagctgagtgatgacgctgactctgggcccctggagagtctgccgaatatggaagaagtcagggaagagaaggaggagaggcaggatgaggagcagagacaggggcagggcacacagaaggcggctgaggaggacgaccttgactcttcgctggcgtcagtgttcagggtggagtgcccgtccctttcggaggagatcctgcggtgcctcagcctccatgatccccctgatggggccctggacatcgacctcctgccaggggcagcttctccctacctgggcatcccctgggatggaaaggctccctgccagcaggttcttgcccacctggcccagctcaccatccccagcaacttcaccgcactctccttcttcatgggcttcatggactcccacagggatgccatccctgactatgaagccctagtgggccccctgcacagcctcctcaagcagaagcctgactggcagtgggaccaggagcatgaggaggccttcctggccctgaagcgagccctggtgtctgccctctgcctgatggcccccaactcccagctgcccttccgcctggaggtgaccgtgagccacgtggccctgacggccatcctccatcaggagcactcagggaggaagcaccccatagcctatacctcaaaacccctcctccctgatgaggagagccagggcccccagtcagggggtgacagcccctatgctgtggcctgggccctcaagcatttttcccgctgcattggagacaccccggtggtcctggacctttcctatgcctcccggaccactgcggaccctgaggtgcgggagggccgcagggtttccaaagcttggttgatccgatggtccctcttggttcaggacaaaggcaagagggccctggaattggccctcctccagggcctgctgggggagaaccgcctgctcacccccgcggcctccatgcctcgcttcttccaggttctgccgcctttctctgacctgtccacgttcgtctgcatccacatgtcgggctactgcttctaccgtgaggatgagtggtgtgctggctttggtctctatgttctatcgcccaccagcccccctgtctccctttccttctcctgctccccttacacgccaacctatgcccacctggcagccgtggcctgcggcctggagcgctttggccagtccccactcccagtggttttcctcactcactgcaactggatcttcagcctcctgtgggagctcctgcccctctggagggctcggggcttcctctcctctgatggggctccactccctcacccaagcctgctctcctacattatatccctcacctctggcctctcatcccttccgtttatctaccgaacctcctaccggggctctctgtttgctgtgacagtggacaccctggccaagcagggtgcccaggggggtgggcagtggtggagtttgccaaaggatgtgccagcccctacagtgagtccccatgccatgggcaagaggcccaatttgctggcattacagctgagtgacagcaccctggccgacatcattgccaggctgcaggctgggcagaaactgtctggctcctcaccgtttagttctgcctttaactcactcagcctcgacaaggagagtggcctgcttatgttcaagggagataagaagcccagggtctgggtagtcccgacgcaactccggagggatctgattttctctgtgcatgacattcccttgggggcccaccagaggcccgaagagacctacaagaagttgcgtttgctggggtggtggcctgggatgcaggagcatgtgaaagattactgcaggagctgcttgttctgcatcccccgaaatctcataggcagcgagttgaaggttattgagtccccatggcccctcaggtcgaccgccccctggtcgaacctgcagatcgaggtggtgggcccggtcaccataagtgaggagggccataagcatgtacttattgtggctgacccaaacaccaggtgggtggaggcattccccctgaagccctacacacacacggctgtggcccaggtgctgcttcagcatgtgtttgcaaggtggggtgttcctgtgaggctggaggcagcccaggggccccagtttgcccggcacgtccttgtgagctgtgggctggccctgggagcccaggtggcctccctgagtcgggacctccagttcccctgcctgacgagctcaggggcctactgggaattcaagagggccctcaaggagttcatcttcctgcatgggaagaagtgggcggcctccctgcctttgctgcacctggccttcagggcctcctccactgatgccacaccgttcaaggtcctgaccgggggtgagtcaaggctcacggagcccctgtggtgggagatgagcagcgcaaacattgaagggctcaagatggacgtcttcctgctacagctggtgggggagctgctggagctccactggagggtggctgacaaggcgagtgaaaaggccgagaacaggcgtttcaagcgggagagccaggagaaggagtggaatgtgggtgaccaggtccttttgctgtccctccccaggaatggcagcagtgccaaatgggtgggtcccttctatatcggggaccggctgagcctgtcactctataggatatggggcttcccaaccccagagaagctggggtgcatctatcccagcagtctgatgaaggcctttgccaagagtggcaccccgctgtccttcaaggtcttggagcagtgagcgggagcagcgggggtgccccctgccccagggccgtgggtttctgctgctaggcctccccctgtcccagcagtgctctcagtccactgggggccctcagttgtgccttttgtagagaacttgcttcataaagctttgctgaattgccttgaactagggaccagcatccccatggaaacatccccagtttggggtacttggagaatttgccaaaggctgtcagatatgggtccctggcagttttacactgggaaatagagtgctcctctaggctataccaggctcagtgtcttctccccaagtatcctctttccccttcacatgtaggtgtgtggtggtgtgcacacacact

SEQ ID NO: 88914 - DNA, 1884 bp, Homo sapiens; identical to SEQ ID NO: 64846

SEQ ID NO: 88915 - DNA, 663 bp, Homo sapiens
ggaattcgagcggggctggcggacggtgtttccctcccgtgagttctggcacaggttgcgagttataaggactcagcatcatgtagaagcacttgtggagcatcagaatggcaaggttgtggtttcggcctccactcgtgagtgggctattaaaaagcacctttatagtaccagaaatgtggtggcttgtgagagtataggacgagtgctggcacagagatgcttagaggcgggaatcaacttcatggtctaccaaccaaccccgtgggaggcagcctcagactcgatgaaacgactacaaagtgccatgacagaaggtggtgtggttctacgggaacctcagagaatctatgaataaatggaagcattaattgttttgaacatgtaaatataaatctgtcagccactacagccatcaaaagagagcatctggaagaacagccagcttggaagttttacagcaataatgttgcagtggaatattatttgtagttaaggtcatcctcctcccctttctgtttttttaaatcaagaactacgttctgcccctctcttgggcttcagaagcatctaagaaaagcagtcatcaattataattaactttcaaagggcaagtcagaagttgtttataaattacaaaataaaggcatattatgaactctt

SEQ ID NO: 88916 - DNA, 2004 bp, Homo sapiens
aatgaaattttgcttgcaaagccccacatgcgataatactaggtagaaattttttttgagtacacattatgtatgtccattttagaaaagatgtggtatgaagttgcaaagaaacaacattaaggaaaaacacagtttaaagcaaagatttgttgcttttattgctttcacttgcgtccctgtgaagagccccccaaacagggtttgtgtgcgcaataaagctttttaatcacctgggtgcaggcgggctgagtctgaaagagagtcagtgaagggagataagggtagggcgcttttataagatttgggtaggtaaaggaaaattacagtcaaaggggggttgttctctggcagacaggagtggaggtcacaaggtgctcagtaggggagcttttgagccaggatgagccaggagaaggaatttcacaagatagtgtcatcagttaaggcaggaacaggccattttcacttcttttgtggtggaatgtcatcagttaaggcaggaaccggccatctggatgtgtacgtgcaggttacagaggacatgatggcttagcttgggctcagaggcccttggctccagcaatgctgatgatgaggtgctggggtccccgaggacaggaggcctccaggaaggaaccggcctcagtccacgccgtccagggactgtggctctgccctctcgagctgtagcacctgattttctatgcaccgaaactgccaaggccagcttgtgttgtacagaaatggtcgcagatcaaacctgttgtcctcagggctgtagttctcggcgtggtacgcgggtgtgagcgtggtcatcttgtgtctgttcatggagtacttggagaaaaaccgcttcactttgtcagcgacctgtctcggggtgcagatgtgtctccacatgccgaggagtttgcagaacatgctgtagggccccatcttggccaccttcctgagtttcccatagaccgagagctccgcatatgtcatccccatatcttcctcgtcggtctgggacacctgtccatcagccaagggctccagctctgcggtggccggcgccaacaggatgctctgcagggcaggaagctggaagcgctggatgcagaactggacgaaggccctgaggtccgtcttgctgatcccgcctatggggttgatgtccgcactggagcagtcgtacttggtcaggtagcccaggagactctcatccacgttggcggatcccagcacgaggagcccaccgtggacaccccgagaccagaggctcaactgagcaaacagataggcgaggaccatccgtattcgagcctgcacattttgcagcgccaggttttccctgctgcttcctccatgagctgcaaacagagggctcttccccgtcaccaggctgaagatgcccatgacggccttcacggctggatcgatgttgagactgatgtggtggcttccaatctgctgggccaactctctggcccgggtgcacgtctcctgggaggagttcttgctggccatgtagcaggtggtcagtatgcgtccacagaggtctcggggatcctggggggtgtagctgatctggttcacgatggtgcggacatcagccagcacttcctcatttccactcctcacggcctcgcagacctggcagcacatggagtagatgaggcaggcggtggctgcgctgtccaccccgccactcaagggcagcaaaaaccctgcctgttgacttcgtcttaaaaaatcccagagccagcaggcaggtccaaggcttatctcctcctcagggctgtggtatttccactcgatgggctcagagatgggtgccagcaagtcctcgtggcacgagagggcaaagtccaccttcactctggggtaggggctcgccctgctggcttgaatctacgaggcagaggttgtgctgagctgggattgcgccattgtactccagcctatggtagttcacagcaagggtgaaactccgtctcaaaaaacaaacaaaaaacc

SEQ ID NO: 88917 - DNA, 900 bp, Homo sapiens
accccaacttggaggacacctacagctccgaggagactgtggaccaccagcctgtccacctgagggtcatggacactgcagacctggacacccccaggaactgcgagcgctacctgaactgggcccatgccttcctggtggtgtacagcgtcgacagccgccagagctttgatagcagcagcagctacctggagctgcttgccttgcacgcgaaggagacacagcgcagattccctgccctgctgctgggcaacaagctggacatggctcagtacaggcaagtcaccaaggcagagggtgtggctttggcaggcaggtttgggtgcctgtttttcgaggtctctgcctgtctggactttgagcacgtgcagcatgtcttccacgaggcagtgcgagaggcacggcgggagctggagaagagccccctgacccggcccctcttcatctccgaggagagggccctgccccaccaggccccgctcaccgcgcggcatgggctggccagctgcaccttcaacacgctctccaccatcaacctgaaggagatgcccactgtggcccaggccaagctggtcaccgtgaagtcatcccgggcccagagcaagcgcaaggcgcctaccctgactctcctgaagggcttcaagatcttctgaggccccctccccaggaagcctaggctcggtggctggacaggactgcagcaggacagggactggcttctcaccaccagcctttccgtctgatggacagcagaccccgcctccagcaccaagcagtgtccctacactcaattcactgtgtgagctggagtggcaggcagggatgctgcttctgttccctccaggccttggtcttcatggtaaccaccgcgtctgtggccgtagagggaaacagccactg

SEQ ID NO: 88918 - DNA, 415 bp, Homo sapiens
  misc_feature (1)...(415): n = a,t,c or g
cagaatgaaaacggccgcactgggacacgacctggacgggcaggacgcggatgaggatgccagcggctctggagggggacagcagtatgcagatgactggatggctggggctgtggctcccccagcccggcctcctcggcctccataccctcctagaagggatggttctgggggcaaaggaggaggtggcagtgcccgctacaaccagggccggagcaggagtgggggggcatctattggttttcacacccaaaccatcctcattctctccctctcagccctggccctgcttggacctcgataacgggggaggggtgccctagcatcagaagggttcatggccctttcccctcctcccccctcagctgggcctggggaggagtcgaagggggctgcagagagggtagagaagggn

SEQ ID NO: 88919 - DNA, 1922 bp, Homo sapiens; identical to SEQ ID NO: 64656

SEQ ID NO: 88920 - DNA, 7080 bp, Homo sapiens
ccgggctgcgcggcgaggctgagccgggcccgggcgccggggccgggggcggctggcgcgggcaggaagcgcctcgcggacccgggcccgccccccgcctcccgccgcctccgggctcccggctcccggccgcgcctcgccccatgcactcgccgcgccgcgcagcccgcgcacgcccggatggctcctcgcgccgcgggcggcgcaccccttagcgcccgggccgccgccgccagccccccgccgttccagacgccgccgcggtgcccggtgccgctgctgttgctgctgctcctgggggcggcgcgggccggcgccctggagatccagcgtcggttcccctcgcccacgcccaccaacaacttcgccctggacggcgcggcggggaccgtgtacctggcggccgtcaaccgcctctatcagctgtcgggcgccaacctgagcctggaggccgaggcggccgtgggcccggtgcccgacagcccgctgtgtcacgctccgcagctgccgcaggcctcgtgcgagcacccgcggcgcctcacggacaactacaacaagatcctgcagctggaccccggccagggcctggtagtcgtgtgcgggtccatctaccagggcttctgccagctgcggcgccggggtaacatctcggccgtggccgtgcgcttcccgcccgccgcgccgcccgccgagcccgtcacggtgttccccagcatgctgaacgtggcggccaaccacccgaacgcgtccaccgtggggctagttctgcctcccgccgcgggcgcggggggcagccgcctgctcgtgggcgccacgtacaccggttacggcagctccttcttcccgcgcaaccgcagcctggaggaccaccgcttcgagaacacgcccgagatcgccatccgctccctggacacgcgcggcgacctggccaagctcttcaccttcgacctcaacccctccgacgacaacatcctcaagatcaagcagggcgccaaggagcagcacaagctgggcttcgtgagcgccttcctgcacccgtccgacccgccgccgggtgcacagtcctacgcgtacctggcgctcaacagcgaggcgcgcgcgggcgacaaggagagccaggcgcggagcctgctggcgcgcatctgcctgccccacggcgccggcggcgacgccaagaagctcaccgagtcctacatccagttgggcttgcagtgcgcgggcggcgcgggccgcggcgacctctacagccgcctggtgtcggtcttcccagcccgggagcggctctttgctgtcttcgagcggccccaggggtcccccgcggcccgcgctgctccggccgcactctgcgccttccgcttcgccgacgtgcgagccgccatccgagctgcgcgcaccgcctgcttcgtggaaccggcgcccgacgtggtggcggtgctcgacagcgtggtgcagggcacgggaccggcctgcgagcgcaagctcaacatccagctccagccagagcagctggactgtggagctgctcacctgcagcacccgctgtccatcctgcagcccctgaaggccacgcccgtgttccgcgccccgggcctcacctccgtggccgtggccagcgtcaacaactacacagcggtcttcctgggcacggtcaacgggaggcttctcaagatcaacctgaacgagagcatgcaggtggtgagcaggcgggtggtgactgtggcctatggggagcccgtgcaccatgtcatgcagtttgacccagcagactccggttacctttacctgatgacgtcccaccagatggccagggtgaaggtcgccgcctgcaacgtgcactccacctgtggggactgcgtgggtgcggcggacgcctactgcggctggtgtgccctggagacgcggtgcaccttgcagcaggactgcaccaattccagccagcagcatttctggaccagtgccagcgagggccccagccgctgtcctgccatgaccgtcctgccttccgagatcgatgtgcgccaggagtacccaggcatgatcctgcagatctcgggcagcctgcccagcctcagtggcatggagatggcctgtgactatgggaacaacatccgcactgtggctcgggtcccaggccctgcctttggtcaccagattgcctactgcaacctcctgccgagggaccagtttccgcccttcccccccaaccaggaccacgtgactgttgagatgtctgtgagggtcaatgggcggaacatcgtcaaggccaatttcaccatctacgactgcagccgcactgcacaagtgtacccccacacagcctgtaccagctgcctgtcggcacagtggccctgtttctggtgcagccagcagcactcctgtgtttccaaccagtctcggtgcgaggcctcaccaaaccccacgagccctcaggactgcccccggaccctgctctcacccctggcacccgtgcctacgggtggctcccagaacatcctggtgcctctggccaacactgcctttttccagggtgcagccctggagtgtagttttgggctggaggagatcttcgaggctgtgtgggtgaatgagtctgttgtacgctgtgaccaggtggtgctgcacacgacccggaagagccaggtgttcccgctcagcctccaactaaaggggcggccagcccgattcctggacagccctgagcccatgacagtcatggtctataactgtgccatgggcagccccgactgttcccagtgcctgggccgcgaagacctgggtcacctgtgtatgtggagtgatggctgccgcctgcgggggcctctgcagcccatggctggcacctgccccgcccccgagatccgcgcgattgagcccctgagtggcccgttggacggtgggaccctgctgaccatccgaggaaggaacctgggccggcggctcagtgacgtggcccacggcgtgtggattggtggtgtggcctgtgagccactgcctgacagatacacggtgtcggaggagatcgtgtgtgtcacagggccagccccaggaccactctcaggtgtggtgaccgtgaacgcctctaaggagggcaagtcccgggaccgcttctcctacgtgctgcccctggtccactccctggagcctaccatgggccccaaggccgggggcaccaggatcaccatccatgggaatgacctccatgtaggctccgagctccaggtcctggtgaacgacacagacccctgcacggagctgatgcgcacagataccagcatcgcctgcaccatgcctgagggggccctgccggctccggtgcctgtgtgtgtgcgcttcgagcgtcggggctgcgtgcacggcaacctcaccttctggtacatgcagaacccggtcatcacggccatcagtccccgccgcagccctgtcagtggcggcaggaccatcacagtggctggtgagcgtttccacatggtgcagaatgtgtccatggccgtccaccacattggccgggagcccacgctctgcaaggttctcaactccaccctcatcacctgcccgtcccccggggccctgagcaacgcatcagcgccagtggacttcttcatcaatgggcgggcctacgcagacgaggtggctgtggctgaggagctactggaccccgaggaggcacagcggggcagcaggttccgcctggactacctccccaacccacagttctctacggccaagagggagaagtggatcaagcaccaccccggggagcctctcaccctcgttatccacgtgagcaccaaaggggccgggaaggagcaggacagcctggggctccagagtcacgagtaccgggtcaagataggccaagtaagctgcgacatccagattgtctctgacagaatcatccactgctcggtcaacgagtccctgggcgcggccgtggggcagctgcccatcacaatccaggtagggaacttcaaccagaccatcgccacactgcagctggggggcagcgagacggccatcatcgtgtccatcgtcatctgcagcgtcctgctgctgctctccgtggtggccctgttcgtcttctgtaccaagagccgacgtgctgagcgttactggcagaagacgctgctgcagatggaggagatggaatctcagatccgagaggaaatccgcaaaggcttcgctgagctgcagacagacatgacagatctcaccaaggagctgaaccgcagccagggcatccccttcctggagtataagcacttcgtgacccgcaccttcttccccaagtgttcctccctttatgaagagcgttacgtgctgccctcccagaccctcaactcccagggcagctcccaggcacaggaaacccacccactgctgggagagtggaagattcctgagagctgccggcccaacatggaagagggaattagcttgttctcctcactactcgacaacaagcacttcctcatcgtctttgtccacgcgctggagcagcagaaggactttgcggtgcgcgacaggtgcagcctggcctcgctgctgaccatcgcgctgcacggcaagctggagtactacaccagcatcatgaaggagctgctggtggacctcattgatgcctcggccgccaagaaccccaagctcatgctgcggcgcacagagtctgtggtggagaagatgctcaccaactggatgtccatctgcatgtacagctgtctgcgggagacggtgggggagccattcttcctgctgctgtgtgccatcaagcagcaaatcaacaagggctccatcgacgccatcacaggcaaggcccgctacacactcaatgaggagtggctgctgcgggagaacatcgaggccaagccccggaacctgaacgtgtccttccagggctgtggcatggactcgctgagcgtgcgggccatggacaccgacacgctgacacaggtcaaggagaagatcctggaggccttctgcaagaatgtgccctactcccagtggccgcgtgcagaggacgtcgaccttgagtggttcgcctccagcacacagagctacatccttcgggacctggacgacacctcagtggtggaagacggccgcaagaagcttaacacgctggcccattacaagatccctgaaggtgcctccctggccatgagtctcatagacaagaaggacaacacactgggccgagtgaaagacttggacacagagaagtatttccatttggtgctgcctacggacgagctggcggagcccaagaagtctcaccggcagagccatcgcaagaaggtgctcccggaaatctacctgacccgcctgctctccaccaagggcacgttgcagaagtttctggatgacctgttcaaggccattctgagtatccgtgaagacaagcccccactggctgtcaagtactttttcgacttcctggaggagcaggctgagaagaggggaatctccgaccccgacaccctacacatctggaagaccaacagccttcctctccggttctgggtgaacatcctgaagaacccccagtttgtctttgacatcgacaagacagaccacatcgacgcctgcctttcagtcatcgcgcaggccttcatcgacgcctgctccatctctgacctgcagctgggcaaggattcgccaaccaacaagctcctctacgccaaggagattcctgagtaccggaagatcgtgcagcgctactacaagcagatccaggacatgacgccgctcagcgagcaagagatgaatgcccatctggccgaggagtcgaggaaataccagaatgagttcaacaccaatgtggccatggcagagatttataagtacgccaagaggtatcggccgcagatcatggccgcgctggaggccaaccccacggcccggaggacacaactgcagcacaagtttgagcaggtggtggctttgatggaggacaacatctacgagtgctacagtgaggcctgagacacatggagagttggtcaggctgctgctgggagaaatggacgcccactgggcctcaacttgatcttctaccccgtgcctgtgactcagactgggaaatactgagcagagacggctggggcgggggcaggaggaggggctgctctctgagacaggggcgcccccgccttgacccctgggcacctccatcccctcccacctgtccccagatcagtctctgggatggaggccagagagctggtcaggctcccccatctgcccagcacggcctgcactgtgcccacccacttgctccacaacgtccagttggtcctgctgccaagagccccgtgcatccaggcggccaagcacaaactgggggagaggaggccgccagcccggaggctgcagcccagaaactctacctcatccacactggtgcagggagccctccttgaactgacctttgattggtttctgcttcaactaccaaaatgttatctccacttccccctcacccgtagaggatcctggccacagacagtttcaagtagtgtcagatttttgttgcttgggcggctgttggtagagtgggcagtgcccgcgccatggggtgctctgtgggcttctccaggagcagggagggtggaggggagggatggggggcacaggagctgggagccccgtctccaggaaaaggagaggggttaagatgcaccgaggctgtagctgggctacttgatcttgctgaaagtgtttctaaagatagcaccacttttttttttaaagcttttatatattaaaaaacgtatcatgcaccaactgtgaatagctgccgcttgcgcaaaggacccggggaggggtcccgagaggctccccatgcaacactggaaatgactgttccagagagcgggcagacctggcagagcgcccctggcgcctgagactaccacccactccgttcctgccagaaacgaccctctgtggccgatgggccatgcgggcccctcgcagccaactcagccagtgttgggactggctcagagcccatgggggctggaggggggcagctgggactctggaatcttctttataataaaagccttacggacaaaaaaaaaa

SEQ ID NO: 88921 - DNA, 503 bp, Homo sapiens
  misc_feature (1)...(503): n = a,t,c or g
tgcggcatgaaaaactgagtagctgtacgcctgcacgnaccggnccggaattccggggtcgaggggaggcaggaggctgtgcacggtaccctggtgtagtgatggggagctagaggtgctgtgcacggtaggctggtgcagagatggggagctggaggtgctgtgcacagtgccctggtgcagtgatggggagctagaggtgctgtgcacggtgccctggtgcagtgatggggagcaagaggtgctgtgcacagtgccctggtgcagtgatggggagcaagaggtgctgtgcacggtaccctggtgcagtgatggggagctagaggtgctgtgcacggtgccctggtgcagtgatggggagctagaggtgctgtgcacggtaccctggtgcaatgatggggagctagaggtgctgtgcacggtaccctggtgcagtgatggggagctagaggtgctgtgcacagtgccctggtgcaatgatggggagctagaggtgctgtgct

SEQ ID NO: 88922 - DNA, 654 bp, Homo sapiens
  misc_feature (1)...(654): n = a,t,c or g
ttgttgggaggtggacgcggagacgctgacgaccatgatggaggcataggtgttgatctgtttcaggttctcattggtcttgcacttgtccaggctgttgcccatttcctgggggcgagcagagaagataggggaggctcgggaactcaggaaggctcgagaacctctcttgctcagcacctcctcaggtctcttcttagggacactgggacagtcagggtctctgcactgggggcctctcctgcctccaccgcctgaagcatccacaccattcctgcctccaccacgtcaagcatccacaccatctgccctgctttcgctgacctggaaacggagcccgggcagagtggcgtctggaaagactgtggcctcacaagcctctggcctgcgtcaagtcggagtgcaaatccgcggcctcgcttccctgcaggggcttccccaccgccatcctaatcctttcctggacatgcgtggggacctcctcctctccccgccctcacgcacacctgcccctcttttccgaaacccttccttggctttctcctaagacccaaaggctggacgtgatccgacctcttccccgtcttctcccccctcccgtggaatcnnnaattnctncgccnatgcgtaacagctatcgatntcaatnccccg

SEQ ID NO: 88923 - DNA, 392 bp, Homo sapiens
tgcagcccagccccctctttcactcccacctggagaccctgcagctgctgaggactgcacagctcccagaacaggtgagctggccttgggggcaggtggcaaatgggaaggggaaccaaaggaacatggggtccccccaaccctccctcctggcgtttgaaagaaacctggaactccagattatgggtcttgggtattccctattgatggggaaactgaggcctagggtggcaaaggacaccctaagggtacacagggactcaaccccttcacctctaaccctcaaggattagcatttgtgaagctgaaattctttgatctggtcctcaaatgccgggaaggacctgaacaaatgagatgaggttgtcttcaggttcccaccaccctgctct

SEQ ID NO: 88924 - DNA, 409 bp, Homo sapiens
cgcgcgccggggcagatccagacacacggaatcccgccccagatgatgggcggcccgctgcagtcgtcctccagtgaggggcctcagcagaatatgtgggcagcacgcaatgatatgccttatccctaccagaacaggcagggccctggcggccctacacaggcgcccccttacccaggcatgaaccgcacagacgatatgatggtacccgatcagaggataaatcatgagagccagtggccttctcacgtcagccagcgtcagccttatatgtcgtcctcagcctccatgcagcccatcacacgcccaccacagccgtcctaccagacgccaccgtcactgccaaatcacatctccagggcgcccagcccagcgtccttccagcgctccctggagaaccgcatgtctc

SEQ ID NO: 88925 - DNA, 685 bp, Homo sapiens
  misc_feature (1)...(685): n = a,t,c or g
gcggccgcggagccggcagactcgggcctggagcggctggtgcgcgcgctgtgcacgcccggctacaacgcccgcgcgcccctgcactacctagcgccgctgctctccaacctcagccaacgccctgcggcgcgggccttcctactggaccccgacaggtgcgtggtccagcggctgctgccccttacccagtaccccgactcctctgtacgcaggggcggggtggtggggacgctgcggaattgctgcttcgagcaccgacatcacgagtggttgcttggacctgaggtggacattctcccctttttgctcctgcccttggctgggcctgaggatttctccgaggaagagatggaacggctgcctgtcgacttgcagtacctgccaccagacaagcagcgagaacctgatgcagacatccgcaagatgcttgttgaagccatcatgctgctgacagccacagcaccaggtcggcagcaggtgcgggaccagggagcctacctgatccttcgagagctgcacagctgggagccggagcccgacgtgcggacggcttgtgagaagctcatccaggtgcttattggggacgagcctgaacgtggcatggaaaacctgctggaggtgcaggtgcctgaggatgtggagcagcagctgcagcagctggattgcagggagcangagcagg

SEQ ID NO: 88926 - DNA, 1204 bp, Homo sapiens
ttccttaagtgcatgaggaaggccttccgctcaagcaagctgctgcaggtggggtacacacctgatggcaaggacgactaccggtggtgcttcagggtggacgaggtgaactggaccacctggaacaccaacgtgggcatcatcaacgaagacccgggcaactgtgagggcgtcaagcgcaccctgagcttctccctgcggtcaagcagagtttcaggcagacactggaagaactttgccctggtcccccttttaagagaggcaagtgctcgagataggcagtctgctcagcccgaggaagtttatctgcgacagttttcagggtctctaaagccagaggacgctgaggtcttcaagagtcctgccgcttccggggagaagtgaggacgtcacgcagacagcactgtcaacactgggccttaggagaccccgttgccacggggggctgctgagggaacaccagtgctctgtcagcagcctggcctggtctgtgcctgcccagcatgttcccaaatctgtgctggacaagctgtgggaagcgttcttggaagcatggggagtgatgtacatccaaccgtcactgtccccaagtgaatctcctaacagactttcaggtttttactcactttactaaacagtttggatggtcagtctctactgggacatgttaggcccttggtttctttgattttattcttttttttgagacagaatttcactcttctcacccaggctggaatgcagtggcacaattttggctccctgcaacctccgcctcctggattccagcaattctcctgcctcggcttcccaagtagctgggattacaggcacgtgccaccatgtctggctaattttttgtattttttaaatagatatggggtttcgccatgttggccaggctggtctcgaactcctgacctcaggtgatccacccacctcggcctcccaaagtgctgggattacaggagtgagccaccatggccgacacaaaaaatatttcttaaatgatgatgatgatgtgatagaaatctacacgattactcagacagatcaagagcaggctggagtaccacaacaatgccgcccggggctccaacttaccactagcgtccgggaggaagaccaggcagcggtcgccgcggcggcagctagacgagaaacggactcggctgcaatcgcccagcggagcccgcggcagtcg

SEQ ID NO: 88927 - DNA, 468 bp, Homo sapiens
  misc_feature (1)...(468): n = a,t,c or g
gcgggtttgaagcgtttggaagacgtccggacggagtaccgggcccgaagtcccgcgtccacccacgcgtacgaggccaagagggtggagagagccctggcacaaggaaacggcagagtgccccaccagcgccaaagtgtcacgtgcgcgctgaatgtgggaagagctttggccgaaggcaccaccttgtgagacactgtctgacccacactggggagaaacccttccagtgccctcgctgtgagaagagctttggccgaaaacatcacctggacaggcacctgctcacccaccagggactaagtacccggaacagctgggacagaggaacatccgtcttttgaaatctgttttcactacagctatggccaagcctatcaaccggtgctaccatgagtcactgtcagggctgccgttctcctgaaccccagtggacataattatatgccctgagcccatccctagaan

SEQ ID NO: 88928 - DNA, 422 bp, Homo sapiens
ttgtacagactgtgggcaagtagctacatataggacagatttggaaatccatgtgaaaaggtgccatgccagagagatgaaattttactgccgtacttgtgacttctctagtatgtcaagaagggacttagatgaacatttgcacagtaaccagcatcagcaaactgcttctgtcctgagttgtcagggttgttcatttatatccttggatgaaataaatcttagagaccacatgaaggaaaagcacaatatgcattttctttgcaccccttgtaatctgttctttttgtctgaaaaagatgtggaagaacacaaagccaccgagaagcatattaattcattggtcaaccaaagactttgcaatcatctaacagggatttggttttacagactttacctttgagtactttagaatcagaaat

SEQ ID NO: 88929 - DNA, 406 bp, Homo sapiens
caagcccagaacgcaattttgatgtttcatcaatattcttttagaggaaaagacttaatagtccagcttcagccaacagatgctttgttgtgtattaccaacgtgcccatttcttttacatcagaagagtttgaagaacttgttcgtgcttatggaaatattgagagatgttttctggtctatagtgaagttactggccattccaaaggctatggatttgtggaatacatgaaaaaggactttgctgcaaaggctagactggagctattgggtagacagttgggagcatcagcactctttgcacaatggatggatgttaatctattggcttcagagctcattcattctaagtgcctttgtattgataaactccccagtgactacagggattcagaagagctgttgg

SEQ ID NO: 88930 - DNA, 1631 bp, Homo sapiens
ccggaattcccgggtcccgatttcgtgcggggcctggaggagcctacaccgactctggaggaagactggagcctttgcggcggcgctgcccctcccctggtccccgcgagctcggagggcccggctggtgctgcgggggccccgggaggttgaaaactaagcatggggaagagctgcaaggtggtcgtgtgtggccaggcgtctgtgggcaaaacttcaatcctggagcagcttctgtatgggaaccatgtagtgggttcggagatgatcgagacgcaggaggacatctacgtgggctccattgagacagaccggggggtgcgagagcaggtgcgtttctatgacacccgggggctccgagatggggccgaactgccccgacactgcttctcttgcactgatggctacgtcctggtctatagcacagatagcagagagtcttttcagcgtgtggagctgctcaagaaggagattgacaaatccaaggacaagaaggaggtcaccatcgtggtccttggcaacaagtgtgacttacaggagcagcggcgtgtagacccagatgtggctcagcactgggccaagtcagagaaggtgaagctgtgggaggtgtcagtggcggaccggcgctccctcctggagccctttgtctacttggccagcaagatgacgcaaccccagagcaagtctgccttccccctcagccggaagaacaagggcagcggctccttggatggctgaagagctgccgttcctctttcacgatcccagccccatttcagtgtctggggctctggtagatgtgttgagggcaaagtagaggacaagctgtctttcccagtcagccagggagctccccgccaggccacgccccagccactttgctccctctcacctctgggaagtgcaaatactcttggttgacatccccttcctcagccctcccagcctactccccatcccagcttttagaggatctgctccactgtctcctggggcagttgtgggtcactgtcccttccagctgccccagacaggaagcagagtcaccacgcagcagtgtcccttcttgggtctgagttcctattataggtaggggccccaccctctgggcttcccatcagcgacacacacacacttatggcaccagcctggactccagaaaaagggtgtccaggtattgtgtgtatgcatttagttgtgcacacacaaatatgctcctatactggcattaggcgtctcctcatccctcaccctgacctttctcctgtccttttcttggctggaagaagttggcctcctgggagtgtagttttctgttttaaatcccccacccctggctgggctcagtggctcacccctgtaatcccagcactttgggaggccaaggcgggtcgattacttgaggtcaggagttcacgaccagcctggccgtcgattgtgaaaccccatctctgccagttttacaaaagttagccgggcgttagtggcacatgccttgttaatcccagcttacccggggaggcttgaggcagggagaattgcttgaactcaggaagggcggaagcttgcagttgagccgagactcgtgccactgcactccagcctggtcaacagagcaagactccatctcg

SEQ ID NO: 88931 - DNA, 466 bp, Homo sapiens
gccggagcccatgcgcagcggggcgcgcgagctcgcgctcttcctgacccccgagcctggggccgaggcgaaggaggtggaggagaccatcgagggcatgctcctcaggctggaagagttttgcagcctggctgacctgatcaggagtgatacttcacagatcctggaggaaaacatcccagtccttaaggccaaactgacagaaatgcgtggcatctatgccaaagtggaccggctagaggccttcgtcaagatggttggacaccacgtcgccttcctggaagcagacgtgcttcaggctgagcgggaccatggggccttccctcaggccctgcggaggtggctgggatccgcagggctcccctccttcaggaacaagtcacctgcaccggtgcccgtgacgtacgagcctgcccacagccttgaggatccttccaataaaggtgtcaagagctcaaaaaaaaaa

SEQ ID NO: 88932 - DNA, 859 bp, Homo sapiens
aacgatttcgtctggggacgactggctggtggaatccttgcgcttgtaaatcgtacggggctgggacatgggagctgggcctggagcttgcctggcgggcggatgggtgtgggtggaggcacgttggggatcctggtgcagagtgggccagctgtggcctcggggctcgccaccgtggaggactccgcctgggcctaggcccccatctctaggaaatggctccttcctgcgtgcgcgcgttgtgagattactagtaggagccgcgcttgtgaagacgcagtgcccagttagtttgcgccagcctctgagttcagctcagaacacagatgatctcattgattcctcacgtcaaccttgggaaatctgggtaccctgggacgtccacacatgaggaccgaggctcagggacatcaagggactggcctggtcccagaaacagggagtaaaatgggaagtaaactcagtcccacgtctgcctgactccagagtttgggccactgaaccatgcggctgccatcttggagttctttgagctgtgaagtgctgtgcatcgtgtgattctgtgtcccttttgtgcaggtaccaggatttctatgcattcgacctgtcaggagccactcgagtccttgaatggattgatgacaaaggagtctttgttgctggctatgaaagcctgaaaaagaatgaaattcttcatctgaaattacctctcagactttctgtaaaggaaaacaagggcttattcccagaaagagatttcaaagcgcgccatggaggattttcagacaggtctatctttgatctaaagcatgtgccacataccagattgctggttaccagtggccttccaggttgttat

SEQ ID NO: 88933 - DNA, 5567 bp, Homo sapiens
ggccgcggggcccccaggcctggaggccgaggggcgggcgccggagagcgcgggccccgggcccgggggtgacgccgcggagacccccggcctgcccccggcccacagcgggaccctcatgatggctttccgggacgtcacggtgcagatcgccaaccagaacatatccgtctcctcctccacggctctgtcggtggccaactgcctgggcgctcagacggtccaggcccccgcagagcccgcggcgggcaaggccgagcagggcgagacctctgggcgggaggccccggaagcccccgctgtgggccgggaggacgcgtcagccgaggactcatgcgcagaggctggggctagtggggcggcggatggggccacagcccccaaaacagaggaggaagaggaggaggaggagacggcggaggtggggagaggggccgaggccgaggcaggcgacttggagcagctgaacagaaccagcacgtccaccaagtccgccaagtcaggctcggaggcgtcggcctccgcctccaaggacgccctgcaggccatgatcctgagcctgccgcgctaccactgcgagaacccagccagctgcaagtcgcccacgctctccaccgacaccctgcgcaagcggctctaccgcatcggcctcaacctcttcaacataaaccccgacaagggcatccagttcctgatctcacgcggcttcatcccggacacccccatcggtgtggcccatttcctcctccagcgaaagggcctcagccgccagatgattggagagttcctgggcaacagcaagaagcagttcaaccgcgacgtgctggactgcgtggtggacgagatggacttctccagcatggagctggacgaggccctgcgcaagttccaggcacacatccgtgtgcagggggaggctcagaaggtggagcggctcattgaggccttcagccagcgctactgcatgtgcaaccccgaagtggttcagcagttccacaaccccgacactatcttcatcctcgccttcgccatcatcctcctcaacaccgacatgtacagccccaacatcaagcctgaccggaagatgatgctggaggacttcatccgaaaccttcgaggtgtggacgatggcgctgacatccccagggagctggtggtaggcatctatgagaggatacagcagaaggagctcaagtccaatgaggaccacgtcacgtacgtcaccaaggtggagaagtccattgtgggcatgaagacagtgctgtccgtgccccaccgccgcctggtgtgctgcagccggctcttcgaggtgacggatgtgaacaagctgcagaagcaggcagcgcatcagagggaggtgttcctcttcaatgacctgctggtgattctcaaactttgcccgaagaagaagagctcctccacgtacaccttctgcaagtcagttggcctgctgggcatgcagttccagctctttgagaacgagtattactctcatggcatcacactggtgaccccgctctcgggctccgagaagaagcaggtgctgcatttctgtgccctgggctcggacgagatgcagaagttcgtggaggacctgaaggagtccattgctgaggtgacggagctggagcagatccgaatagagtgggagctggagaagcagcagggaacaaagacactctccttcaagccctgcggagcccagggggacccacagtcaaagcaaggatcgccgacagccaaaagggaagccgcgctcagggagaggccggcggagagcacggtggaggtgtcaattcacaacaggcttcaaacgtcccagcacaactccgggctgggggccgagaggggagcgccggtgccgccgccagacctgcagcctagccccccgagacagcagaccccaccactgccgccgccgccacccacgcccccgggcaccctggtgcagtgccagcaaattgtcaaggtcattgtcctggacaagccctgcctggcccgcatggagcccctgctgagccaggctctctcctgctacacctcgtcgtcctctgactcctgcggctccacacccctgggcggccccggctctccggtcaaggtcacccaccagcctccgctgcccccgcccccacccccctacaaccaccctcaccagttctgtcccccaggctccctgctgcacgggcaccgctactccagtggctcaaggagcctggtgtagactctgccccaccaccctgctgtcctgggagggctggccactggggggcctgggctgcccctccactgctccccataccctggcacgatgcgttcctggtcactgatcaccatcattttgggaagagaatcccaatccctggcacctgggtttgcctcatccaaccatccttccctttctcagctgcaccccctctgcagatctgaagacacacctcactctcccagggccctacacagccagacccggcgaggcctcctcttcccctggccaccactttcccccattggaccatggactgaagaaaacgagctgagggtctaacgagcttgcaggctttgagtctgttagtgcccggggcctcgggccttgggcagcagcatgaggctgggccggccggcagtggagcactagacagagtggctggctcgcagcccagaactagtgcctctgtagctgcactgaggggaggagggttggtcccacccctggagggacaggtgggaggagtgaggagggggctttttctgccacccccgcccccaagcctgaaactctcaggagtctacttcttggtccccagggacattggctgtcctgaccatgtccttccccctcctcccagggcctctgcttcctcaggagctgcccagactccagaaaagcctggaaaaagggaggcgggaaggggagcactttcggctttctataggtcagtccagcagggccatgggatcgcgaggtcatgtatctgcaaaatgcacctttttaaagagtgtcttagttccccagccccagctaatacccggccaatgccgtgtacgcacaggcatgtgcacgcaaacacgcatgagaaccaggccattccttccgctgtggaagcagaactggagacggggcaggaatgtgcccagcagagatggggctcagcccgaggcagggctccctcctgcatgaggctcggcccgaggcagggctccctcctgcatgagtctgtggcctccaggagggacttgggtgcagatgtaagcaagaaaaaccggggctccagaggcatgtgcatttcccctgcgcccctcagcctttaaatattccctcctcctagaagggtctagaccccccccttccagcaggggtgcccaagagtccctggaccctcaaaattgcaaaggagacccaagcggggctcgctgacctcccagggcccagcaagatgggatagccagccttaggtggccccacgagcccaagcctggggaagggcccctccccagccagacgagaggcagccaccccagagaccacaggagccgtaccatggcctgcgcagtcaggccctatcaggatgtgtctgtcccaagcctggccaggctccagtcctgtgccagtagctcactgctgtcctatgtgcaggtcccccaacacttggagcctgtggttaaggcctcctgggagaggcagtgagcatgagtcaaaggtgacatggacttgaatctccccaccccgccccgcctgcagtagccgggccaggtaggaggcaaggatcattccctgctcccagaggttccagatgacctagtttcgttttgtgtgtgtgtgtgtgtggtcacccagacgtcactgtgatatcacctagtgaatctatttctggccctgtcttcgtcggcccagtttctgtaacttgcagccaatttgccctctcccctgtggctgccagcccacctgcccctctgtgtccttgctgccctggccctcctctgttttctgtaacagatgctccagtcattgcctttcagagtggagcagatgacagatggggtgcacgcattcagacacctctgatgcccttagccagggcagggatcgtccttaaagtgaaggcctggacaggaggagtcagggacttgggaggaggtggagctgtggggatgggagtggaggaatcaaaatgagggaagctgaaaatagaatgaaaacgatgactaagaggcagggagtgcgaggtatgggggaataggaactatgagctaaatatacttatggggtgggggccgtgggggccagggacactctcccagacagccctgacccgccaggcaggaccccgtcccctgctcacacagcttttcaagcttaccaaggacaggcaggaccccgtcccctgctcacacagctcttcaaacttaccaagtgccctctcccctgttgagggcacagcaaccccaggccctccctcccacctcagctgaagccccaatcttccaaatcggaaccagcaagtcttagggctggcacgcatctgggcctctagctgagaacccggactctcaggcacctcagtgcccctgccccagggcagaggcccaccccgtgggttggtgcagtggctgccctgggctccacgggcagcacagggagtctgtccaggaagcagcccagccggggtcagtattccgtggagccagtcctgagctgggaggggcatttaacacccctgagggcctggggcaggacacagctggccctcctcattgtcaggggaagcaagtgcccaacatctgtaacctcccttccctgctcagtccccagggccaaggttgggacccctctccatccctgtccccagagcctagacctcagggacctaggaaaagcctcctgctccctccccacggcagcagacagggcagggcctccagcccccagagggccggtggggggtgctctcgggccttcctgctctcctaaggttgcggggacagtagagtgctgagccccagacccagtcaccccaagatggccccactctatccactctctagacctttgggaaatctgggtccctctcctgatttgatccattcggccccaactccagagtcgggaatgggagatgaaactaggtttccacccacttttggacaagtcccacccctagatctgaagcaagctctaccagcagcgtgtcctggaagcatgcctgcatgctgcctgcctgcctgcccgtctgcacaggtgtcttgatccagccctgcgtcttcgagcccctgtgccaccggtccccacggcccgccaggagtctctttgtacccactaggcttccctgatgaccatctgtctgtccgtccctgtttttgctgtacataactcctgctgcaccctctccccgcacacccgtcacccatgagagagagaaacctctctagggaaaggcagggtggctgcacccagcaactaatccaaatggcaaatattttgtaacaaaatagcccagaggtattttatctgttcaattcatagagttttagagattatattgaaagatgtcacttgaaaaaaaaaa

SEQ ID NO: 88934 - DNA, 1246 bp, Homo sapiens
tttcgtgccgtcgtggctcgttccattctcggcggtggtacctgctcccggtggccctgaggacgtgtgggccaggggcggccccgaaattaggaagcggagggggagcagtctgcaggtctgcggggctaagtgtcgcggcggcgcacctcgcgtcaagaatccggaggaggagactgcaaggataggcccaggagtaatggagtccaaagaggaactagcggcaaacaatctcaacggggaaaatgcccaacaagaaaacgaaggaggggagcaggcccccacgcagaatgaagaagaatcccgccatttgggagggggtgaaggccagaagcctggaggaaatatcaggcgggggcgagttaggcgacttgtccctaattttcgatgggccatacctaataggcatattgagcacaatgaagcgagagatgatgtagaaaggtttgtagggcagatgatggaaatcaagagaaagactagggaacagcagatgaggcactatatgcgcttccaaactcctgaacctgacaaccattatgacttttgcctcataccttgaatcctaaaagttttcgctgaggttaatgtgaacactgctttacaagcttgtatttttgtgatttactttttctgtaagccttttggggtttacacttaccagtttctaatggaaattagaattctaattgaatattgttttgtctcagcctaaaagttacggtcagcatggcaattcacctattttaggaaaaatactcttttcataatatgaaatgcataaagcagttcaaaaagcagtctgtattccatcatcttcctttttcattccagtccttatttttgtaagtattacttttcctcctccggctacctggactcaaaatctcagttgtctttgacagtttttttcttgtccctgaccaaaaaagaatgatcatacccagaattcaatgtttgatattttaagaatgtatgttctagtgtttttcagagtgagtctaccatctgtataaaaacaccttgggggcaggcaggggcatttaaaaatgtaggacctatcgtccagactcacagagtggggctccagaatctccatttttaacaaactctcttaagtaattctgatgtgtaccaaaatcagtgccattggtgtgtgtgtacgtaactatatacatatgtgtgtgtgtgtatatatataatgtgtcataaccgtaaacaataaacaatatcaagataaatctga

SEQ ID NO: 88935 - DNA, 472 bp, Homo sapiens
  misc_feature (1)...(472): n = a,t,c or g
agagaacggattgcagtcatgcgcnacccgnnnggaattcccgggtngnaactcttcgtgcggcggctgcggcggaggtggcggcggctgcttcatggagtgttactacattgtcatcagctccacgcatctcagcaacggacactttcgcaacatcaagggagttttccggggccctctcagcaagaacgggaacaaaactctggtaatcgcttctgttttcctctctctctctctctcatattaaagagggcatttggaagattgagtttttggaggttttgagattcagtttggtttataattcactcatttttttatctggcgggcgtggggtgagaattgggtgtaaaaaaaggaaggggtcttagggaagctgtgatccatggctttggttgacacttccacaatgctctggactatctcacctcactccattaagctgaagattaccacagtctcttcttatttg

SEQ ID NO: 88936 - DNA, 1262 bp, Homo sapiens
gaggttcaggctgaagtgcaatggtgcaatctcagctcactgcaacctctgtctcccgggttcaaatgattctcctgcctcagcctcccaagtagctgggattacaggttttaggtagaggaatttcaggaagcattggagtagtggcttctatcaatgaacaggaaggtatagctacagtcagattcccacccatagactgtagaaagacttcgcaagcgtcagacacattgactattccattgtctagactttgtgttccaagatcagaggcattgcctcttcataaactgtccattactgagaaggtagtacaggcagtccagtccatgttgcttcctcaggagggaagtctctctattcacacctcacttcctgcaacaggagatgggtcagctcctgtgatggcagtcgttcggctccttgctgaaataaggacaagagcatgcctggtcatggcccagcttttagaagacagcttattttgtgaagaattcatacaacaatgtccagcagctgttgaagttcttaacctagtagcccaggaatgtagtgctggagagcgacttgcagttgtggaggtacagtgtgaacggctgaggatgctctaccgggactgtgctcggcccccaccacctcctttgcaggctgaccgaagacagcccaaagagattacttggagcccctcgcgagtgtttccgcctgttcgagcctgcatgttctcatctcaccttacctcagtcaccttcctggctgaccccagcgctgggggaggcctgccccggggcacttttatctatgccacttcaccactgccagttcaggccccgtctttttactgggaaattgaaatcgtttcctatggagacaccgatgatgacaccggacccatagtttcctttggcttcactacagaagcagagaagcgagatggggcttggactaatccagtgggcacttgtcttttccataagtaagtaaaaaaagtagctcagtgtgacagatagcagtagcctcccacaaggtgtgtataggtgttcaggaagtcaaaatagagttctgtcttcaagtgagtttggggaaaggagagcattatttttcctttctggagattttcagggcacattagtaagattccttcctagttgacctgtaattttttaaaaatctgtttattttgcaaattctataaccctttattctaggaatacagtttgggaaatattggtgtgggtattttaatactaaagtgatactataat

SEQ ID NO: 88937 - DNA, 5451 bp, Homo sapiens; identical to SEQ ID NO: 64312

SEQ ID NO: 88938 - DNA, 1058 bp, Homo sapiens
ttttttttttttctataacaacatctcttactatttttacttgaaaaaatgttttgcgtagcagactgtcatagccttgaacgccggctccctttcttcctccctccaagtggctctggggctgttgatttccgcagagcttgggttggggtaggggctcagcctcaccagctttcagcagctggtttaggccagcagtgcctccccacctccccaaggggaggggtggtggcaagacctcagcacagtctgtggtatcacagggctcactggtagagcaggtagcgcttcatggcagggggcaagggcagggcagacacctggccgagccgggtatcccccaggttgtggcgcacacacaggcggctcaggtgcagaagggagtgtggctccgctctcctttcgcccaggtagcggatgcggacctggcactggccccagacagcgcttactgccggatagagggtcctgcccttcagtccgcggaatgctggccccaggtaggtgcccccaatagcgtagcccagagttccctcctccatgtccagaaccaccagcagtctctctggcacctccagctgctcaccctgagttcccgctggatactggggggctccgggccccttgctctgatggtacagcttcccccgcccgatgtcccagccccacgactcgctgttgctgcccagcagcgccgcgtagtggtcagtctgcagcggggcgagggccgtggccacgcccaccacggcatgcgtgcccctctgctctaggggccagctgatctcccaggcgtgcaggccccttgaatagcccctcttaccccgggccccatcagtgctctgggccacgggccgccgctcaaagtacaaccctccttccttgacctcgatgttctctgaacagtctttggggttccaaccgtggcgccgctgggcccccaggtcaggagggggtgcagacagcagctcttccaagccctcgggacaggagaggtcagggtacagggcctgtggcgtgggggtgctgctgctgccccctgccagagctgtctggcccat

SEQ ID NO: 88939 - DNA, 6046 bp, Homo sapiens
cgggtcctcagcctggaatcaccccttgagaaggaccccagagtcctcggcgcccagtccgtcccccgaggcagggcactgaaggggttaagtcccctggggctggattccgccttccggcttttcccagaccccagagccggtccctggaacactgcagtcctgagctctgggatggagcccgagactgcgctgtggggcccggatctgcagggtccggaacagagccccaacgatgctcacagaggtgccgagagtgaaaacgaagaggagagccctcggcaggaaagttctggggaggagatcatcatgggagacccggctcagagtccagaatccaaggactcaacagagatgtccctggagagatcctcccaggacccctctgtcccccagaaccccccaaccccactgggtcactccaatcccttggaccaccagatccccctggaccccccagccccggaggtagtccctaccccatctgactggaccaaggcctgcgaggccagctggcagtggggcgctctcaccacatggaacagccccccagtcgtccccgccaacgagcccagcctgcgggagctggtgcagggccgcccggcgggggcggagaagccctacatctgcaacgagtgcggcaagagcttcagccagtggtccaagctgctgcggcaccagcgcatccacacgggagagcggcccaacacctgctccgagtgcggcaagagcttcacgcagagctcgcacctggtgcagcaccagcgcacgcacaccggcgagaagccctacaagtgccccgactgcggcaagtgcttcagctggagctccaacctggtgcagcaccagcgcacgcacacgggagagaagccctacaagtgcacggagtgcgagaaagccttcacccagagcaccaacctcatcaagcaccagcgatcccacaccggcgagaagccctacaagtgcggcgagtgccgccgggctttctaccgcagctcggacctcatccagcaccaggccacccacacaggcgagaaaccctacaagtgccccgagtgcgggaagcgcttcggccagaaccacaacctcctcaagcaccagaagatccacgcgggcgagaagccataccgctgcaccgagtgcgggaagagcttcatccagagctcggagctgacccagcaccagcgcacgcacacaggcgagaagccctacgagtgcctagagtgcggcaagagcttcggccacagctccaccctcatcaagcaccagcggactcacctgcgcgaggacccgttcaagtgcccagtgtgcggcaagaccttcaccctgagcgccacgttgctgcggcaccagcgcacgcacacgggcgagcggccctacaagtgcccagagtgcggcaagagcttcagcgtcagctccaacctcatcaaccaccagcgcatccaccgcggcgagcggccctacatctgcgccgactgcggcaagagcttcatcatgagctccacccttatccgccaccagcgcatccacaccggtgagaagccctacaagtgttccgactgcggcaagagcttcatccgcagctcccaccttatccagcaccgccgcacgcacaccggcgagaagccctacaagtgccccgagtgcggcaagagcttcagccagagctccaaccttattacccacgtccgcacgcacatggacgagaacctgttcgtgtgctccgactgcgggaaggccttcctggaagcccacgagctggagcagcaccgggtgatccatgagagggggaagaccccagcgcgtagggcccagggcgacagcctgctggggctcggggacccctccctgctgaccccgccgccgggagccaagccgcacaagtgtctcgtgtgcggaaagggcttcaacgacgagggcatcttcatgcaacatcagaggatccacatcggagaaaacccctacaaaaatgcagacggcctcatcgcacacgcagcccccaaacctcctcagttacgatccccaaggctccctttcagagggaattcctaccccggggctgcggagggcagagcggaggcccccggacagccccttaagccgccggagggtcaggagggcttcagccagaggcgggggctgctgtcctccaagacctacatctgctcccactgcggagagagcttcctggatcgctctgtgctcctccagcatcagctcacccacggcaacgaaaagccctttctctttcctgattatagaattggcctaggggaaggcgcagggcccagccccttcttaagtgggaagccctttaaatgccctgaatgcaaacaaagctttggcctcagctctgagctgctgctgcaccagaaagtccatgcaggcgggaagagctcccataagagtccagagctggggaagagctcttccgtcctcctggagcatctcaggagccccctgggggccagaccctaccgctgctcagattgcagggcctccttcctcgaccgcgtggccctcacccggcaccaagaaacccacacccaggaaaaaccccccaatcccgaggacccccctccagaggcagtcaccctgtccacagatcaggaaggtgagggcgagacccctacccccacagagagcagcagccatggggaagggcaaaaccccaaaaccctagtggaagaaaagccctatctgtgccccgagtgtggagccggcttcacagaagtcgcagccctcctgctccataggagctgccacccaggtgtctccctgtgaaatgggtctggagaccaggggcctcgctctctccagagaggaacactggattttttcccccaaaaaaattacatggggaagggaggataaccctatcagatggtagtggagtggaggagaaagaaccctgggaaaaaatagtgcttttacatcagtgatgagaaaccctataaaattgttggtgggaagcacttataaggcagtagagaaaaactgttgggttagaaaccctataaatatgtaggaaaaaaaaaagccctttaagtctgtagcagaaaaaccctataaaccatagtggataaaagccctattaattgtaggaagaggtcccaatatgtctctgaacaaccctataaaattgtatcaaaatccttaggaaaatcctatagggtcggggaagtaccgcaatggcactgacccgggagtaacgaccctcagatgatgcagaaaacacctctccctcactgttccacaatgttctctcccagcagccctggacagttctcatggaggaagatgctcagctgggggagtggtgtgggaactgggtggaactgaaaaggaagaaaataggagaaaaataagtgaccaggggctctggagcccccagaggagataagacagagactaggaagaaaaggtcccactcactgcactggggtccttggggtttgaggacaatgttagatgcattgtgtgttttagggaaagaggcctatggaatcccttatcaaaaccccaaaatggggaagaaaaaacaaattggcaagcctttttaaaggctgaagtttggggtgcagaaacatggtcagtataagaatactgagaaaccaccacaaaaattagggggaagcagggggcagtttctgttagattgctttgaggggagcaaaccaaggtggggaaactgctcacatggaacccagctaactccaggccccttcttgcttccggaagcttgcgaaactgcaagtagcaggcaggtcccagctctcagagtgcaagggttctccccacaccaggcaggaccaccctttctccctgcccagccagggacttctactctgcaaggcctccagggatggcggttgcctcccaccacattctcaggtctcaccttcaggaggtttttcctgaaatctaactgccgccagtggcagctcatttcctcaaattctgtcctcagtggagagggagaaccgctgctagtcgacctccaaagaataaagcccttcagagacttagggcctgcgtgtgggcctccccagccttctccaagtcatcagggccacagaatttcttagaaagctttgattagccagcaacttgattttaaacttcagctattcatctttgttggtagcaaggctgccccgcaggataaggcagccctcctccctggtggggatccagacaccccacagactgagccacaggtccctgaagagtccgcagaggccgtatcaccctcttcaccctggtacctggagccctccagggttgtgagatccagcccaatctcagccttgagatggatgggatggattccactcacttggctcccctctcctccttggccagaaaccttcagaaggaaacagaaggatgagaaagcctcccttgccaggcccatctcacctcccacaccacacagttacacattcataaacagccaagcctgctcacaggcctgggcatatgtggctggggagagactgttgccctatgagatggtggaagacagaaaactcttgaatgaaacatctgtaacaagactcccactccctaatcctggagaccccttcaaaaggagaggactctgctcagcgctgggtcagaaaggaagtgcttgccaaccccagtaatgcgctgtcctggagtaagaggactgagatgccagctgtggggcccgtcaggagtcacgtctcaagagaggggtgacccagatttttgcaaagctgtggaagagacctctaattccatgacctaaagtttcacacaacctttatgcaaatccttcgccatttgtctatcctggccccagcaggatgaccctcacatttaaaaggatcaaaatctcaaacattgtgggaggaaaacgccaggcctgctggggagagggagaaggcaggcctcaggattgtgcggagaaccatgttgccatctgcataacgccccagcctatccaagtgccaggaagggaagcactactgaggggggtgctgcctgtgggtctcttcctaacagaacgccaacgaagggggtgccctgtaagaatgagaagtctgccaagtctaaggagatgtccccctccccaagatggtagcagaaactgaagttgtaaagacaaacctctcgcaaagccagaagcagatgctctcaaaaacaggcctaaggaatctgttcccagaagaggcctggggagcagcttttggggctcagaggccagtctggggggaggcaggcagtgtgactgaaggccggcgcaggcctgtttcggactagggtgtagcatatttagtaggatgctcacatgttgtagggatgggtgagggctaaggggcttggctcttgtacgggatggatgatgtgagcgcacagttcgtagggtcaggcgtcttgcggtaggaaaggggcagggttcgatacctctggggtgtggcgtgttctctcttgcccacctccccaagctcctttaaccaggagcttccctcccagagtgagctacgtcttgggaggattgaagcagggaggtggcagtggctagagttgctcagatcggctcagatgaaggcccaggggtcaaagcatttgctcaccacaactgagtctggaaggcactgtgcagccaaaccctcttgtccaatcacatgcaggccccaggcccctcagaaacgccctggtggagggaggagcccaacagatagggtcagggagtcagtggggaaagcagaggggagagcttagagtgaaacttgaaactgctatggacatggaggtcagatgggaacttggaactgggcatgaatcctgaatggtggggaaacttgaagccatcacagccaagaggtggggttccatgacctgccctgaggtcagcagctcccagactcctttgccctcactagggaagccccagtcaccggacttgtccccatggagtgaagagaggccccatttttgagtgttgtgtgtccaaaacagtgttgtgtcactggtggtcgatgttgcttagttgaagagaataaagggaataagattt

SEQ ID NO: 88940 - DNA, 2007 bp, Homo sapiens; identical to SEQ ID NO: 64136

SEQ ID NO: 88941 - DNA, 386 bp, Homo sapiens
cggacgcgtgggtccttaagatcagttttttggggggaagttatttatttgaagaagatacttctcagttttatatgaatattggcaaacacttttatacttccgatttttaaatgttgttcacatgaatagccagttctgccttattcctaatttcccggccagcaacccagtcatcctgaactgatggtgctgtcatgtgtgaccatttcctcacttccccctcagggaaatgatgcgccatcattagaaattcattgtatagcggcgtgtaattttttttacccagcactctatggggggacatttaattcatttgtggtttttttgctgctgtgaatatcctttcatatgtatcttcttaaatttggggaagcataccttag

SEQ ID NO: 88942 - DNA, 388 bp, Homo sapiens
ccgtcccgtgcagaggggtccatacggcgttgttttggatttccgtcgcaacttaaagggaaattttcacaatgtccggagcccttgatgtcctgcaaatgaaggcagtgaccaaggaggaatttcagggtgaatggactgctcccgctcctgagttcactgctactcagcctgaagttgcagactggtctgaaggtgtacaggcgccctctgtgcctattcagcaattccctactgaagactggagcgctcaccctgccacggaagactggtctgcagctcccactgctcaggccactgaatgggtaggagcaaccactgactggtcttaagctgttcttgcataggctcttaagcaacatggaaaaatggttgatggaaaataaac

SEQ ID NO: 88943 - DNA, 1842 bp, Homo sapiens
cgctaagcttggcacgaggtcggtggcttcaagaaggtggaggacctggcattggtcagtggtgtaggcgccaccaagctggagcaggtcaagtttgagatctgtgtgagcagcaagggcagctcagcgcagcactctcccagttccctgcggcgggacctgctagcggagcagcagcctcaccacctggccacagctgtgcccctcaccccacgtgttaacatcaacacagccaccccggcccagctcatgagcgtgcgaggcctctcggagaaaatggccctcagcatcgtggacttccgccgtgagcatgggccctttcgcagcgttgaggacctagtgaggatggatggtatcaatgccgccttcctggacaggatccggcaccaggtgtttgctgagaggtccaggcccccatccacccacacgaacgggggactgaccttcaccgccaagcctcacccgagccccacttccctgagcctgcagagtgaggacctggacctgccgccagggggcccacccagattatctccactcggccgtccgtggaggcctttggaggcacaagggatgggaggcctgtgctgaggctggccacctggaacttgcagggctgttccgtggagaaggccaacaaccccggggtgcgagaggtggtgtgcatgacactcctggaaaacagcatcaagcttctagctgtgcaagaactgcttgacagagaggccttggaaaagttctgcacggagctaaaccagccgaccctgcccaacatccgcaagtggaaggggccccggggatgctggaaggctgttgttgctgagaagccctcgaatcagctccagaagggagctgggtatgcaggattcctatgggacgcggctgccggcatggagctgagagacgcgggttcacaggagagctcgccaagcaacgggcacgggaagctggcgggccccagcccatacctcgggaggttcaaggtgggaagtcacgacctgacccttgttaaccttcacctggcagccctgaccctcctggggagcgagaatcccagcaagaatcacagtgatggccaccggttggcgagctttgcacagaccctacaggaaaccctgaaaggagaaaaggatgtcattatcttaggggattttggccaagggccagacagcaatgactatgatatcctgaggaaagaaaagttccaccacctgatccccgcgcacaccttcaccaacatcagcaccaagaaccctcaaggctcgaagtctctggacaacatctggatcagtaaaagcttaaagaaggttttcacaggtcactgggctgtggtgagagaaggcctcacgaacccttggattccggataactggtcttggggcggggtggcttctgaacactgcccagtgctagccgagttctacactgaaaaggactggagcaagaaggacgcccctcggaacggcagcggggtggccttggagcgaagtgaagccaacatcaagcacgagcgatgatgacaccaaatccatgtgtccaccccgggacccaggagggcacagccaaggaatgagccctgtggggtgacgcttcaggggcagagctgccttttaatttttattctcagagcatcagcacttgaggccttgccccacgccttctctgtggaccattcaggacctccagtgggggtggcgtgccaggcgcgtaccccaccaggtgggcaaagcagaaacctgcggggagcggagacgccttttatctctggatgccacagacctgagcagcattgggctggctgtccgctgctgactggatggcagcacaaggacaatatgagca

SEQ ID NO: 88944 - DNA, 980 bp, Homo sapiens
agtgcggtggaattccggacccctcatgctgtttctgcacggcttccctgagaactggttctcctggcgttaccagctccgggagttccagagccgcttccatgttgtggctgtggacttgcgaggctatggcccctcggatgcacctcgggatgtggactgctacacaatcgacctgctgctggtggacatcaaagatgtcatcctaggcctgggttactcgaagtgcatccttgtggcccatgactggggtgccctccttgcctggcatttctccatctactacccatccctggtcgagcggatggttgtggtcagtggtgcccccatgtcggtgtaccaagactattccctgcaccacatcagccagttcttccgttcccactacatgttcctgttccagctgccctggctgcccgagaagctgctgtctatgtctgactttcagattctgaagaccaccctcacccaccgcaagacaggcatcccatgcttgacccccagcgagctcgaggccttcctttataacttctcacagcctggtggcctcactgggcccctcaactactaccgaaacctcttcaggaacttccccctggaaccccaggagctgaccacacccacattgctgctgtggggggagaaggacacttacttggagctggggctggtggaagccatcggcagccgctttgtgccgggccgcttggaggcccacatcctgccaggcatagggcattggatcccacagagcaacccccaggagatgcaccagtacatgtgggccttcttgcaagacctgctggactagtggtccttgctggcctgcccaggaggcatggatactcaggaaggaacacacacccattatctgtgtgtgcctgggagtccatacaatgtccatacatgggtgaactcttgaatcgctcataggcatgggactcctggatcccacacaagcgcacctatgggtgcctcgg

SEQ ID NO: 88945 - DNA, 595 bp, Homo sapiens
ttttttatcagttaatagtatttattattatttgtggtcaccaatgccaattaaaacaataattaaatagaacatgatgaaataattcaatggtaggaaaaaaaaaaatctggcctacaagtgaacatggaaagtaaaagtaaatatttagaaagtgaaatcaggagtggaaaaaagctccagcatctcaccatggggtcttccaaagccagcagtactggagatgtttattgttcaaagatggacttgcttgggttgggattctccaactagagccagaggggagattctctgcttcccgttccgaccaaagggtaaatgaacccagcacctatgctggcccggacatcactgataggtaagatgaagtcacttggcacaccttttttgtcaggttggtgagacagagaaagatcggtctttgccatgcagatgggcaaatttccaaaaccctgtaagaaaggaaagaaaatgtgttcactgatatagatgtgagtctcctgtgtttttcaatttgcactttatacagtctcggcagcaatggtatgccagctcagatcgaggcacatgcaggagctgcttgttactacttgtt

SEQ ID NO: 88946 - DNA, 419 bp, Homo sapiens
  misc_feature (1)...(419): n = a,t,c or g
ccgccagactannnaaaaagacgggattttttatcctgctggcctgccttcactgtcctgggggaagctcggggagaccaggtggactggagtaaactgtacagagacactggtctggtgaagatgtccaggaaaccacgagcctccagcccattttccaacaaccacccatcaacaccaaagaggcgaggaaggggaaagcatcctctcatccctggcccagaagccctatcaaagttcccaagacaacccataagggaaaagggacccgtcaaggaagttccaggaacaaaaggctctccctaaaagaccaccgcttcaaaaaaacctgaggaatggagggggccaacactatccagccactctgaccagccgaaccaagaactcaatcaaaatgcgccacagcaggaccatcaggg

SEQ ID NO: 88947 - DNA, 1997 bp, Homo sapiens
tttttctcttgtctagcaatctgttaggcttctgaaccaagaccaaatgtttacgttcctctgctgcataccaacgttactccaaacaataaaaatctatcatttctgctctgtgctgaggaatggaaaatgaaacccccaccccctgacccctaggactatacagtggaaactgttcattgctgatgaatgcagcagtcaccaaaaaatacacccaatcttccagataacctcagtgcactttaggaaatcaaaaattacctggaagcaatttagtacatagattggctttttaaaaaaacttttttttttttaaaaacagcagcattaaacttagtgacatgacaccgacatgattaataccatcttaacacactcagaattccgcctttcacattataatcaagcatagtggtaaactgttataaaagtgactttgctacgagagacaggttagggaacaaacaacctgacttatggtagaaacccatagctctgttcagattgcaataaaccatacacattttaaacacaacgtaacactgtaacagctggtacagggaaagaagaaatcttcactcaagtagtgtctctttgagcacaacacggtggtagacaagtaaaattggctgtagactttcattacaaacacaagcacacagagagcgacattcacaccagtgtgttcactttgtgtctctctgaagcaacaggctaaaaaaggatgatggaagtaaaaagttggtttcagaaaaagctttttgtccatttcgtacgtcatattttttcagtttcatatggtttgacttcttcctctctcttccacttattttccatttcctatttgggacaacaagcactgcatatatgtatttaccgtgacgctgtttaattaccatatatacacacctattttgggagtttgattccctccccataagatcagggtgaaacattctgcccttggtttatatgcagagcagtttacaaaagtggggtgaatgcactgctggctgctcctgctgcgggccggagacagagtgaggctggctggggaggaagtgtcgtttagggtgaaagtgagaaaagctgggaagaagcaaaatttcttttttttttcaaaaccatatgactgtcaccagtgttgtaaaaaaaaggtcaaatacacagttttaaagattccagtaaacattgccccaccagccaagtattcagtgtaaaaaaaaaaaaacaaaagcacgcacccaaccatttaagtttgtcctgaaggtttaaattacatgtatcatacatataagcctgttgttgaaccaggagaccagaggctcaaaagcattgcattctttcttgttttggacattggtacaagagaaatgaaaaatcccaactgcatagaaatctaggaaatgtatagacaaagaaacaaaatacctttcctttcctcccctccacaccccatgactccccacacttgagtgtattaagtaggcaagctttactcgtttcagtctgcagaatccaacgtatcattagaaggggggaggggaggtgcgtatctcagtctgtaagtgccttgttgattggcctccatggacgactgcttacagtcctgtgcatagtgtccgcttacaccacaattgtaacatgagacattcccattcttcttgggccccgaaccactggtgttggcaactacgttaggtgctggatatacaggatagaatctcccaaatcctgccatctgctgcatgccatagttggcttggctccccatgactgggtcatgtaccagtccatttgcatatggagtctgaggcagaaaaaaaggaagttggtttccattgctctgatgtgcttggttgaggtagctgccattgcaaatggatggcagagtaaagaatgaagggactcggtacagtggtccaggcattggattaggataatagtcactatttagctgaaggtttacattggtgccacagctgctccttcgccca

SEQ ID NO: 88948 - DNA, 519 bp, Homo sapiens
ttttttttttttcctgtcattcatttatttgacaaatgtgctacatcagggcatcccccaccctggtaccccatagtagctgcacacagtaggaaccccagaaaagaccttgccccttctgtccctgcagatgacgtccacggctcccacggccggcaggtctgccgtcggcacgagctctacgtcagcttccaggacctcggctggctggtaattgctgactctccttgtttctgacaggtgatggcagctggacggggcaggtggtccaaggcagcatggaggtggaggttgagccaggggctgctcccagggaagggaggaggcaagaggagtcatccaggaggcctcccaggcgggggctatgatgtcagggcgggaggaactccatgttccgctgaggccccattagaccccaagtgcagaagtggcgaggggagcaggatccacaagtctggagttcagaagagaggtccaagctgagcctcaatttgccgcaagacatctaggccttcggtg

SEQ ID NO: 88949 - DNA, 1546 bp, Homo sapiens
tcgacccacgcgtccgagcattgggacagtgctctacaactggcaaagcatttggccccagaccagataccttttatatcaaaagaatatgctattcagcttgaattcgcgggtgattatgtaaatgctttggctcattatgagaaaggaataacaggtgataataaggaacatgatgaagcttgtctggctggagtggcccagatgtccataagaatgggagacatacgtcgaggggttaaccaagccctcaagcatcccagcagggtccttaaaagagactgtggagccatattggagaatatgaagcaattttcagaagcggcccaactgtatgaaaaaggtctctactacgataaagcagcatctgtttacatccgctctaagaattgggcaaaagttggtgatcttctgccccacgtttcttctcctaagatccatttgcagtatgccaaagccaaggaagcagatggaagatacaaagaagctgttgtagcttatgaaaatgcaaaacagtggcaaagtgtaatccgcatctatctggatcacctcaataatcctgaaaaagctgtcaatattgttagagagacccagtctctggatggagccaaaatggtagccaggttttttttacagcttggtgactatgggtctgccatccagtttcttgtcatgtccaaatgcaacaatgaagctttcacactggctcagcaacacaacaaaatggaaatctatgcagatattattggttctgaagacactactaatgaagactatcaaagcattgccttatactttgaaggagaaaagagatatcttcaggctggaaaattcttcttgctgtgtggccaatattcacgagcacttaaacacttcctgaaatgcccaagctcggaagataatgtggcaatagaaatggcaattgaaactgttggtcaggccaaagatgaactgctgaccaatcagctgatagaccatctcctgggggagaacgatggcatgcctaaggatgccaagtacctgttccgcttgtacatggctctgaagcaataccgagaagctgcccagactgccatcatcattgccagagaagagcagtctgcaggcaactaccggaatgcacacgatgttctcttcagtatgtatgcagaactgaaatcccagaagatcaaaattccctccgagatggccaccaacctcatgattctgcacagctatatactagtaaagattcatgttaaaaatggagatcacatgaaaggggctcgcatgctcattcgggtggccaacaacatcagcaaatttccatcacacattgtacccatcctgacgtcaactgtgattgagtgtcacagggcaggcctgaagaactctgctttcagcttcgcagctatgttgatgaggcctgaataccgcagcaaaatagatgccaaatacaaaaagaagatcgagggaatggtcaggagacccgatatatctgagatagaagaggccacgactccatgtccattctgcaaatttcttctcccagagagtgaactcctca

SEQ ID NO: 88950 - DNA, 570 bp, Homo sapiens
cgagaatttcttaagaatccttccaaaaacctatagatagacagatagatagagaagcatattttaaaattatgttttatatgcacaaacctaaatatgtatttattgcagtagctctacaactcgaatcatatgtactcttttgcactttattttttaaattaacatgacattttctcaacaacacataaatacagcttgttttttttaatagggaagtatattccattatatacttttctataatgtatttaaccaatcttgtttgatggacatttgtagtacttctcatttgttcttgatgtatataattttattttgctattaaaaatattttaaattataggaaaaatgagaggtagggaaaggaaagtaaatatacaattctggttagctgattttataaactaatagtatattttaaaatataaaattaatgtaaagcttacaatatgccgggcatggtggcttatgcctgtaatcccatcgctttgggaggccgaggcgggtggatcacttgagatcaggagtttgagaccagcctggcccacatggggaaaccccgcctct

SEQ ID NO: 88951 - DNA, 398 bp, Homo sapiens
  misc_feature (1)...(398): n = a,t,c or g
ggcaggaagtctgcagccactctttgcaaaggtgttaaatcacgtatttcaataaacacatctatgcaagtttacattccagctcccttcatcaagcaccctcataatccagccccaaactttcccagctcctgtcaatacatgttggctgggtggtacagcttgttatgggctgaagtgtgtccctctcaaaagatgctgaagccctaacccctggtcaatgtgaatgtgacattatttggaaatgggtctttgtagacaagttaagatgcgctcattagagtgggccctaatcagtatgactggtgtccttctaaaaagaggcccatgtcgaatgacctttgtcaatgatgttacaaatgccttcgtcnggagagacacggacgcgtgggtcgacc

SEQ ID NO: 88952 - DNA, 427 bp, Homo sapiens
gcgttctgtacaggttcgcaatacccggcccgacccacgcgtccgcggacgcgtgggcaaaattaagcaacttcaaagagaaagatacaaatccatgatcaaagtgaggaattttcacacacatcgtagtaactgatggaatgagtcaatgaaaaattagtgaggaaatagaagatttggacagcacaacaaatggcctaggagaacatttagaatgttgccttcgatgcttaagaatacatattcttttcaaaagaaaacacagaacagcctggcaggagagataccatcatcatgaaggtgattttcccagagctgggcttatccattgcattctggatgtgctgacgcctgtggttttcccaaatgtgggaaactggactgcataatttgtggtagtgggggactatgttcgtgttctctcctg

SEQ ID NO: 88953 - DNA, 647 bp, Homo sapiens
ttttttttttttctcatctctgagtatttattatatataacaaatacatgggaaagaaaaaactatattgtgtgatataaatagtttatttacattacagaaaaaacatcaagacaatgtatactatttcaaatatgatgcatacataatcaaatatagctgtagtacatgttttcattggtgtagattaccacaaatgcaaggcaacatcgtgtagatctcttgtcttattcttttgtctataatactgtattgtgtagtccaagctctcggtagtccagccactgtgaaacatgctccctttagattaacctcgtggacgctcttgttgtattgtctgaactgtagtgccctgtattttgcttctgtctgtgaattctgttgcttctggggcatttccttgtgatgcagaggaccaccacacagatgaccggacgcgtgggtgcttactacagactgcatatcatatagcagtattatccagttaaagaaagatacagttgaaaaacattacgttttaattctccatgagtaaagtgataagtaactatatctttctttaactggataatactgctatatgatatgcttactacagactgcattaattcacgaaacgaattctgttatgctgtaatttgaactct

SEQ ID NO: 88954 - DNA, 438 bp, Homo sapiens
cccgggtcgacccacgcgtccggaacatgtgccggcgcaacgcaggggtctgtgcagtaaatgggctcctgtatgtggttggaggggatgatggatcctgcaacttggcttcggtggagtactacaatcctgtcactgacaaatggacgctgcttccaacgaacatgagcacggggcggagctatgcaggtgttgccgtgattcacaagtccttgtgacccaaactcctactgccaggaggtggaggaaggagcaggtgctgcctgtgactctgaacagcaggaccttggtgactggattcaacttgcttgggagggtctgtgctgctgtgagaaccgctctcctctgacttggcagactggtgttgttcatcgcagtgtggacaccattacccacccccgttcccctgaggtgctctggcctatgccctgagcaagg

SEQ ID NO: 88955 - DNA, 988 bp, Homo sapiens; identical to SEQ ID NO: 74098

SEQ ID NO: 88956 - DNA, 1515 bp, Homo sapiens; identical to SEQ ID NO: 64955

SEQ ID NO: 88957 - DNA, 557 bp, Homo sapiens
gggtcgacccacgcgtccggctcaccacctggggagattgtatctttaggaatattgagtgaaggccagtttggtattccgaaagggatcgtcttttctatgcctgtgaaatttgagaatggaacttgggtggttcttacagatctcaaagatgttgaaataagtgaacaaataatgacccgaatgacaagtgatctaattcaggagaaacttgttgcacttggagacaagatacattttcagccataccaatcaggacataaagatctggtccctgatgaagaaaaaaatctagctatgtcagatgcagcagagtttccaaatcagattcctcaaaccacctttgaaaagccacagagtcttgagttcctaaatgaatttgaaggcaaaaccgtggaatcctaacagatcaaattggatgaaatatataattacttgatagcacaataaacatagaaagaatttatatgaatgtctatatttaaggaagaataatttgaaagatttatgtcagtcttagataataccatgcaaggcaattaaatcactgtgacagc

SEQ ID NO: 88958 - DNA, 404 bp, Homo sapiens
ccacgcgtccggggacagatacagcctgaggcaggatgggaccagatgtgagctgcagattcatggcctgtctgtggcagacactggggagtactcgtgtgtgtgcgggcaggagaggacctcggccacactcaccgtcaggggtaaagaccacatgtggccacctgagtgattcctgtctcctcccacctaacccacatgatctgtgctctcccagttcctcttgatgtcattgccatctcattcagtcactcccctgtgtgatacatcccacaaatgcacttggaacccacttggatgacctaatctagggcctgggaatatggacctcaggagtgaatagggcagggacccaaaggagagccccacagacagacatcagggtccaggagagctgtctgggg

SEQ ID NO: 88959 - DNA, 213 bp, Homo sapiens
ttttttttttttcccctaaaaagttatttccaggaaggcgttcaaaggaagcccctcttggggggcacccatggtgggccttttatttttgggtttcaggagggacctccggctaggttaatctccccccacagttttggaaagggggggaaactttcccagggaccccaaaaagggccccaaaatttgtttgggggggattaactaaaaaag

SEQ ID NO: 88960 - DNA, 1174 bp, Homo sapiens
actgtacgttcccaaatcggccacggcacacatcatagtggggagttccaaattccggagtagacggcgatttcctggcctttcttactattataaagataaccacgcctccatctgccggagcagccagcccctgtccggcttcagtgcccggtgcctagaggacgagcagatgctccaggccattaggaaagccaatccaggaagtgacttcgtttatgtcgttgacacccggcctaaacttaatgcaatggcaaatcgtgctgcagggaaaggctatgagaatgaagacaattattccaatatcaagtttcagtttatcgggatagagaacatccatgtcatgaggaacagtctgcagaaaatgctggaagtgtgtgaacttaaatctccctccatgagtgatttcctgtggggtctggagaactctggctggttaaggcacattaaagccataatggatgcaggaatcttcattgcaaaggcagtgtcagaggaaggggcaagtgtgcttgttcactgttctgatggctgggacaggaccgctcaggtgtgctcggtggcaagcctgctgctggaccctcactaccggactctgaagggcttcatggtattaattgaaaaggactggatttcctttggtcataagtttaatcaccgatatggcaatctagatggtgacccaaaagaaatctctccagttattgaccagttcattgagtgtgtttggcagttaatggaacaatttccctgtgcctttgagttcaatgagaggtttttgattcacattcaacatcacatttattcctgccagtttggaaacttcctatgtaacagccaaaaggagagacgagaactcaagattcaagaaagaacatactcattatgggctcacctgtggaagaatcgggccgactacctgaatcctctgtttagagctgatcacagccagactcagggaacccttcatctccctacaacaccatgtaacttcatgtacaagttttggagtggaatgtataaccgctttgaaaaggggatgcagccccgacagtcagttacagattacctaatggcagtgaaggaagaaactcagcagctagaggaagaactagaggccctggaagaagtaagacatacttgctttgttaatctattttctgtgcttatttct

SEQ ID NO: 88961 - DNA, 390 bp, Homo sapiens
cccacgcgtccgcccacgcgtccggtttctgtcttgtttcagacccatttacccaatattaaagtccacgcctacttcgcacctgtcactccacccccatcagtagggggcagcagacagcgcttctgcagatgctgcatcatcctatgacaatggaggtggtcaaccttggcgaactgagtatttaatgacacttctagagctaccgtggagtctctccagtggaagcaaccccagtgttctgagcaagggttacaaagtgagggagggcagtgtccagatccccacagccacacatacatacacatacacacccttacccccatccactctagctttgtgaccatgggactgaagtttgtgatggcttttttatcaagtagattggtc

SEQ ID NO: 88962 - DNA, 1549 bp, Homo sapiens
aaagccaaataaagtaggaaagggtaagatgttcaacgctgggcgcagtggctcatgcccataatctcagcaccgtgggaggctgaggaaagaggatcacttgagcctagaattttgagaccagcctgggcaacatgggacagagggtctcacggatggccccgctgccaggagcagaactggttcggaggccactgcagctctaccgatacttgctgcgctgttgccagcagctgccgaccaagggcatccagcagcattacaagcatgctgtcaggcagagttttcgggttcattcagatgaagacaaccctgagagaatccagcagattattaaaagagccattgaagatgctgactggatcatgaacaaatataaaaaacaaaactgagagctccgagggtgagccttcctggcctctggaagttgagaggcccctcttctggagctcagcagcagcagctggtttggaagatccattggccttgttggctgaaagccagaaatcaggggagaagctgaccttgctccagaggctcctcttgccgcggccatgttgctagcatcctttatgtttgcacttccagccacttacgatgtgaaatttggggagaatgtagtatttttttgcttcttttgtgtgttttttatttttgtgtttttgttcttttacttttctctgaaagtgattcatttattctggagatctctttatcattctctgagtcccagagcagatgtcccctcaggtagcaacctgtacagaagaaagcacgtgggttttagaaccagacagatctggatttgaatcccagatgcaataagatgaaggtgaagtgcctcacacaggatgtggcacatgacagtgcctgaagggctcccttcaaggaagccgtcctgccccgccccctcctctgctcctgcagcgccctgcacagctctgctccccgcatgcaccgcatcgggtctcagttttttgtttgcgagcttgccctgtccctgcttgtagcccctgagccctcacagttgtcacacacccagcagtctgccaaggagctgcttttcctgactactgtctctccatgcctagggaagtcaaagccctgggccttgccttcagggagttgacagtgtccttgaagtggtgaagtgcccaccacatgaaccaaggagagacgccaaagcagctgccatggactctggcctgtccaagcctctgtgcacctgcagtctctttccactggcacttccctgctttgctaccatcgtggaagaatggaagggagggggagaaggtgggtgggctcagggagaacggccagagtggccagaagatgcagagagaatgccccactgggatctgagtaattccccaagggcactcagccacagggatgaactagtgtttgtttgtacccttgcagttatgtgacttaaagtgactcagagatatctatgtaatgcgagtgtactccgctggcaatgaagtaaatatatcaatttgtggaagctcgtgtgtcttctcaactgataaaccatacgttccct

SEQ ID NO: 88963 - DNA, 1420 bp, Homo sapiens
  misc_feature (1)...(1420): n = a,t,c or g
ttttttttttttgaacaaaaaaattttttttaattttttctttgggtttgtacaagaaatttacagtgtgaaaaatatacaagtgaaaacgaggccataaacctgggtgaagggagaggctgcttggtcacaaacacaaataaacaagacatttctgagttcttcctttggtctgacttcagccccctcactccaggagagaggctgcagagctcaaacctgggaaccgggcccaggtttatggcctcgtttgtacaagaaatttacagtgtgaaaaatatacaagtgaaaacgaggccataaacctgggtgaagggagaggctgcttggtcacaaacacaaataaacaagacatttctgagttcttcctttggtctgacttcagccccctcactccaggagagaggctgcagagctcaaacctgggaaccgagcccaggcccggccctgtcccccaatgtgggcaggcacatccggagcagctggtgccatctggctttctctggctttggggtcggggggaatgtgaagaggagggagccccttcttcttccctgctcccctggctggagtgggctggaagcgcctgtgaacagggttggcagtggcactggcagcggtggggaatgaagtgggtagtaacaacagcctctgggtaacagtgaacacggggacctttgagctgtctgatcttgctcctccaagtcatagggccaccctgagttcttggcagaagcccagaggcctggatcctaggagacaagtggctttggggccctcagcctttggggccatccgtggaccctggggcctaagtggatctgcagctgctgcccctctggcagagctccctacagagctggttgctgagggccctagatctcagtagcagtgatctcctccaggcagatgcagggggcctgctcggccaggcccaggtcagcgagctcccgggcctccagctccaggctgagctgctgcagctcctgctctagctgccggttgcgccggtacatctggatgtagttgtgctgcagctgcttctggtagcggatcacctgctccttctctgcctgccaggccagccgctccccctcaaagctgtcccgctgctcctcaccccgccgccgctcccgctgcagctccacccgcaatcgctccacctgggcccgcaagctgcccccaaccccggntgctgcccgctgcactttggcctcatcactctctgccaggaggaatgggtcagcggtggcaggtggcacagggggctcccggagtccggccgcctcagcatccaactgcccagctttctcccgcagctgctcagcttcctggcggtgtcgctgcagctcctgggaacaggcttccagctccagctcccgagctcgggcggcctcctgtagaccccgcgcacggccct

SEQ ID NO: 88964 - DNA, 3150 bp, Homo sapiens
ttcaacctggacgtggaaaagctcgcagtgtacagcggccccaagggcagctacttcggctacgccgtggacttccacatacccgacgcccgcacagcgagtgtcttggtgggggcgcccaaagccaacaccagccagcccgatatcgtggaagggggagccgtctattactgtccttggcccgcggaggggtctgcgcagtgcaggcagataccgtttgacaccaccaacaacagaaagatcagagttaatggaaccaaagaacctatcgagttcaaatccaatcagtggtttggagcaacagtgaaagctcacaaaggaaaagttgtggcctgtgctcctttatatcactggagaactcttaaaccgacaccagaaaaaggaccagttggcacctgctatgtagcaattcagaacttcagcgcttatgccgagttctctccttgcggaaacagcaatgctgatccggaaggccagggttactgccaagcaggatttagtctggatttttataagaatggagaccttattgtgggaggacctgggagtttctactggcaaggacaagtgatcactgccagtgttgcagatatcattgcaaattactcattcaaggatatcctcaggaaactggcaggagaaaagcagacggaagtggctccagcttcctatgatgacagttaccttggatactcagttgctgctggggagtttactggggattctcagcaagaattggttgctggaattccaagaggagcacagaattttggatatgtttccatcattaactcctacgatatgacgtttattcagaatttcacgggagaacagatggcatcttattttggatataccgttgtcgtatcagatgttaacagtgatggactggatgatgtcctggttggggcacctctctttatggaacgtgaatttgagagcaaccccagagaagtagggcaaatctacctgtatttgcaagtgagctctctcctcttcagagacccccagatcctcactggcaccgagacgtttgggagattcggtagtgctatggcacacttaggagacctgaaccaagatggctacaatgacattgccatcggagtgccttttgcaggcaaggatcaaagaggcaaagtgctcatttataatgggaacaaagatggcttaaacaccaagccttcccaagttctgcaaggagtgtgggcctcacatgctgtcccttccggatttggctttactttaagaggagattcagacatagacaagaatgattacccagatttgattgtgggtgcatttggaacaggaaaagtcgctgtttacagagcaagaccggttgtgactgtagatgcccagcttctgctgcacccaatgattatcaatcttgaaaataaaacttgccaggttccagactctatgacatctgctgcctgcttttctttaagagtatgtgcatctgtcacaggccagagcattgcaaacacaatagtcttgatggcagaggtgcaattagattccctgaaacagaaaggagctattaaacggacgctcttccttgataaccatcaggctcatcgcgtcttccctcttgtgataaaaaggcagaaatcccaccagtgccaggatttcatcgtttaccttcgagatgaaactgaattccgagataaattatctccaatcaacattagtttgaattacagtttggacgaatccacctttaaagaaggcctggaagtgaaaccaatattgaactactacagagaaaacattgttagtgaacaggctcacattctggtggactgtggagaagacaatctgtgtgttcctgacttgaagctgtcggctagaccagataagcatcaggtaatcattggagatgaaaatcaccttatgctcataataaatgcaagaaatgaaggggaaggagcatatgaagctgaactctttgtaatgataccagaagaggcagattatgttggaatcgaacgcaacaacaagggatttcgaccactgagctgtgagtacaagatggaaaatgtaaccaggatggtggtgtgtgaccttgggaaccctatggtgtctggaacaaattattccctgggcctccgatttgcagttccacgtcttgagaaaacaaacatgagcattaacttcgatctccaaatcagaagttccaacaaggacaatccagacagcaattttgtgagcctgcaaatcaacatcactgctgtagcgcaggtggaaataagaggagtgtcacaccctccgcagattgttctgcccattcataactgggaaccagaagaggagccccacaaagaggaggaggttggaccattggtggaacatatttatgagctgcacaatattggaccaagtaccatcagtgacaccatcctggaggtgggctggcctttctctgcccgggatgaatttcttctctatattttccatattcaaactctgggacctctgcagtgccaaccaaatcctaatatcaatccacaggatataaagcctgctgcctccccagaggacacccctgagctcagcgcctttttgcgaaactctactattcctcatcttgtcaggaagagggatgtacatgtggtcgaattccacagacagagccctgcaaaaatactgaattgtacaaatatcgagtgtttacaaatctcctgtgcagtgggacgactcgaaggaggagaaagcgcagtcctgaaagtcaggtcacgattatgggcccacaccttcctccagagaaaaaatgatccctatgctcttgcatccctggtgtcctttgaagttaagaagatgccttatacagatcagccagcaaaactcccagaaggaagcatagcaattaagacatcagttatttgggcaactccgaatgtttccttctcaatcccattatgggtaataatactagcaatacttcttggattgttggttctcgccattttaaccttagctttatggaagtgtggattctttgacagagccagacctcctcaggaggacatgaccgacagggaacagctgacaaatgacaagacccctgaggcatgacaagaaaaaaaaaagaagaccaaagacctgaaacactggtcctgttcaaagaaaaagaaagaacatgaggcc

SEQ ID NO: 88965 - DNA, 369 bp, Homo sapiens
aacaacctacctcgaagaattgttggtttgattattatcatgtatgcaacgttcttactggcatgtctgacacatacaccatcttatggaggtgcaatcatataactgaaccttttcttgagtgactacagctgtctcaggggctgcaggttactatgagatggagccattcctcaaactgagaagatagggccccagacatgtttatagaccctttgatacttcccgcgttggatgaaaccctcttttagtttctttccactaaggatagatttcagcatatcactatgcttgaagtaaaaagagcttactccaggcctcttggctcttgtccctaccttagactgatggccttggtatttggtatgt

SEQ ID NO: 88966 - DNA, 2620 bp, Homo sapiens
atggacttggagctggttttaatgtgcaaagacaaacccacagagaccctgttaaatacagtcaaagataatcttcctattcagattcagaaactcacagaagagaaatatcaagtggaacaatgtgtaaatgaggcatctattataattcggaatacaaaagagcccacgctaactttgaaggtgatacttacctcacctctaattagggacgaattggagaagaaggatggagaaaatgtttcgatgaaagatcctccggacttattggacaggcagaaatgcctgaacgccttggcgtctcttcgacatgccaaatggtttcaggcaagggcaaatggattaaaatcatgtgtaattgtcctccgcattctgcgtgatttgtgcaacagagtccccacatgggcaccattgaaaggatggccactagaacttatatgtgaaaagtctataggtacttgtaatagacctttgggcgctggggaggccttgagacgagtaatggagtgtttggcatctggaatactacttcctgggggtcctggtcttcatgatccttgtgagcgagacccaacagatgctctgagctatatgaccatccagcaaaaagaagatattacccacagtgcacagcatgcactcagactatcagcctttggccagatttacaaagtgctggagatggacccccttccatctagtaagccttttcagaagtattcctggtcagttactgataaagaaggtgctgggtcttcagctctaaagaggccatttgaagatggattaggggatgataaagaccccaacaagaagatgaaacgaaacttaaggaaaattctggatagtaaagcaatagaccttatgaatgcactaatgaggctaaatcagatcaggcctgggcttcagtataagctcctatctcagtctggccccgttcatgccccagtcttcacaatgtctgtagatgtggatggcacaacatatgaagcctcaggaccatccaagaaaacagcaaaacttcacgtagcggtgaaggtattgcaggcaatgggatatccaacaggctttgatgcagatattgaatgtatgagttccgatgaaaaatcagataatgaaagtaaaaatgaaacagtgtcttcaaactcaagcaataatactggaaattctacaactgaaacctccagtaccttagaggtaagaactcagggccctatcctcacagcaagtggcaaaaaccctgtaatggagctcaatgaaaaaagaagaggtctcaagtatgaactcatctcagagactggtggaagccatgacaagcgctttgtaatggaggtagaagtagatggacagaaattcagaggcgcaggtccaaataagaaagtggcaaaggcgagtgcagctttagctgccttggagaaactgttttctggacccaatgcggcaaataataagaaaaagaagattatccctcaggcaaagggcgttgtgaatacagctgtgtctgcagcagtccaagctgttcggggcagaggaagaggaactctaacaaggggagcttttgttggggcgacagctgctcctggctacatagctccaggctatggaacaccatatggttacagcacagctgcccctgcctatggtttacccaagagaatggttctgttacccgttatgaaatttccaacatatcctgttccccactactcattcttttagcaaatgacagaagctaattcctattgaacaacaatacagtacaacacagaatgttagagaaaaagcctttttatcctgctttctttgaacacatacttgatcaaaattatttgtaaagaacatctttcccacctttttgattttaacaaatgcaaatttagttctctaaaacttgaaaaaaaaaaaagaaaccagttctgtgaaaacggtacctcatttctggaaaataacttataccagcccttctgttctagggaaataaaagtctagcagttcaaagtttaagttttaagagacgtatcagattatgtaaaattaaatttgtgaaggatgtatagagtctcaaacactgatcacaaataaactgctttgttgtaacacagagtactgcctggttcctgatgcagtcactgattcttagttgattgatatgtatttgccccagggcactttaatttgggctgtagttattttttttaatacaatagagacttttcatttaactttaactttgtaaatattgaagtgtgtaataaagccaataaaatatgggtttgaatattgttttagcttattatttttgatatgttttggtatcaaattacaaggaattgaaaactaataacttagccctagaagcccattcacttgtaagcaaagtgctaaaacaaagcaaaggtgattgttagtttgagccagtctactcactttgtaagccctttgtactcctgttgtacatgttggccatccccatgataaaggttccattctgttatttgagcattgcttattaaaatgatggcactacccagagatggggaaggagaatgtgattatcctagtttatgaatttccaagtttttaaaaataataaattaatcaatcaatcacaaaaaaaaaa

SEQ ID NO: 88967 - DNA, 415 bp, Homo sapiens
cccctagtccagtgtgatgggcgatctggtcggtcaggggctggaagagcagattgtcgcccgtgatgagaactcatggctgattgacggcggcaccccaattgacgacgtcatgcgcgtgctggatattgacgagttcccgcagtcgggcaactacgaaaccatcggcggctttatgatgtttatgctgcgtaagatcccgaaacgcaccgattcggtgaaattcgccggctacaaatttgaagtggtggatatcgataactaccgcatcgaccagctgctggtgacccggatcgacagcaaggccaccgccctttcgccaaaactgcctgacgctaaagataaagaagaaagcgtcgcgtaacccccagaaacatcaacggctcctgaatcaggagccgtcttattactgcat

SEQ ID NO: 88968 - DNA, 1009 bp, Homo sapiens
agaagcaacacattgtaaactttgtgaaaaggaattctcactctctaagagaaagcaccactgtagaaattgtggggaaattttctgtaatgcctgctctgacaacgaactacctttgccttcttcaccaaaaccagtacgggtttgtgattcctgtcatgcattgctcattcagagatgctcatctaacttgccctgagactccagaactaaatccttatgtatgaaattacctacaatgaatgttatgatgttgtatacaaaggtaaccagacagctctccttaagcggctttcggtcagtatttggtaccagtttatcttctacatattcagctcatggaaattacaagttatatatttccttccccattgtttttcaaaatgtattttcaacagagcatgcttaaaaatcatgtaactcattaaaaggccagagagcagagctaacacaacttgccttatcttgtaaaggccttaaaaataaggcttcagattgtttttttcttctgaattctgtcaatttggtatttgatggtgcctgcagttctcttaatgcactttaaagcttcacagttctgaaactggaaacgcataaaacttttaaaattattaatattctattcaacagattttcattatctttgtaagatttcaactatatttatttgccctttcttctccccctctccctttgcctcttgcattagacagggccaatattttgtcctacaaaatttcctcttggtctctttaaaaatcagttattgtcgtgcttgctgaagattttcagctacagtggattaaattaaagggggcattatttggcctcggcctctacttttttccttttaatcttgaaaggaagttacatataaccatctttcttttcctgatttataaatcttcccatatgctgtttcactaaattgctgtttttttaaggggtgactcagaccccaattcaaagatgaaaacacaaatccttccccagaaaaaaaagtatgtaa

SEQ ID NO: 88969 - DNA, 755 bp, Homo sapiens
  misc_feature (1)...(755): n = a,t,c or g
ttttaatttttaaaaagtttactgtccacagattgattataatagatttacactttcttagacctgctatttaagcagccccatgagcaaatgaaaggtctccagttagtattcagtcaggaggtatatgtccatgtttctcttggttgtcttaatttctttttatataattttcttttatattaactttcccaaagcatcccaaaactttcatggatctgctgttttatggctttagttgcatcccctgcatttggaatcaaatacctttcgattgccaagatttctattcctgaagcactgctatttccatacttgaaggtaatgagttcaggatgtttttttttggatgtaattttaactacagaattcagcgcttgtcgagactgtatataagccaatcctttccgtgaaacaatctcccttaaacagtacatatgtgttgcagtaaccaacagatgactgggaaacatgtgtccactttcttttacttctttacaaggaaaatgatgtttgacatctggtttgtttatccaagtctgaatgtttacaacctcttttctatcatcatctgacattgaagaactgtcaatttcatctgtgtcgtattcttcttcatccccaatgctgaaaacaggctttacgccacggtaaggcctgccactctgtcactgntgctcacatgccgctctgtacatgatctgtctggccaaggaagattgaaagacattcgatccacangaggttggatgtaa

SEQ ID NO: 88970 - DNA, 641 bp, Homo sapiens
ttttttttttttaaaaaaattttttttattggggaacagcatacataaagacacaccagttttaagtgcacaacccagttctcacaaagtagacacacttgagtttccaccaccaggtgaagagataaagccttattagcacctcaaaagatcctccccttgtgccccttttcccattacccaccctcctccccaaaggtaaccactatcctgacaccataggttagtttttgcctgtttttgaacttcacaaaaatggaatcatacagtctgcattcttttatgtctggctcctttcgctcaacatcatgtttgtgagattcatccaggttgcctgtagcagcagttcattcattttcgttgcagtgtagtcccattgcatgcatacacaacaatttatttatccattctactgatgatggacatgtgggtggtatccagtttggggctgacttagggtcgccaggttttccattggccatggggggagggcccagaaggctgggtggtccgatgggactcccatcctcctcatctccagtctcttcccgctcgggcagcgggggctgctgctgtgtcggtggctggtgatgattctgcttctttcgtttcggcatcgtgtctgcggcaatggctgcagc

SEQ ID NO: 88971 - DNA, 1025 bp, Homo sapiens
  misc_feature (1)...(1025): n = a,t,c or g
gttgttctaggtttcacgtgtatttatgacatttttaataataaaatgactgagaagaaaaggtagggctcaggcattgaccagttaggatggagaaccagccataaacacttcctcctctcccgctgttgactgtggggctggggaggacagcctctcctggtggctggtctgtctccaaggctaccctggtgactcagctacaggccccacttctgccctttggtttggaggcgggggtgtgactggaaaaccttgtttgtggtttttttttttttaaggcagttttgctttaatatctcgtccagaaatcaacatgttctggaaatgccaacatctgggcattccaactgtgcctcccagactgtctagttcttggaaatggtacaactgtctttgtgagacactgtgccctgatttggggttcagaaaacggtccctgtatccacgtgactcaaaaaagagctgcccagtaagcctgggaaggtagcaactgagatgtggggtactgggacctcggggctcctccattttggggggttcttccactttagtgggggtgcttctccatcttggggccaatgcagatgacctgcatatgggagagcccctggagcccattcaacctaccccaccctcactttcagagcaggaagctgaggcccaggangaagcccggacccctccccttcaggtgaggaaggatacattcccaggatcacggcttccaggcatttgattggcagggcctctttggtcatttccttggccaggtccatcagccctgtcagaggtctgctcttcttaatttcaaagaactgtgtccctgtgtgattgtactgcagctctctgatgtagcgctgcacagcttccaggcgctcagggacaggtgtagacggctggaacgtaggcacactcggtatggggatctggggacagagaaagagctccggtcacaagaagaggctcacctggagcttcagtccccaaacacctaggacgaaatcgtcgacgcgggaattccg

SEQ ID NO: 88972 - DNA, 423 bp, Homo sapiens
  misc_feature (1)...(423): n = a,t,c or g
catgagnccnntgannatccgccaagcttggcacgagggcaggctgattttgacagggctgcagaagatgtgaggaagctgaaagcaagaccagatgatggagaactgaaagaactctatgggctttacaaacaagcaatagttggagacattaatattgcgtgtccaggaatgctagatttaaaaggcaaagccaaatgggaagcatggaacctcaaaaaagggttgtcgacggaagatgcgacgagtgcctatatttctaaagcaaaggagctgatagaaaaatacggaatttagaatacagcatatgaggaatttttccttttgaagacttccaaatgctatcatgacctaacatttagagggagaggcatactgttaacttgatgtatcatgtatatttttgctattagcatgagctgt

SEQ ID NO: 88973 - DNA, 1901 bp, Homo sapiens
tttttttttttaagccttatatttttaataaaaaataaacagtctctgacaagcagttttctgaatcccaaaacaaaggaaaagggagggggagaggtgaaggggtcagctagggtaaaggagtgaagaaggctcagattacccctgccattctgccagggcagaagggatcagagtctgccccaactgaagcaagaagaaaggtggtcagacttcaggaaagacttcctgggagtcagccggtgcacgactggtaagggaagcaggagggagcagatccctgcatgaccctgggagaagggagtgttggtgtccaaagcggcagcttcagagtggagtttccaggagtggcatgttagcatatgattgtttagatgtttggtgttcattaccatagggtcctgggacaggcaggttttttagggtctcttgaaacactgtgtttctggagggtccctggaatggccagaactgaaggatcctctccaggttcttcaatatcagtgtaggagcaggtctgggggtagccccccccctgttagagagctcatgtgcttggtagaagggagtcccataggggaggcagactgctgtgcatcaccctgctgagtgtcatcagtgatgcagagtagcagaagctcctctcaggggagaaaggtggtcttttgtgctgctgtcatcctagtcagggctgtgcttgggcccgccccagccagcatggcccaggtgcctgcaccgcagccccggcctgtgcctagagtttaagctacctcagtgcctaggcagttgttgtcagcgtccacatcactggcagaggtcctgcattccttgggagactggaggtgttgctctctgcttaacggggccttctccccagggcgcagggtctcacagccctgaaccttgccccgagcccggagtgctctcaatggggaggccacgaggatgatgagggctcctgaaagcactaaggcaaagaggacagtgacagtgacaaagtggggccagtaggactgctgggcagccagggcggccccaccactgaccctggtcaacgggaccttcacatgctcccgggggatgcctgccagttcaggatccagggccagggtctggtcctggctgtccacccagtaggagatcacagggtatgaaaagccattctcagttgcccagcactggtagagacccccaactccatcctgcactatcagcaagagggagccattgtagacagtggaagaggcttctgggactgctgctgggccatgactccaataataagaggccaaggctgacaggtgggggcaggggagctccaggatggagttagggacagccaggacttctttaatgatttgcgggcggctctgaggccgaaggctcctgctcatggggccactggcacatgcccactctgggttcccccgctccatgtcctgcttccaggagttcaggttgggggcagacaggaggcaacaggttcgggactcagggtcccaggcacagtgggggtcccgggcaaggacacagtccacacagctctcatagacactacagttggctcggggcaccctccagacacctcctgagaagcctacaaacactgcaccctgggtgggggccagctgcaggttgcgaacaggttcagggtcagggaacagctgaatctcttccaccagatgagcactgctgtccccacttaccacagccttgtggagcgaccctgtggtgattcccaggtacatgacaagatggctgcggacgcgtgggcggacgcgtgggtcgaccgggattccgggaggactacacgtcaaggtggctcttgagattctagtactagatgcgataagtagattagtgcgaagtagtaataccaataatcatacataaaccgcgat

SEQ ID NO: 88974 - DNA, 421 bp, Homo sapiens
tctgcaatccttatggccttcatgttgacgacgccagctgcgtttgctgcccctgaagcaacaaacgggaccgaggcaacgacgggtactactggcaccacaacgaccactaccggcgcaaccacgactgctactaccactggtggcgtggctgctggcgctgtcggcacggcgacagttgtcggtgtggcaacggctgttggtgtggcgacgttggcagttgttgcagcaaatgacagtggcgatggcggttctcataacacctcaaccaccacgtccactacacgctaatactgctttaacgcgtcgaaattaaagttaaatgatacccggttgcgatattcgtaccgggctttagagatttgcatttttttaattaacctttcaaggattaaaggtgcgccctcttattttatcgatt

SEQ ID NO: 88975 - DNA, 1170 bp, Homo sapiens
atggaagtccttttatgcagagcatctttgatagcgcagtgttccttggaacatactctaagaaacctgtactggctcatctctacagaccctctggctccagactggtgggtgaagcaggtccgagggggcgaggccaatgtggctgaaggaggtgatggcaatggccagaaagcagtgctgaccagagacggctactgggtcactggccaaattcagcacatgtatgaacttttaatactttttattgaatatccatcccaggcattatatgaacttctcaagtgtaaccacaatataaaggaagcaatcgaaagatactgctgcaatggaaaggcctctcaagaaggaatgactgcatggacggaagaagaatgccgaagctttgaacatgcactcatgctttttggaaaagattttcatcttatacagaagaataaggtgagaactaggacagttgctgagtgtgtagcattctactatatgtggaagaaatctgaacgttatgattactttgctcaacagacaagatttgggaaaaaaagatataaccatcaccctggagttacggactatatggatcgtttagtagatgaaacagaagctttgggtgggacggtaaatgcttcagccttaacttctaaccggcctgagcctattcctgatcaacagctaaacattctcaactccttcactgccagtgacttgacagctttgaccaacagtgtagcaaccgtctgcgaccccacagatgtgaattgtttggatgatagctttcctccactgggcaacacaccccgtggacaagttaatcatgtgcctgttgtaacagaagagttactcaccctgcccagcaatggggaaagtgattgttttaatttatttgagactggattttatcactcggagctaaaccctatgaacatgtgcagtgaagagtcagagagaccagcaaaaagattgaaaatgggcattgccgtccctgaatcctttatgaatgaagtttctgtaaataacctgggtgtggactttgaaaatcacacacatcacatcaccagtgccaaaatggctgtttctgtggctgactttggcagtctctctgccaacgagaccaatggtttcatcagtgcccatgctctgcatcagcacgcggccctacactctgagtga

SEQ ID NO: 88976 - DNA, 1029 bp, Homo sapiens
atttttcagaataaaatattttaaaagaaaaaaaaagttaggcacatttaacttgtaaaagttagtgtccctcaaattctagaacattcatagacatgaaaatcacgctgcaaaacaaaatccccttcgttcaaagagagctgctcttgcagtctctgctctctcatttctttattcactctataatattcagtgtgggggttactgtgctccagcgccaagtccagggggtggagaataacaagggcagaggacatagtccttgccctccaagcacctgtgatggtaatacagtgccatgggagcttggtgaagggcctcagccggctgcagagttaggcttatcaaaagtggtgatctctacggtgaatcctggaggacacaatggggtggggaacagaaacagttgttccaggcaaagaagggaggaatctgtgccaaggcccaggggctggtgaacctcaggcgtgtgctgggggtgctgcctcctcccaaatgtcggggcacagggaagtcagtctcgcttatcatgggtgggccacttggctctacaaaccccccattgccccaagtcccccacaggcaaaccacacaactgctcttcttctcactcttttttttaagccaagaaagaactcactgaaacagcctgtcagtcagggatgagtccaaggctttcctgacagagtgaccatgtttggcttggctgaaaatcacaaagccttggtttcccagttgcgcgattctctttgttctcaaggcttaaagcagcattacagtgggatggctaaacagagaaaaaaaaaaaaaggggggtcttttttttttttttaatacaaaaaaaatttggcccaaaaagggaggggttaatttttaaaaaaaacccaagggcttgggactttttaacaggcaattattttccaaggcattcaagggtccctactaatggaaaaatggtttttaccaaaaaaatgttttccaccctgtttttaaaaaacaagtttttccaacaacaacaacaacaacaaa

SEQ ID NO: 88977 - DNA, 470 bp, Homo sapiens
tagcccagtgtggtggaattccgcgtgctcttgcgctgccctctggtggccgctctgggtccttgcaccccgacccaggggccagcctgccctgtcctgtcctgataccgaggtgggagccctgccttggccagggtggccgtgttgacggttcttgggactgtgacattggaaggcgaggcaggtcaccagcactgtcctctgcaggatgggctgggattcatttggcagcttctcagggcctgtgtccggctggttggtccctgtgctgcccaaaccaggtgtccacatttccggctccgaggcgcaaagaagggggcaggtggtggcttgggtggaggaaggcaccatccatcagcccagggagggagggtaccacctgggcacctggggctggatgtgagaggcctggaccagggcccgccggagggcgtggaccacatgctcatgtgttcctgggtgcagtgtct

SEQ ID NO: 88978 - DNA, 833 bp, Homo sapiens
gtgtgactcgcacctgcagtggagaggcgccgccttaatcagtggctgttcgggttctgccatctcacaggtgatactggaatgaggggaaaaggtgtggaaactgtcttccatgactacttgatatctcttttgtttttcactcataatctcccctaactctgaaaataccagcacacaggtgtttcaaagatgttattcaagaaaggtgagagtggaatgttttgcaaatcagatttttatagatttttaaagtgttttaacctactacattgtaaagctccttccttgagaaactgcccatttcctcagcttttaatgctggtcctttttttctgctgtagaacattttaagttattacagaatttgatttctgaagcagaccctaatgagacttaactttcttttttttcaaggtggaggtaaagccatatgtgctagatgaccagatgtgtgatgaatgccagggcgcacgctggggtggaaaatttgctccctttttttgtgccaatgtcacttgcctgcagtattactgggagttcggctggccaaatatccactctcgtgctggacgtgaggtccatattcccttggttacagaaagcgccgtcgccgcccctcggatccacattccgtggacctaacaataagccgacgggcctctgttccacaaaggaaccacaggccgcacgggccttaccagggaccggagacccacgctcgcccgaccacttaaatgccagtcctttcgcgccggacccgagcgtcgcagtaccacgcgttttctatcggacgcgccatcactctgccccgcccgtcaagctttacaacc

SEQ ID NO: 88979 - DNA, 971 bp, Homo sapiens
  misc_feature (1)...(971): n = a,t,c or g
ttttttttttttctattataaatatttattttaaaaaatttcttggcagttaaaaggaagtggcataatgagcaggacaggacagttaccggctccccctcagatgcctctggctggcttctcacattctccaagatccagcctctaggctccagtctcggctacctctgctgggcggtagctcacaccccctttggttccccttctgtgctgccttctcatctgcacaaggaacgcgacgctggtgacagcaaaaaggaggccaaaaaccagggctaggatgtcaccagcagccaggcaggaattcagctggactggctcagcagcccgaggactgctgtccactccagcagggaaggaggcctcaatcactcgcccattcaaaggctgcgtcgctcggaagttcagctgtagccgagagtcaccaggtccccacagggtgtcagagagggtgtggagctgcttagcactcagcatcactgtctggttaaacacagtccagatgacaccctgggcacagggcggtgtagtcagagacccctcatattggaagtagcggctgaagtcagagggcaggagtgcagatatgtccagtcctgggacctgagtctctgagccttcctcagcgatttcttccaagcgagacagcaactgctcataggcactgttttcttccgggccctcctccagaaaggcggccaacacggccaggcctcccgggcgccccaaggcctcgtcaactctggcaaaggcggtgctgaggtgaaccacgtggatctcggcagggaaacggtggccttccacagtgtgctccgagcccggacgacctgcagccccccagtgcagatgcagctgcagagcccggtactcccgcccgggacccagagccatctctagcccaggaggcagggtcagttgcacactgtggccattgttgcgcaggcggaattccaccagctgtnaaaagtgcc

SEQ ID NO: 88980 - DNA, 473 bp, Homo sapiens
cctttgtgcagcgtggtggaattcctctgtcctccagttctgcatcccccacccccgcctcttcatacgtccagtggggcagccagccactctcccttccctgaaggtggcccttcccctgttaaggctgccacagggcacacctgggttggggctccccaaggtgtgcccagcagaagtgcaatagccaggagggttgcccctcctcatgggaatgtgtctggggtcttggtgccacaggggctgcagcgcagagtaggcagatggcctttggccccccggctccgcttcctcaggccctgccgggtcccttccctggctaccccaaggctcaggcatccctggtgacctgtggttctgggctggtgagggcacctgagcaacctggcacgggcagccaccatcctggcctcacctccacccaacactggaactccagcacccccagctacctcccaggacagacccctgtc

SEQ ID NO: 88981 - DNA, 452 bp, Homo sapiens
ctgggtaggagagcctggccccgctgtccccactgggtggagacaccatgtacttggtccacttgtgctcttcagccaggacaccagacatggtccaaaccgctgcagggctggctgcagcaactccctgacactcaggaaggcccaggctgggcaggcaatacctgctcccaacagccatgcatgccggctgccgctccaggactcccctgtccccaggaccaagatgacgcccaacagcactggcgaggtgcccagccccattcccaagggggctttggggctctccctggccctggcaagcctcatcatcaccgcgaacctgctcctagccctgggcatcgcctgggaccgccgcctgcgcagcccacctgctggctgcttcttcctgagcctactgctggctgggctgctcacgggtctggcattgcccacattgccagggctgtgga

SEQ ID NO: 88982 - DNA, 3235 bp, Homo sapiens
ccagggagcaacatgagcaaaaataggagtgtgtcagagtttggtgtattagaggaactgccagttgttcatactggctaggcagggccttacatttgaggggagaagggtgagagattgagctgggtggaggaggacatgaaggcctttgggtgccatgatgggaggtggtggaaggttttgacctgtccaccttcctgtttcctccttgaagctgaggcatacgtcagtgggatgctcttttgcctgggtatatttctctccttttacctgctgaccgtcctcctggcctgctgggagaactggaggcagaagaagaagaccctgctggtggccattgaccgagcctgcccagaaagcggtcaccctcgagtcctggctgattcttttcctggcagttccccttatgagggttacaactatggctcctttgagaatgtttctggatctaccgatggtctggttgacagcgctggcactggggacctctcttacggttaccagggccgctcctttgaacctgtaggtactcggccccgagtggactccatgagctctgtggaggaggatgactacgacacattgaccgacatcgattccgacaagaatgtcattcgcaccaagcaatacctctatgtggctgacctggcacggaaggacaagcgtgttctgcggaaaaagtaccagatctacttctggaacattgccaccattgctgtcttctatgcccttcctgtggtgcagctggtgatcacctaccagacggtggtgaatgtcacagggaatcaggacatctgctactacaacttcctctgcgcccacccactgggcaatctcagcgccttcaacaacatcctcagcaacctggggtacatcctgctggggctgcttttcctgctcatcatcctgcaacgggagatcaaccacaaccgggccctgctgcgcaatgacctctgtgccctggaatgtgggatccccaaacactttgggcttttctacgccatgggcacagccctgatgatggaggggctgctcagtgcttgctatcatgtgtgccccaactataccaatttccagtttgacacatcgttcatgtacatgatcgccggactctgcatgctgaagctctaccagaagcggcacccggacatcaacgccagcgcctacagtgcctacgcctgcctggccattgtcatcttcttctctgtgctgggcgtggtctttggcaaagggaacacggcgttctggatcgtcttctccatcattcacatcatcgccaccctgctcctcagcacgcagctctattacatgggccggtggaaactggactcggggatcttccgccgcatcctccacgtgctctacacagactgcatccggcagtgcagcgggccgctctacgtggaccgcatggtgctgctggtcatgggcaacgtcatcaactggtcgctggctgcctatgggcttatcatgcgccccaatgatttcgcttcctacttgttggccattggcatctgcaacctgctcctttacttcgccttctacatcatcatgaagctccggagtggggagaggatcaagctcatccccctgctctgcatcgtttgcacctccgtggtctggggcttcgcgctcttcttcttcttccagggactcagcacctggcagaaaacccctgcagagtcgagggagcacaaccgggactgcatcctcctcgacttctttgacgaccacgacatctggcacttcctctcctccatcgccatgttcgggtccttcctggtgttgctgacactggatgacgacctggatactgtgcagcgggacaagatctatgtcttctagcaggagctgggcccttcgcttcacctcaaggggccctgagctcctttgtgtcatagaccggtcactctgtcgtgctgtggggatgagtcccagcaccgctgcccagcactggatggcagcaggacagccaggtctagcttaggcttggcctgggacagccatggggtggcatggaaccttgcagctgccctctgccgaggagcaggcctgctcccctggaacccccagatgttggccaaattgctgctttcttctcagtgttggggccttccatgggcccctgtcctttggctctccatttgtccctttgcaagaggaaggatggaagggacaccctccccatttcatgccttgcattttgcccgtcctcctccccacaatgccccagcctgggacctaaggcctctttttcctcccatactcccactccagggcctagtctggggcctgaatctctgtcctgtatcagggccccagttctctttgggctgtccctggctgccatcactgcccattccagtcagccaggatggatgggggtatgagattttgggggttggccagctggtgccagacttttggtgctaaggcctgcaaggggcctggggcagtgcgtattctcttccctctgacctgtgctcagggctggctctttagcaatgcgctcagcccaatttgagaaccgccttctgattcaagaggctgaattcagaggtcacctcttcatcccatcagctcccagactgatgccagcaccaggactggagggagaagcgcctcaccccttcccttccttctttccaggcccttagtcttgccaaaccccagctggtggcctttcagtgccattgacactgcccaagaatgtccaggggcaaaggagggatgatacagagttcagcccgttctgcctccatagctgtgggcaccccagtgcctaccttagaaaggggcttcaggaagggatgtgctgtttccctctacgtgcccagtcctagcctcgctctaggacccagggctggcttctaagtttccgtccagtcttcaggcaagttctgtgttagtcatgcacacacatacctatgaaaccttggagtttacaaagaattgccccagctctgggcaccctggccaccctggtccttggatccccttcgtcccacctggtccaccccagatgctgaggatgggggagctcaggcggggcctctgctttggggatgggaatgtgtttttctcccaaacttgtttttatagctctgcttgaagggctgggagatgaggtgggtctggatcttttctcagagcgtctccatgctatggttgcatttccgttttctatgaatgaatttgcattcaataaacaaccagactcagttcaaaaaaaaaa

SEQ ID NO: 88983 - DNA, 435 bp, Homo sapiens
atggccaactctgctatggacaccagagtactctgctgtgcggtcatctgtcttctgggggcaggtctctcaaatgccggcgtcatgcagaacccaagacacctggtcaggaggaggggacaggaggcaagactgagatgcagcccaatgaaaggacacagtcatgtttactggtatcggcagctcccagaggaaggtctgaaattcatggtttatctccagaaagaaaatatcatagatgagtcaggaatgccaaaggaacgattttctgctgaatttcccaaagagggccccagcatcctgaggatccagcaggtagtgcgaggagattcggcagcttatttctgtgccagctcaccagcccccactagaagcatcaacaatgagcagttcttcgggccagggacacggctcaccgtgctagaggacctgaaa

SEQ ID NO: 88984 - DNA, 385 bp, Homo sapiens
cagacagatgcggtgggtgttatcaaagcaatggacaagaaggctgctggagctggcaagggcaccaagtctgcccagaaagctcagaaggctaaatgaatattatccctaatacctgccaccccactcttaatcagtggtggaagaacggactcagaactgtttgtgtcaattggccatttaagcttaatagaaaaagactggttaatgataacaatgcatcgtaaaaccttcagaaggaaaggagaatgttttgtggaccactttggttttcttttttgcgtgtggcacttttaagttattagtttttaaaatcagtactttttaaaggaaacaacttgaccaaaaatctgtcacagaattttgagacccattaaaaagttaa

SEQ ID NO: 88985 - DNA, 403 bp, Homo sapiens
  misc_feature (1)...(403): n = a,t,c or g
aatccctgaggagtagtagaatagcagatggatcactgagaagtgatttccttgaggatagatttccatgaaagaaaggaaatgagatattctaagaggtgggctagcggcttgtaacctacatggaagaggttatgaaatgacggcagaatagaatgggcctttgaggctggaaggagatattttccttggtccaagaaccatttgccttgtgtgagaagagatggataggtggaggttttagtgggagagtaggtgggagttaccaatgagaaggagaaaaactggccatgagggacagaagttgtaatgctcgctgcttctttagctaccttatcagcataagcgttgccctgagtgatgggatctgatgccttttgatggcccttgcagtgaatgactn

SEQ ID NO: 88986 - DNA, 540 bp, Homo sapiens
  misc_feature (1)...(540): n = a,t,c or g
cgataggtcagatcgagctcgagctggccacagccaaaagtgacatgaaccgacacctgcacgagtacatggagatgtgcagcatgaagcgaggcctggacgtgcagatggagacctgccgccggctcatcaaaggctccgcagacaggaattcaccgtcccccagctccgtggccagcagcgactcaggaagtacagatgagatccaggatgagttcgagcgcgaggcggatgtggagcccatggtcagctgatgactgaggccctgcgagcctggtggtcttggtgatggggccctgccacctctcctcatggggccaggaaggcccctcggagtggggtttgaagccacaccacacagactttttctngccctcccttctctggaggccctgagggactgctgcttccttccttccttccacaccaccaacgggtgccccgtctccatcccccacccacccaaggaatggtgctgtcaatttctattgttctccacattacaaatgcagacttctgtgcggacaaaaaaaaaaaaaa

SEQ ID NO: 88987 - DNA, 709 bp, Homo sapiens
ttttttttttttgagaaaaaaattgggcttttattggcaattacaaaagtaatagattttcttacataatacgttccttcagtaatatatttttcaagtattttaccgtagaatttctaaagtactttgtcattgaccccataatttattataaagtaggtcccataatcacattttttggaagttgctgaaattgagataaaaaatattgtttttttatgagaaaaactggacaaaatacagaatggccaaaactagattaactggctcagttatgtctactaggtgaaagaaaatacagaatctgttactgtagaaattttaagaggttttgagtcagttccagtataaaaataaggccaaagtgctcctgtaaaattatcattaaaagtatagagaagagatctatcattcaaattataaaaggaaacttcattcatttcatagtctaaaaaaatgccaatcttactaggaattacttgtggcagcagaataatttccctgtggcccaatacaatataattattctgactagatcgccaaattccccataatccatcctgtactaaaattggttgactcttcctccttctgggaagacagtcattacagacaccaagaatccattcaggcttgtctttcacttctacttcccagtactgcctgccacaactatatcccttagaacccagaacagctgggaggagat

SEQ ID NO: 88988 - DNA, 739 bp, Homo sapiens
ccaccccacactgactgatgagcagtccacacatggatgccaattttgcagaagagacggagaaagagtctgtgcagccccacagaggccagaagaggcacctgcttctcgctctccagctcttagagtgcgggaccaatcacacatctcccctgtggattctatgagattgaaccaattcttctttacctcaattaactggaatcaagttttcttacatcgcagaccaaatgaggcttttccaagactttctaccttggtttctaggcttctccttgcctgggcctgtgagttccttggcaggcttgtcacagatagaagctccacacctcccaggtggctgcagtggctgtgagtgatgctctttgcataactaggtgttctgcctgctttgtaggaaatgcgagctgggccgtgaggcgtgtagtcacactttccagcacagccgaggtagaggacctgactcctcttgaggctgaaagataccctctgccttggttgcacttccctcaccccattctgattttctccattcatgagagaatttccacatagtcagtggtctccgtgccttcattcccacttaggctatataggaggggtaaaggatggcctcaggacgaatcatacctctgggttggaaaaaccggggctttaaacccgccgggtctttcttaatgaaatacttaaaggattgggtatgggtgggtccccctacaaaacaaatggaaaatggaat

SEQ ID NO: 88989 - DNA, 391 bp, Homo sapiens
cctgaagcaagaggaagccttccgcagctactttgagatcttcaatggtcctggtgaggtggatgcacagagcctgaagaatatcctgctcctaatgggcttctctgtgacgctggcccaggtggaggacgccctgatgagtgctgatgtcaatggagatggtcgtgtggacttcaaagacttcttggctgtgatgacagacaccaggcgcttcttctgctctgtggaacagaacgccctgtcggacatggctccccacaacccccacactctactctttgagatcctgtccctgctggtagagatgctggccttaccagaggcagtcttagaggaaatcacaaactactaccagaaaaagctgaaggaaggcacctgcaaggcccaggaa

SEQ ID NO: 88990 - DNA, 386 bp, Homo sapiens
atttaaaattgtaagtacttaaagcaacatatatgttgtaggatctttttaagcaagatttttgttgataatgcttacagtaatttaatcttcaacaaaaacaatatgttgaccttaatacattggtagtgtattaataattttatgtttgttcctcaagcccagttgtgcatttccagtttgccatgacacagaaaagcgctgtagacttgtgcttagctatgttctagagggtttaaaatctgtcgatagcagcatcaaaaaagaaagcgaccttccagcagctgaccccagcactccaatcccgttaaaatatgaagatgaatcctcaagagggggtcccgaggggctagagaagcagatggccttgtttttggacaaaagtt

SEQ ID NO: 88991 - DNA, 726 bp, Homo sapiens
gactactgtaagtagcatctatgtcagaaaactttctgtttctgccaggatagagctactgaagtaaatggcggcaggaaatagtttgtcaaatcctgcagcatccatcccactttgatgcaagtcactatccatctgttacacgtacctttattatgttattaaataggagccaggtggtgcggctggatttggttggttggtttgctttttggtctttattggtgatctactaaaatgacttgttctacaaatgtttcccaaactttaggcatacaaaagattttgcgatatttttttgcctgtccatatttgtactattattcatttaatgcttttctttaaatagattccatttttagtacgtttattcaaataggaaacttcatattagcctgaaaatagacagctagctgtaaacctgtgaaataatggttttgatgcactgggtatatattgttcttgcatgtgaagattactaacatattagaaaaatacccatggacttaccacttgaattacctggcggtcaacgaaacgcacgccggtaatcccggcctttgggacgcccagacaggaaggtacttcgactcagatttctggaaccccatggcaaatttgtaattttcgtgtgggaccaagaaaccccccggccccccaaaccccccgggatttttttttattgggaaaattccccaggggaaagccccccccccccggggggct

SEQ ID NO: 88992 - DNA, 666 bp, Homo sapiens
aatacatcctgctaaaaaggatgattccgtacccaaaaaatttggtaaatgtagcaagctacatccacctccctcccactgctttcaacaatcacaatgtccctgaaaatattaaaggttgtgagaaatagaaataaaactgtttcactttgactcaccatttgctatttcatcccttctcccttcgtttattaagaggtagtgttggcaaatggtaaaatacctcttaacatctatggaaaaacatttgttcctctcccagaccacattttgggaaatgctacattcaagtaccctgacatttaaagatatatgcagaatttgggtaattttaactggtatatttactatgctttgcataaccaataactcatagaatgtcttaattcccagaaaacagatatttaaaataccaaatccctaaactaaaaaagtaaaaaacatttatcttgattgactcaaagagtacatacctatattttgctttttcatgaacccagacatactcagggtttttcaaactcaagcgtgcaagggcctttacagatttagtttgtgttgctgagaaaaggaaagtctgacgtttcttggggagattttcaataacagcattcatggtatcagcgaaggccctaaccgagattctatctgctttatcaagagatg

SEQ ID NO: 88993 - DNA, 1952 bp, Homo sapiens
atggtgaatctggagccaatgcacacagatatcaagatgagtggggatgtagccgattccacggatgctcgcagcactctcagccaggtggagccaggaaatgatcgaaatggcctagatttcaacaggcagattaaaaccgaagatctcagtgactccctgcagcagaccctctcccatcggccatgccacctgagtcaaggacctgccatgatgtccggaaaccaaatgtctgggctaaatgccagcccatgtcaggacatggcttccctccatccgctccagcagcttgtgctggttcccggccacttacagtctgtatcccagttcctgctatctcagacccagcctgggcagcaaggtctgcagccaaatctcctcccctttccacagcaacaaagcggtctcctcctcccacagactgggccgggactggcatcccaggcatttgggcgccctgggctgccaggatcctctttagaaccccacctggaagcatcccagcatctcccagtgcccaagcatctacccagctctggaggggccgatgagcccagtgacctcgaggagctggagaagtttgccaagaccttcaagcagaggcgcattaagctgggcttcacacagggagatgtggggctggcgatgggaaagctgtatggcaacgacttcagccagaccaccatctcacgatttgaggccctcaacctgagcttcaagaacatgtgcaagctcaagcccctgctggagaagtggctgaatgatgcagagtcctctccgtcagacccctcagtgagcacgcccagctcctaccccagcctcagtgaagtatttggtaggaagagaaagaaacggaccagcatcgagaccaacatccgcctgactctggagaagaggtttcaagataacccaaaacccagctcggaggatatctccatgattgcagagcagttgtccatggagaaggaggtggtgagggtctggttctgcaaccgacgccaaaaggagaagcgaatcaactgccctgtggccacacccatcaaaccacctgtctacaactcccggctggtatctccctcagggtctctgggccccctctctgtccctcctgtccacagtaccatgcctggaacagtaacgtcatcctgttcccctgggaacaacagcaagccttcatctcctggctcaggactccacgccagcagccccactgcatctcaaaataactccaaagcagcagtgaactccgcctccagttttaactcttcaggatcttggtaccgatggaatcattccacctacctccactgagaccaaaaagtttctcctactccagctggccctgtattccccctggaaggaagggaatcatgccttctatatacagacagattgccttcagaagagtggaagaaaatctccactatcaatgaacccagactcttgtcttcttcaagagcaagggcctccggagatccaaactgtgattgaaccaagtgcagactcctaatgctcttgaaatacacagcccctcctaggagcttaccattttcaccttccttgcctatgcccttgccttctagttccaaatattttagccagcttcactgtggcaatagtctttcagagaaaagacttcttgctgttattcttccaactactccgtgggcttttggggacagccatttggctggggtgccaaacaccagaaggggagataatagttttgactctgaacttggccccaacccctgaactgatcccaaaatctgtgaaaagatttgaatctgatatctccaccaaagccttgatgttttctctgtacagctaagttttctgatgggaatcttcatctcaccccattttcttttttaacctcgccccctttttctacaatcaaatccattcattattgcggccttcaggggggccccttcttttttgcaggaggg

SEQ ID NO: 88994 - DNA, 647 bp, Homo sapiens
  misc_feature (1)...(647): n = a,t,c or g
gcctattcacagcgaggagaaaagattaataggatcagttaagatctgtgaaattcacagggccatgcttttacttggagacaagggattctgcacagtcactgaactgaaaggcagccaggctttctcttccttctgctttgcagtgcaccactctttctcttttctagtttttctgcctgtgattggcagtgggaactggggtggaattctgatcagtcctgccaggccaggaagctatcttcaattcaggaaggtgagatgtgaccctgctgctgtctccaaactggccagcatcagagaactcttcaagggtatgtttttgggtgcctgaccaaccacgaagacaactgacatttgggccgggcatggtgtaatcctagcactttgggaggccaaggcaggaggatcacatgagctcagaagtttgaggccagcctgggcaacatagtaagactttgtctctacaaaacatagaaatattagctggatgtagcggcgcatgtctatagtcccaactacttgagaggctgaagcaagaggatggcttgagctcgggagaatggaagtcgcnaggggtggtgttaaaaaccctagactccaacccggggaggggaatacaggagaacccctcttcaaaaaaaaaa

SEQ ID NO: 88995 - DNA, 377 bp, Homo sapiens
cggtacgaggtagatgtgaccgtggagctatggaaacctataatgatgtcttgtaataaattattgaagaatttctgagcctcaggatatgggaagaaaatgaaacaatgaaaatgatgtgtcagagctttataccttctctacgtatttgacagacatctgtggtaagtgcttgtttcatcagatggctttaaggaggtgaaatgccaggtaagagcctcagggaaggaacagtggacaaatatgtgactattttgctattaacaaggatagttgtttataagttctgttgcgagtaaagcttttaaaaaatgaaaatctgtggattttagaaagcatgttatctaaaggggcttcatttgctaacatttggcagt

SEQ ID NO: 88996 - DNA, 3799 bp, Homo sapiens
gtcactttggttgatagcagccgctctggtagaggttaggacttcagctgatggacaagctggtaatgaagaaatggtgcaaatagatttaccaataaagagatatagagagtatgagctggtgactccagtcagcacaaatctagaaggacgctatctctcccatactctttctgcgagtcacaaaaagaggtcagcgagggacgtgtcttccaaccctgagcagttgttctttaacatcacggcatttggaaaagattttcatctgcgactaaagcccaacactcaactagtagctcctggggctgttgtggagtggcatgagacatctctggtgcctgggaatataaccgatcccattaacaaccatcaaccaggaagtgctacgtatagaatccggaaaacagagcctttgcagactaactgtgcttatgttggtgacatcgtggacattccaggaacctctgttgccatcagcaactgtgatggtctggctggaatgataaaaagtgataatgaagagtatttcattgaacccttggaaagaggtaaacagatggaggaagaaaaaggaaggattcatgttgtctacaagagatcagctgtagaacaggctcccatagacatgtccaaagacttccactacagagagtcggacctggaaggccttgatgatctaggtactgtttatggcaacatccaccagcagctgaatgaaacaatgagacgccgcagacacgcgggagaaaacgattacaatatcgaggtactgctgggagtggatgactctgtggtccgtttccatggcaaagagcacgtccaaaactacctcctgaccctaatgaacattgtgaatgaaatttaccatgatgagtccctcggagtgcatataaatgtggtcctggtgcgcatgataatgctgggatatgcaaagtccatcagcctcatagaaaggggaaacccatccagaagcttggagaatgtgtgtcgctgggcgtcccaacagcaaagatctgatctcaaccactctgaacaccatgaccatgcaatttttttaaccaggcaagactttggacctgctggaatgcaaggatatgctccagtcaccggcatgtgtcatccagtgagaagttgtaccctgaatcatgaggatggtttttcatctgcttttgtagtagcccatgaaacgggccatgtgttgggaatggagcatgatggacaaggcaacaggtgtggtgatgagactgctatgggaagtgtcatggctcccttggtacaagcagcattccatcgttaccactggtcccgatgcagtggtcaagaactgaaaagatatatccattcctatgactgtctccttgatgacccttttgatcatgattggcctaaactcccagaacttcctggaatcaattattctatggatgagcaatgtcgttttgattttggtgttggctataaaatgtgcaccgcgttccgaacctttgacccatgtaaacagctgtggtgtagccatcctgataatccctacttttgtaagactaaaaagggacctccacttgatgggactgaatgtgctgctggaaaatggtgctataagggtcattgcatgtggaagaatgctaatcagcaaaaacaagatggcaattgggggtcatggactaaatttggctcctgttctcggacatgtggaactggtgttcgtttcagaacacgccagtgcaataatcccatgcccatcaatggtggtcaggattgtcctggtgttaattttgagtaccagctttgtaacacagaagaatgccaaaaacactttgaggacttcagagcacagcagtgtcagcagcgaaactcccactttgaataccagaataccaaacaccactggttgccatatgaacatcctgaccccaagaaaagatgccacctttactgtcagtccaaggagactggagatgttgcttacatgaaacaactggtgcatgatggaacgcactgttcttacaaagatccatatagcatatgtgtgcgaggagagtgtgtgaaagtgggctgtgataaagaaattggttctaataaggttgaggataagtgtggtgtctgtggaggagataattcccactgccgaaccgtgaaggggacatttaccagaactcccaggaagcttgggtaccttaagatgtttgatataccccctggggctagacatgtgttaatccaagaagacgaggcttctcctcatattcttgctattaagaaccaggctacaggccattatattttaaatggcaaaggggaggaagccaagtcgcggaccttcatagatcttggtgtggagtgggattataacattgaagatgacattgaaagtcttcacaccgatggacctttacatgatcctgttattgttttgattatacctcaagaaaatgatacccgctctagcctgacatataagtacatcatccatgaagactctgtacctacaatcaacagcaacaatgtcatccaggaagaattagatacttttgagtgggctttgaagagctggtctcaggtttccaaaccctgtggtggaggtttccagtacactaaatatggatgccgtaggaaaagtgataataaaatggtccatcgcagcttctgtgaggccaacaaaaagccgaaacctattagacgaatgtgcaatattcaagagtgtacacatccactctgggtagcagaagaatgggaacactgcaccaaaacctgtggaagttctggctatcagcttcgcactgtacgctgccttcagccactccttgatggcaccaaccgctctgtgcacagcaaatactgcatgggtgaccgtcccgagagccgccggccctgtaacagagtgccctgccctgcacagtggaaaacaggaccctggagtgagtgttcagtgacctgcggtgaaggaacggaggtgaggcaggtcctctgcagggctggggaccactgtgatggtgaaaagcctgagtcggtcagagcctgtcaactgcctccttgtaatgatgaaccatgtttgggagacaagtccatattctgtcaaatggaagtgttggcacgatactgctccataccaggttataacaagttatgttgtgagtcctgcagcaagcgcagtagcaccctgccaccaccataccttctagaagctgctgaaactcatgatgatgtcatctctaaccctagtgacctccctagatctctagtgatgcctacatctttggttccttatcattcagagacccctgcaaagaagatgtctttgagtagcatctcttcagtgggaggtccaaatgcatatgctgctttcaggccaaacagtaaacctgatggtgctaatttacgccagaggagtgctcagcaagcaggaagtaagactgtgagactggtcaccgtaccatcctccccacccaccaagagggtccacctcagttcagcttcacaaatggctgctgcttccttctttgcagccagtgattcaataggtgcttcttctcaggcaagaacctcaaagaaagatggaaagatcattgacaacagacgtccgacaagatcatccaccttagaaagatgagaaagtgaaccaaaaaggctagaaaccagaggaaaacctggacaacctctctcttcccatggtgcatatgcttgtttaaagtggaaatctctatagatcgtcagctcattttatctgtaattggaagaacagaaagtgctggctcactttctagttgctttcatcctccttttgttctgcattgactcattt

SEQ ID NO: 88997 - DNA, 1852 bp, Homo sapiens
ttttttttttttgatggaagaccaagggttgccaggcccactgtaactgccgagctgcctgctgtcacgtgacactgagggatggcttgtttcttccgggtgggaggatgggggtcagagccaggagtatggagatctgagaccgtgagcagggaaaaaagccagtgctaacatgcaaccattcctcacgccaccgccacatcaaagctggttgggaaccctttgctgctggggaggctggaagcatattccccaagagcactgccctgggcatcatctccctcctgcgaggagctgagccagtcccctcacagatggataaatgaggctgatgtttggagggagaggcacacggtaaatggcatccccttagggcgcctctttgggaaaggaaagtggatgctcctttgaggcaggcgaggggctgggagtgggtagccgtcatgttgtcccccgtgggatcccatttttaacttgacccagattgtcttgggctccttttactttcagggggctgctttcctgggccaggctgtgtagcacttcccaccctcaggcatgagtacagactggtcaaaatgtttatgcagtcaaggccaaagcctgccctgagcccagacacacctggggtccccattcttggggccttggtcccctaaacaatctcttcctcagccaagcacaagggaaatccagactcagggttccagaaatcccccgttcccaaaccaaaccaatcatggatcttccctttaaggggtagaatcagcctttagagttacaagcccctggaaaagggagcaggtcccatacaatcagcctttctcctcttctcttcttgggacaggaataactgctgagcagtccccctttgccactcctggctgtctgagtgggcacttgtctggctgctggccagcagtgaagggccacttggtgacttcgtagggttccttagagaagtgacatggccttgaggagattcagggcacctttcctcagtgagctttgatatggtccaaaaaacagccttaaatcaaggatatttttttggaggtaaggtgtttgggaaggtttggaggaagagttaggtttgtgctttgtaatcttgggcaatccatgtttttggtgcctgccctcccctcttggggaggccatgcttgactctgctgaaagctgctaactggtgacagggtggatcatggtgaaggactaaggggtaaggtcagggaatgcttaagctctggccctgccctgtattcctcttccccttggtagcagttccctgacccagggccaaggtgtgtccccaggaaggtggttctgtgcatgcctgggtgtggttaaggcgtggcccagaaggcttccctggtgctctcagtccaggcaaagcccagagcatctgagcacgtctctgacttccagtggcaacacagtttgaatgtggtgaaacagggtgtagttcttttccacattctgtgtcatctagtcgtgcaggtagggaaaaagttggtctaattgaagattgtgcatttcctagtgacaggtgccaagaggttatgatacgggtttcttgggtctgatgtacagtgtgaataaatgcttgcagctcttagctcttttttgatcgatgaagcacttttttattaatattttcctttgttaaaggaggaaccgtaactctccatagctgtacatataacccttttctcctaaagaggagtcagtcagtgctcctatatttttcattttttgtcaaagcaagaagtaaatactttagaattgttaaatatataaataaagcaaataaagttgagtgttccacatggtagcatttgctaacacttcctaa

SEQ ID NO: 88998 - DNA, 736 bp, Homo sapiens
tccagaggccattcctctgggcttatcctgcttcctccacgctggtgaataactcccacctcctgccctttgtctctctatttatggcccttctgagttctggagaagacttcactgggacttacgtcagtgagcttaacatctttctcattaatgaggaatgagagagaaggcaacaggacaatgcccccatggcttccactgtaagaaagttgaagactgtgaatcttaaagttattagagcagttggaagccacacggttttaacagttctacttgtgtacctctggcaatgaggaactcactctctaggagccactctttccattgttggatagctcttctcattggaaagctctttcccgctgatctgacattcgtgtctggaactttcatccatttcagaggataggagcattcttgacggtacagtttgtccaaccagtcaacacattactcttccttttgttctgacataagtggtataaaatgaggtaatagatgcattttggaaaaagtaatggcattatacaaatgcaagaaatggtattgataggcttttatggcttagatgaatctgacttgaactttcagcatcatatactcccttagtcgagaaccttgccggggccttttttagggagcagcttccttggggattttaatcgcggggaggaaaaaaccccttttttggccttttattcccccccagaggggccacaattttaccgggggg

SEQ ID NO: 88999 - DNA, 2599 bp, Homo sapiens
atgcatctgctcccagccctggcaggggtcctggccacactcgtcctcgtccagccctgtgagggcactgacccagcctcccctggggcagtggagacctcggtcctgcgagactgcatagcagaggccaagttgctggtggatgctgcctacaattggacccagaagagcatcaagcagcggcttcgcagcggttcagccagccccatggacctcctgtcctacttcaaacaaccggtagcagccaccaggacagttgttcgggccgcagattatatgcatgtggctttggggctgcttgaagagaagttacaaccccagcggtccggacccttcaatgtcactgatgtgctaacagaaccacagctgcggctgctgtcccaggccagtggctgtgctctccgggaccaggccgagcgctgcagcgacaagtaccgcaccatcactggacggtgcaacaacaagaggagacccttgctaggggcctccaaccaggctctggctcgctggctgcccgccgagtatgaggatgggctgtcgctccccttcggctggacccccagcaggaggcgcaatggcttccttctccctcttgtccgggctgtctccaaccagattgtgcgcttccccaatgagagactgacctccgaccgtggccgggccctcatgttcatgcagtggggccagttcattgaccatgacctggacttctccccggagtccccggccagagtggccttcactgcaggcgttgactgtgagaggacctgcgcccagctgcccccctgctttcccatcaagatcccacccaatgacccccgcatcaagaaccagcgtgactgcatccctttcttccgctcggcaccctcatgcccccaaaacaagaacagagtccgcaaccagatcaacgcgctcacctcctttgtggacgccagcatggtgtatggcagtgaggtctccctctcgctgcggctccgcaaccggaccaactacctggggctgctggccatcaaccagcgctttcaagacaacggccgggccctgctgcccttcgacaacctgcacgatgacccctgtctcctcaccaaccgctcggcgcgcatcccctgcttcctggcaggtgacacccgatcaacggaaacccccaaactggcagccatgcacaccctctttatgcgagagcacaaccggctggccaccgagctgagacgcctgaatccccggtggaatggagacaaactgtacaatggggctcggaagatcatgggggccatggtccagatcatcacctaccgagactttctgcccctggttctgggcaaggcccgggccaggagaaccctggggcactacagggggtactgctccaatgtggacccacgggtggccaatgtcttcaccctggccttccgctttggccacacaatgctccagcccttcatgttccgcttggacagtcagtaccgggcctccgcacccaactcgcatgtcccacttagctctgccttctttgccagctggcggatcgtgtatgaagggggcatcgaccccatcctccggggcctcatggccacccctgccaagctgaaccgtcaggatgccatgttagtggatgagctccgggaccggctgtttcggcaagtgaggaggattgggctggacctggcagctctcaacatgcaacgaagccgggaccacggccttccagggtacaatgcttggaggcgcttctgtgggctctcccagccccggaatttggcacagcttaaccgggtgctgaaaaaccaggacttggcaaggaagttcctgaatttgtatggaacacctgacaacattgacatctggattggggccatcgctgagcctcttttgccgggggctcgagtggggcctcttctggcttgtctgttcgagaaccagttcagaagagcccgagacggagacaggttctggtggcagaaacgaggtgttttcaccaaaagacagcgcaaggccctgagcagaatttccttgtctcgaattatatgtgacaataccggtatcaccacggtttcaagggacatcttcagagccaacatctaccctcggggctttgtgaactgcagccgtatccccaggttgaacctatcagcctggcgagggacatgaggcttctgcaggagtctatcccaagtctccaacttttggagacaaggggaaggggaggaccatgaggctgccttgtctccctggagcaagtgcaggctgctgacgcttctgctggctacagctcagagctgggttccccagccaggagtgaaggctgggggctcctatcagcaatggaccttcccgccttgggagcctcttaggtattaggctatgaatcagcgccacgtgcaaaggcttgggagccaagccatgtggtcttgcaccccaggcaagaaaagtcagctggagggtttacagcactttctacttgtttcccagccctccctcccctccctcaccatgactaagagaccactcggtcctagcctccagacaccccacaatactcctctgagcctgaggccaggcagcatgctctgcttctaccaataaagcactgccggaattc

SEQ ID NO: 89000 - DNA, 396 bp, Homo sapiens
gaaactgattttttatttgggaaacagatgtacttatgtgtgcaaagaacaacacagtggccctggcagcaaatcaaacacaaccatagtcatctggggaaaggtaacttgtgcccaaggaaagaacagcgtggtttgtgccaagttccaaagccaccctcctgctaaggccattggtcacagaatccatgtgatgctgtaccactggaggattcaaattcattgaaaagtaaataaatacaattttagggttgttaatttgaaaaaacatgtgggtatctaatttctatgtgttggcagggccaaacagtgaaacacggagcttcaaggcgaaggcagcttgttagggtccctccttctgacctgcccttggcagcacatagacaacctgtctac

SEQ ID NO: 89001 - DNA, 371 bp, Homo sapiens
gagggtgcagaggccacattgttctccatcacctaaacccagatatgatactcattacttcaactcacatgccttggcaagatctagatgcaggaggttctggcaactgttgccctgacaagccaacatatagcaacagctgtaccccaaaaagaaaaactccttgaaagaaatagtccaaactacttcaacttccagtttttccttaattcactgcaactgaggtttcatctccacatcttccatcttgctaaattttatgatcccccagattagttatgcatcaacggcacccgagctaagtgatgaccggcgctatgacttcttctctcgcgtggtgccacccgattccttccaagcccaggccatgg

SEQ ID NO: 89002 - DNA, 428 bp, Homo sapiens
caaagggttaggaggtctctgagaaatgagggagccacctagacaggggtgagctccttatcatatttctgcatgccctcgtcagggagcaggacctccactgtgaagctgaccttcttggcgtggacaaagctataggtgttgtcgaagcgtaggacatctgggggacagatggaaagaggggcattgggcttggctttacacactcttttttccacccctggccatggaggaggacaggcttgtgttcccactggctttgtttgccaagctgggccaagctcccaccacgcctcttcccttccccatgggaactgccaacccaagcaggtcctgtaaacagacaccaacctcctcttggcatgtgcccaggcatggctttactggcatcgagaacaatggtcattacatcccattgtctcacacct

SEQ ID NO: 89003 - DNA, 359 bp, Homo sapiens
ctatcaaatattatttatttatttttcaaggtatagatgattcacaacgccaccactgaaaataaaaaacttcccaattttatcacaataatatcaaatcattgctatattcttgtcgcgataaatctagctccatttctatcttaaatatattgtcacttatgtatacccacaacccaaacatctctctatatatagatgtatataatcccagatatatttaactattcttttccctaatggtgatatttacattttttattacctcctaaatcctgacagtgggattttttctgtcaacacattgactgtcccgatgttgatcttctagatattgcatactgtgacccatcactgtg

SEQ ID NO: 89004 - DNA, 1306 bp, Homo sapiens
tttaaaaataatgatttgagttaaccaaacaattaaaggcttaccctatagagcccctaatattctcttaattttggagaggtctaatttgctttgtccagttggggtgtgtgtgtgtacctgatgtttcagtatgctttctctttgtactcaaactctccctcatagcaacatgaagaatgatgactactttttgttgtgcctaataaactgctctccactcaatgaatattgttacttgactcccattacaactctgggggaatctggattcacagaggaatagaaccttcttaccaaatctggagtgtgattgtaattttacttttgaagcacccgcttcccagaagaactgccagtgatggatgccactgtcaggaacccaggtgcgcacgctcatacatcagccgggaaatcatataaacagctctcccagcaggccagggctgacacacccattactcccctatggaaagagatgtgtcaaaaaaatcagggcagcagcaagaaagaggcagagaagaaggagttgggagaggatgggtttttgtaggtccacccagtttttttccttcctcatcttcctctgagggcagcagcagcagcaggctaaggtttggatttgtggttataatgctgtgtgacaggatcatggggagttgtctggaaacatttctcctgggagtgtgctgtcagctcgttttcatagtgcacatgaagggaaacattctgctctatacacatgcctttatccttatataggtacaggtgatgtctacattttcctttgggatggatgtggcctacctaggctaagatcacgctatgacatttagtctctttggagagcaagtctgtgttgattccagcaggatggggcagcaggggctggttgctaggatgtctgaaaacagaggatactactggagtggaggagtggaagcagcccagcaggcccactggtagccatgagtgtgaggatagcttatcggtagcggcaggccaaagcattgacattcttgaccacaaaaaagcccatggtgactggagggatgaccaatgtccggccggcccgaagggggcggggcttcaattctgggagggtcccgtcgtccaccatcactaagggctggccattcagttgcactgacttggactttaggccctcctgcccatagggctgcagcaggtactggtgaaccagcttgtctctgagagtcccagccagcttgattttctttcttgatcgatgcaagttgatgataaaaagtgtaatggacccacgaacgtagttgtggttgtggtg

SEQ ID NO: 89005 - DNA, 452 bp, Homo sapiens
  misc_feature (1)...(452): n = a,t,c or g
tgccgcgacctagctgggatcctccagagcggccgcaatacagctgggggaaaaaagataatgcttgctccctgcagaaagccctggcactttcaaaccagtatccacattctctctagaccctccacccggtcattcatttttgcagactccaaactccacaaacctcttctcttcctatggtccctcttccataaataaatcattagaagattcacatttgagggcctccagagccttcctcttagtggagtcaaaagcagacacatcctcccggggaacaatgagcaaagtcctacacttgcaaaatggtcaaaaaatgagtcatttcatttgtggaaaatgaatatatctgatcttgcaaatgttttgcctcaggggaaagtagtgagcgtgaattcacaaacaggcttctccatgcaaaagcacttccctgctgctccggaggctan

SEQ ID NO: 89006 - DNA, 1257 bp, Homo sapiens
atggtcttctcggcagtgttgactgcgttccataccgggacatccaacacaacatttgtcgtgtatgaaaacacctacatgaatattacactccctccaccattccagcatcctgacctcagtccattgcttagatatagttttgaaaccatggctcccactggtttgagttccttgaccgtgaatagtacagctgtgcccacaacaccagcagcatttaagagcctaaacttgcctcttcagatcaccctttctgctataatgatattcattctgtttgtgtcttttcttgggaacttggttgtttgcctcatggtttaccaaaaagctgccatgaggtctgcaattaacatcctccttgccagcctagcttttgcagacatgttgcttgcagtgctgaacatgccctttgccctggtaactattcttactacccgatggatttttgggaaattcttctgtagggtatctgctatgtttttctggttatttgtgatagaaggagtagccatcctgctcatcattagcatagataggttccttattatagtccagaggcaggataagctaaacccatatagagctaaggttctgattgcagtttcttgggcaacttccttttgtgtagcttttcctttagccgtaggaaaccccgacctgcagataccttcccgagctccccagtgtgtgtttgggtacacaaccaatccaggctaccaggcttatgtgattttgatttctctcatttctttcttcatacccttcctggtaatactgtactcatttatgggcatactcaacacccttcggcacaatgccttgaggatccatagctaccctgaaggtatatgcctcagccaggccagcaaactgggtctcatgggtctgcagagacctttccagatgagcattgacatgggctttaaaacacgtgccttcaccactattttgattctctttgctgtcttcattgtctgctgggccccattcaccacttacagccttgtggcaacattcagtaagcacttttactatcagcacaacttttttgagattagcacctggctactgtggctctgctacctcaagtctgcattgaatccgctgatctactactggaggattaagaaattccatgatgcttgcctggacatgatgcctaagtccttcaagtttttgccgcagctccctggtcacacaaagcgacggatacgtcctagtgctgtctatgtgtgtggggaacatcggacggtggtg

SEQ ID NO: 89007 - DNA, 398 bp, Homo sapiens
aatacacgtcttgtcatctgtcctgcagttgtggaactccagcacgctctcgatgcggaaggtcttctcacaagtgccgcagcggtacctgtactcgccgtccacctcgttcctgctgtgcttgtaggaaacgtgttgctttaggctctctttgcggctgaacaattttgcacactcttcgcacttaaacagcttgtcaccatgcgagcgcacgtgcctgctcaggttgctgctgttctggaagatcttgctgcagatattgcactggtaaacccgcttgtgctccccgagctgtttgatgagcttgcgccggatgccgtgtctgcttgagagaattaagctcctcttgagcgtgatggtgttattctgatgatgggtgaactttggaaccgagctgg

SEQ ID NO: 89008 - DNA, 785 bp, Homo sapiens
  misc_feature (1)...(785): n = a,t,c or g
ggaaactagtgacatgttttattggtatcacaactataggctcatcataaaacaacacaaagttgcaatattctgcaggaaagaatcatttcttacgaaaataatttaattttncagcactcaacagaaacaacctttagctgctgtacatgtatttcctggcaagactctgactgtccatgaagccggggtccacggaggccaccttggctgctatgaaggagtggatgcagtgcaggacagccctcaggtcctggaactcgagttccttcatctcaatctgtttggtgtccagattctgaaacagcagctttactcgagttttcccatcatctgaagatcccttaagctgggagaatttaaatatccagagcacattcttggtgttactctcaaaacaggtaaatcccaacgcgaaatccaccgtgaaacacagcatctctccttgccagctgcacatgtatgttctggacccggttctctgaacttccatgaacgtggctctttggaaggacttctcccacatggccagctcgctgccaagctccacgttgaaaacatggctcttcccatggccggccacgatgctgaagcaatagggcctctggtcctcaaagtcaaaatcttgaagacccagatacaagtttgcttgcaaccagcagtcctctgtgagccagaacttgtggatcgcagtgtgttgatacgactggaaaccctgagcactgaagttcaaggtcagcggcttgccgtcaacagtcagtcagcggctggctaggccatcgggt

SEQ ID NO: 89009 - DNA, 1087 bp, Homo sapiens
cggacgcgtgggaaacatagcagcctgtggaccctcttattactggggcaaagtatcctataaagattgaacatccctaatccagaaatctgaaatccatgtgctccaaagtctgaaactttttgagtacccatatgatgccacaagtggaaaacttcacacctcacctcgtgatgagttggagtcaaaacactggtgtacaacatagtttattcagtgttcctaagagaagaaagcttccccccgccctctagctgtaagatgatcttttccaggcatacccagattctctcatgcgagcatgcccacaaagcgtaatacagtggcacatgtgcaggccagatggcgccaagggcaggttccccatgatgctccacgtggggccaagactcatgtgctttacttgctgtgttttttttccttcttttctgctctgttatatgaagatttgttgaaaatgttaaaaagtcctgcagaggcccagcgtgttggctcacacctgtaatactggcactttcggaggctgaggtcggcagatcacctgaggtcaggagttcgagaccagccgggccaacgtggtgaaatctcctctctaccgaaaatataaaaattagtctggtgtggtggcacatgcctgtgttcccagctacttggaaggctgaggcacgggaatcacttgagcccgggagttggaggttgcagtgagctgagatcacgccactgcactgcagcctgggcaacagagaaagactattgtctcataataaaaaaaaaaggggggcccgttttaggtattcaatttatagaccgggggttggcaaggaataattttttattggggcccctaatttaactccctggcgcggctttaaccagcgggggatgggtagaaattgtctcgtgtgtacgactacacggtacctacatgactgactacaatttcatgatgtttatacggaataaataaacgtacatcacgttaacatgccactcatttgcagtcattagaccctcctagatatgtattcttagtacggaatatggttttacacgctctatatgtgccactaaattgtggccacgatag

SEQ ID NO: 89010 - DNA, 1075 bp, Homo sapiens
  misc_feature (1)...(1075): n = a,t,c or g
cttcgaccccccnnnnnntttcgagantcctagtcagtgtggtggaattcactgtatcagaccatggatactcactgtcagaatgagatgagctctggaactggacagagtaatactgtacagaacatccttgaacctttctacgtgttagatgtgtccgaaggcttctctgttctgcctgttattgctggcacacttgggcaggttaaaccatacagttctgtggagaaagaccagcatcgtattgctctggacctcatatctgaagccaatcactttcctaaagaaacacttgagttttggctgagacatgtggaggatgaatctgctatgttacaaaggccaaaatcagacaagttatggagcataattatattggatgtcattgagccatctgggctcattcagcaggaaataatggaaaaagctgcaatatccaggtgtttactacaatctggaggcaagatctttcctcagtatgtgctgatgtttgggttgcttgtggaatcacagacactcctagaggagaatgctgttcaaggaacagaacgtactcttggattaaatatagcaccttttattaaccagtttcaggtacctatacgtgtatttttggacctatcctcattgccctgtatacctttaagcaagccagtggaactcttaagactagatttaatgactccgtatttgaacacctctaacagagaagtaaaggtatacgtttgtaaatctggaagactgactgctattccattttggtatcatatgtaccttgatgaagagattaggttggatacttcaagtgaagcctcccactggaaacaagctgcagttgttttagataatcccatccaggttgaaatgggagaggaacttgtactcagcattcagcatcacaaaagcaatgtcagcatcacagtaaagcaatgaagagcagttttccaatgaaaactgtgtaaatagagcatcaacaagtacaaaattcttgtcttaattagtgggggtatataaaaattccttgtaatggtcaaatattttttaaaattgacattaataaagcatattttaaaaa

SEQ ID NO: 89011 - DNA, 1189 bp, Homo sapiens
  misc_feature (1)...(1189): n = a,t,c or g
tttagtgtttgcatgttacatattttaatgtgttttttaagctttatatgttcttatatttatattgtatcttttatccagtctgaaaatttttgctgcattttttcaatgttggtgataagtacttattttctaatattaccatgattagaatttaaagtagttttgtttaatttttaaaagcctttgtgaataatgttggttctgaagtcactcactaccttctaaaaataagatcttattaatgtgaggccccaggaaaagtttcccccaaaacatgcatattctaggtaagtagacaagtgcttactttaatagcagtgaaaatgtcaaagtttgtatttattgaatatcatttatatactcacattttatatataccacattttaataagcttaaactaagtgaaaccaaatacctaaaataaatacctaaaactgcttcaaaaatgccaaaaagcctggcatgtaactgatgagaaaggatttttaatgtgggattcctcacattaaaggctgttgattgagccttgggatccatagaataattgcaagaagtctagatatgtggaccaatatctacatcataatttattagctgaatataaataattaacccacttcctccatgtttggtntggtcccattgtgaattatatacaataaatctatactccattatcatcactatgtattttctcagtccaccaatgtaatacttacaacccgtattatagagggtgggggatttttatggcctttggtagggtcctaaaagggaaaggtttgaaatcacggtttttcggaagaatgggtttttcttcgaagcctaggttcttttgctgcaagtgaatatttacctctcgcgggtaaggtggtcaacttgtgagactagagcgggtcatggtcgaataggcctagcgcgcggctctaagcgacgctatcttgtggaatggtgtggtgttcgcttcgctcgtatcggaagggagcgcgatgcagcgcgcccgtgcggcgcgcgaaggacagcctctgtgacgaccggaggtgcggggcgctattcactcaacgtagagaggcggctcttaagggctgtcattggcatacggactcagttcgaatcgtgtttgtggaaccgaacgcggcggtgagtgagtccttcgtcttgtgttttcttgcactgtgcagccct

SEQ ID NO: 89012 - DNA, 430 bp, Homo sapiens
actactagttcatggatataataattttgggaaaaattttagattaaactataaaattgaaatcacctttgaagagtatatggaattgcttctttctattaaagccaacctacattggcaaaaagtgtggagaaaatcagtgtgctcaattctttttgtagagtttcatctaaaatgttgcaggtaaaaaagaaaactttaattggtactttctacggtgtgattagaaaaattagtatctatctctgttggttctgctgacttgcttctttccaccgaatctaaatgcaatgtcataggaggaggtttgctgtaaaaacatgtctttttctttggtgtattcattgtaattatggctggcagtgagaaggttcggtaagtctcaatttctctacctcctttacttggagaaaatttgtaaatgtaccct

SEQ ID NO: 89013 - DNA, 721 bp, Homo sapiens
cccccttttttttttttttagtgtagatatagacttttaaaggtaaaaagaaagaataaagatggagggtgtgataatcctatgaagtgtctgggtttgggtcctgagggcagccaattacatcccagactcactggcaatcaacagtccaagccagggtcccatcagctgaatcctgaggtggggatgcttcagtctttacagaacagggtcaaggaagagtccagaaaccgccgtcattggcttcatgaaaaccgagcacgtctttgagatctttttcaaattctgcctctaagtcaagtcctacctggccaaagtcagaagccagctggtcctgaggctgcatctgcctctccagggtcttagatacatgatggcactgttggcttcctgaagacctcttcatcctgcagaaggtgcaactccacagcatcctgagaggttggacacaagaagtaaatggtctcaaccagtgaatggaaaaaggaaagtaacttcaaattttggaaagggattcagaacaaaatcatcaagttgaagatcccggaagatgactgaagctcatccagggggaagccttttgatggtgaagtgtcatagagcaaaggaggaactgtcaacaatggtgattccactaatgaaaatatccaatgtgagctggtggtccttttgcttgtgttctgaggtaagtgaacatgtgatttggccacagtgttttact

SEQ ID NO: 89014 - DNA, 592 bp, Homo sapiens
gtcggcccagcaacgaggaaagctggtggaaagtgagaccaacgtcctgcaggacggctccctcattgacctgtgtggggccactctcctctggagaacagcagatgggctttttcatactccaactcagaagcacatagaagccctccggcaggagattaacgccgcccggcctcagtgtcctgtggggctcaacaccctggccttccccagcatcaacaggaaagaggtggtggaggagaagcagccctgggcatatctcagttgtggccacgtgcacgggtaccacaactggggccatcggagtgacacggaggccaacgagagggagtgtcccatgtgcaggactgtgggcccctatgtgcctctctggcttggctgtgaggcaggattttatgtagacgcaggaccgccaactcatgctttcactccctgtggacacgtgtgctcggagaagtctgcaaaatactggtctcagatcccgttgcctcatggaactcatgcatttcacgctgcttgccctttctgtgctacacagctggttggggagcaaaactgcatcaaattaattttccaaggtccaattgactga

SEQ ID NO: 89015 - DNA, 401 bp, Homo sapiens
agaacagttactccttcctggtctcctaatctttttacttgtattctggatgctcctgaatcctgactcagtaagcccatgaaattttctgtggttggcaataagttgtagtgattggattatctgttctgtctggacataggatgaccagtgtcccagtgaaggaacgagtgaaggtgtctcagaactggagactggggcgctgccgagaggggattctgctgaagtggagatgcaggcaagtagcctcttgactttttaaaagctacttgggacataaaagcataatggaaagtaaaaaatctggtcctacatagaggctaatggggctatcttgggtgggtgggcactggtgagcctttgaataacacaaagggggcatcagaaggacaactttttct

SEQ ID NO: 89016 - DNA, 741 bp, Homo sapiens
  misc_feature (1)...(741): n = a,t,c or g
tttttttttttgttctcaggaggtagaagctttattatgacatcttcaaaagacaatccaaatcaatagacatttgctgagcacctgctgtgtgcaagccccgtgtagacaagtagggtccagtgtcccacgcatggctctcgaattccccggggagaaaaatcacatcgggttcagggagttttgcgtggctgagaacaaagtgggtttctgaacatcaaaagtgcaattcgctttacggggcaaactccgatggcccagccccgcgtagggagccgcagcggggcgggcccgcttcctggggctggggccggggtttctctaagccgcacgcnttgcgtggtgttgcggggcctctcaagcaagcccggaagcagcatccttgagctccggttgttggagcgctgggacctctggctgccgcccccgcagcagcagcaaccactactccgctgtcgacggcgtctccttgggaagcagcagcaactggtggagctggagccgcagcagcctgagtcgccgcagcagcccctgccggagccacagcaggaggaggaggaggcgggcgccggggtgggcgccggggcgggacacggagcggggccctgggacgaccccttggaaaagcctttggcggaaacggcgctctgttgagaggacatcgcggagctcctcacgacaaaccagaccctggctccactgaaagactcaatacgttctccaactggaatgggccacctg

SEQ ID NO: 89017 - DNA, 404 bp, Homo sapiens
tcaatattgaaagtcacctaagattctgcaagtgttgtcgtgaaaatggagtacgaaacttgtctgtgcctctgtattgctcaggaaatggcactgaaattatgtacactctccaggaacccatagactgtacgtgccagtggaattaaacccttgggttccaagagctctatacaacatcataacgtcagatagaattaacttttattgctattacttaggcatgtggcagatttatgctgtttaacaatactgtatttttcagacttggaatgtggaaatttagcaatttgtacaaaatatatacagtttcaatagcaaaattaaatttattgctttactctattttagaaaatcaaatgactgtaagttgttcagctgaaatgctggtatgtatttaattc

SEQ ID NO: 89018 - DNA, 394 bp, Homo sapiens
  misc_feature (1)...(394): n = a,t,c or g
agaaaatagcagtgatcagcaccaagctctttacggagaaacagcggatgaaatattttctcagcactcttcctacaaggccagaaccagagttaccttgtgttgaaaatcttaatagtatagaactcaacagaaaatatattcccaaaacggccataagaattcctacttcaaacccacagacttcaaataactgcaagaacttcttgactgagatggagctggaccgtgtanaacaaataattacaggaacaaagaaaagttttgctatgttgagcacttgctcccgtctactttcttttgtagaatccactgcacctaaggcaagcacagcatcgaataaaggaaatgaagcagatgcatccaaatggagaagctaaagaaagtcaatccn

SEQ ID NO: 89019 - DNA, 403 bp, Homo sapiens
atgtgatctacttctacaccaccaacccacaccattgcgtaagagactgtttatggaaaattatgtcatcccgcagtcgggaatggctaattgacttaatgaacagcaggacagtaacatggcttctttctgtgtatcctaaggaaagaatgcagcaaaataaagatttaatcttctttatttatttttatctagctatagcctcataataaaaaagaagtacaagatataggtgccatggagatgtccattggcctgcaaaaataagaaaaagatttctgtagttgtacttttagaaaacagtgaattctttaaaaaaataaaagactgagaaaagagagaagcttcaggataggcttattaatgaaaaacaaaagtggaacaagagtatctgagaaaagat

SEQ ID NO: 89020 - DNA, 394 bp, Homo sapiens
tgagatcaaagcacgttttcataggaattgttatttttcatttaccggggccctttgttcccatttgatgtttattcgttccaagggagaaacacaatccctattgcatacatctattctttaaagtacttttttatttcatttttttatgttacagatcaaatcagagttgtaagtattatggccattagttatcaccacttgatttcgcaggctacactttatttctgttcttacaaaatcacctaccttctctgttgcataatgatcacttccagtgaagccacaatgtgcctttcttgggtacttgggtgctaatttatttcacagatacctttgcagatgcaatcagagtcacctatcacattcctgtttctgctttttattgtgttcc

SEQ ID NO: 89021 - DNA, 1269 bp, Homo sapiens
cgcaagatggccaagttctccacgccggacctggctgccaaccggcctcaccagcccccgccaccccaacaggctccggtggtggcagcagcccagcccgccgtggctgcgggagcagggcagccagccggtggggtggcagcagcagggggtgtggtgagtgggcccagcacgtcggagcggaccagcccaggcacctcaagcgcctacaccagcgacagccctggctcctaccacaatgaggaggacgaggaggaggatggtggcgaggagggcatggatgagcagtaccggcagatctgcaacatgtacaccatgtacagcatgatgaacgtcggccagacagccgagaaggtggaggccctcccggagcaggtagcccccgagtcccgaaatcgcatccgggttcggcaagacctggcgtctctcccggctgaacttatcaaccagattgggaaccgctgccaccccaagctctacgacgagggcgacccctctgagaagctggagctggtgacaggcaccaacgtgtacatcacaagggcgcagctgatgaactgccacgtcagcgcaggcacgcggcacaaggtcctactgcggcggctcctggcctccttctttgaccggaacacgctggccaacagctgcggcaccggcatccgctcttctaccaacgatccccgtcggaagcccctggacagccgcgtgctccacgctgtcaagtactactgccagaacttcgcccccaacttcaaggagagcgagatgaatgccatcgcggccgacatgtgcaccaacgcccgccgcgtcgtgcgcaagagctggatgcccaaggtcaaggtgctcaaggctgaggatgacgcctacaccaccttcatcagtgaaacgggcaagatcgagccggacatgatgggtgtggagcatggcttcgagaccgccagccacgagggcgaggcgggtccctcggctgaagccctgcagtaacccgcccagcctcccgcggggccgcacacttcccctcccaacacacacacacacctgccatcttggtcatgagctactgtctgtccctccccaggacccgcggtgggtgctgcatgttcccggccctctgcccctcctgtcctaccccctttccccaccgagagctgggccgggagaggaccgcagggcaggtggcgtgaggtccgtgttgccttctttaacacacactcgtgcagtgggggagttctggctccccaacctaacccctagccgtcatctccacct

SEQ ID NO: 89022 - DNA, 1809 bp, Homo sapiens
ctgggacttcatcccggacaactccaaggcagccttccaggctagcacccgtgtctactttgagctggaccttacagacccctacaccatctcggccctggccagctgccagctgctgccgcacggggaaaacctgcaggacgtgctgccccacgagctttactggcgcttgaagcgccacctggactacgtgaagttgatgatgccctcctggatgacgcccgctcagcggggcaaggggctctatgctgactacctattcaatgccatcgcgggcaactgggagcgcaagaggcccgtctgggtgatgctcatggtaaactcgctcacagagagggacgtgcgcttccgtggtgtgcccgtgctcgacctctacctggcccagcaggctgagaagatgaagaagaccacaggggctgtggagcaggtggaggagcagtgccatcccctcaacaacgggctcaacttctcccaggtgctgtttgccctgaaccaaaccctgctgcagcaggagagtgtgcgggccgggagcctgcaggcctcctacaccacggaggacctcatcaagcactacaactgcggagacctcagcgcagtcatcttcaaccacgacacatcccagctgcccaactttatcaacaccaccctcccgccacacgagcaggtgacggcccaggagattgacagctacttccgccaggagctcatctacaagaggaatgagcgcatggggaagagggtcatggcgcttctacgggagaacgaggacaagatctgcttctttgccttcggagcaggtcactttctggggaacaacacagttcattcgacattcctggcgggcaggcaggggctgggaggtggaccaccacacccgccgggcaggcccatacacagccctgccccccagagcccagcgccctctcctgaggggacctcgacgagcccggccccagtgaccccagctgccgctgtccccgaagcaccctctgtgacccccaccgccccaccagaggatgaggatccagccctgtccccacacctcctgctccccgacagcctcagccagctggaggagtttggccggcagaggaagtggcacaagaggcagagcacacaccagcggccgcggcagttcaatgacctctgggtccgcatcgaggacagagcccggcaaagggggtccgtgtggactctggagctcagccaggctggttgtgtggctctgggctgcccggtttgcctgctcaagctccttgttcccttctccattgtattaggcaaaatagacctgaaaaaatcagatctgagccccaaggcttctgcccaggacgaggctgccgatggtgactctgccatgtgcttcctcctttccagcaccaccgcctcaccacccccgctgcccctgcagcccacccacagctcggggaccgccaagccccccttccagctttcagacccagctacaacagcaggaccccgccagggcccgccagcagctcggcacccaccctgggccttctccccgccatcgccacccacccatcgctgtctgcttcctgcctgcatagccttgggccctcctgacctcggcccaccccaagtggagaagccagagaaatgacacaggggtcttcggccacacccaactgctcctgccaccacctccagggggtgcccaacacgtcgagggcagtccacatgggattggctagacactctagagctttactgtacccaagttacatcttcttttttgtagaaggatcttaatttcccatagtgctatggggctcttttgtaaaatac

SEQ ID NO: 89023 - DNA, 361 bp, Homo sapiens
  misc_feature (1)...(361): n = a,t,c or g
caggggaggcaaggtgcccggggctgctctgctggggctggggcctctggcctctttgttctggttcttctgcccacactcaccaacccctttccttggttctgggtggccctgctcccggacccccagtactcactgtcttcaagctggtgcacacgctctcccagagaccggaagtaggagtgactcagggcagcctctgctgacatgcgactcttggattcatactgaaaggcacagggtggggctattgggcccggctggggggctgcaaaccctctgggcagcaggactccagtgctggttagagcaccaaggtgggtgaggcttgaggctaacangagaagccccaggtcagtct

SEQ ID NO: 89024 - DNA, 755 bp, Homo sapiens
aaaggaagctgcctatcgtcaatgatcgcgatgagctggtggccattatcacctgcaccgcgctgaagaaccgagactaccctgtggcctccaaggattcccatgagcagctgctgggcggggcagctgtgggtacccatgaggatgacaaataccacctggacctgctcacccaggggcatggactgcgcggctccatctacatcaaccaggaagtgatagcctgcagtcagccccagggcactgctgtgtacaaggtggccaagcatacccagaactttggtgtgcccatcatagccgatggtggcatccagaccatggggcatgtggtcaaggccctggccctaggagcctccacagtgatgatgggctccctgctggccgccaccatggaggcccccggcgagtgcttcttctcagacggaatgcagctcaagaagtaccagggcatgggctcactggatgccatggagaagagcagcagcagccagaaacaatacttcaacgacggggataaggcgaagatcacgcaggatgtcttgggctccatccaggacaaagggtccattcagaagttcgtgccctacctcatagtgggcatccagcatggctgccaggatatcggggcccacagcctgtctgtccttcggtccatgatgtactcaggggagctcaagtttgagaagcagaccatgtcagcccagatcgacggtggcatccatggcctgcactcttacgagaagtggctgtactga

SEQ ID NO: 89025 - DNA, 786 bp, Homo sapiens
ttttttttttttaacttgcaaaagtaaatttattgaagcatagaaacaattaaagcaaagttgttaattcagctatttcaagagcattctaatgaggaaataagaagatgcagaaaagttggctagtcatccatttctggactgaagcttttcctgaaattatccagaaagatgcctagattgatgccatttcttcgcttgtgtccttcttgatttttttttctttgaaagacacttttgttgatctggaagttccttatttaactttcacctcagaaatactgctgacttgagacgagacaaccttgccatccaccaactcctctacgatagtcttagtcactctagtcttgcttgaatctcgtccttgaccagaacagcttccagatcttgagtcaccagataccagatccctggatcccatgtttacagatcctgagtttctaccaccaaattctgcaaaactagaaccacctccctctccatcgagcaggcggcggtaggtctcgatctccacctccaggcgtgtcttgatgtccagcaattgcttgtactctgcgttctggcatttagtctcaccccagatctggcagatctcctcctccagggcactgatctgcgtttgaatttctgacagctgagccacgtagccagcttctgtgtcagccagggttccctccagggagcttttcatggccagttgggactgaagctcaatttccagggcttgcagggtacgttttagttctgcggacgcgtgggtggacccgggacttcaggaccggc

SEQ ID NO: 89026 - DNA, 432 bp, Homo sapiens
aatagacttcatcatgtgcttcagaagaaagagagcatgggcatgtgtttcatcgggaagaggaattttgaacatttccttcttcagtatctgcagcctcgacctggtcactttatttccatagaagacaataaggttctgggaacacataaaggttggttcctgtataccttgggccagagagcaaacataggtggcctgagagagccctggtacgtggtggagaaggacagcgtcaagggtgacgtgtttgtggtgagtgggccgccctctgagacagcactggggctggttctggcagggccagtattgcttccagaccagggcttgagaatgccttcagcagccggggctttctggagggtgggactaactctgttcctgtccttcggcccctgcctttcctgggaactggcatggtggcaagaaatc

SEQ ID NO: 89027 - DNA, 1531 bp, Homo sapiens
ggcggaagccttgtgacaatggggacccctatgtcatcgcgctgaggtcggtcacgctgcccacacaccgagagacgccagagtacagacgcggagagaccctctgctcaggcttctgcctctggcgcgagggggaccagctgaccaaggtatcctactacaaccaggccaccccaggtgttctcaactatgtgaccaccaacgtggccggcctctcctctgagttctacaccaccttcaaggcttgtgagcagtttctcttggacaaccggaatgatctggcccccagcctccagaccctctagatgccctcagtggccacatcatgcccactcccactccatcctgtccccaaggactcacatacagtgcctggagaaagccaaagacctttatttcttcctgcctccccgtgggaagcctccgccctgaggtccgctggcccaccacccctgggtgctcagtttctaccaacatgagccagcaagtccttgtggtagccctggggtagcctgtagtagactcgggtcctgtccacagccctagctgccagcaatgctgtcctcacagaggcatagtcgcccccagctgggttgtgctccactgtgacggtggcccggggggaggatgccagcagcctgcctatggctccagctgtgctgtggcccagcagcatggcctgcatctggaaggacacaggttgccagagcccctggcacaactctagcatatctgtgagcagctgttccctgtagccactgcccagcacctcctcaggccagcctggtgccacagtcacgtgggggaagacctcagccacagctgtaagcagctctctgccagccacatggccggggaccgaaaaactcccgtgggagattttggccccaacccacacaggccaatgcaagaggccaaggctggagaggcgtgccagcaaggccagggatggccggagggctgcgggctccgctatttgcaaatggatgccccagtgtccgggatgtgtggccagctgctgcaggcaggactccagcgtcaggatgttgccacttggagtatgaacaatgggcacggggttttcagccacagttccctcgaggccagtgttcagcaggatcatgccttctgtgtctggaagaggcggcagaggcaacagtgtttaggatttgggttatcataaggtgttaagagtcccttgttaaaggggcagtgggagttatggggtcatcaaggaccttgcctctctggaatctgtcaacccagttttgggctccaggtggatgggttgctttataaatgtgcctggtgcatgagaaactcttgtttcagctcttggcctttacccatgactcagcctgggggctggtgccggccttgcctgcagcaatgtagctgaggactggtctgaaggccaggagccctgtgctcttgacatcactgtactccctctccctccccgcaaccctgccccaccttgcatccagggtatggtgtaaataaacctgtgttgccatggcaaaaaaaaaaa

SEQ ID NO: 89028 - DNA, 636 bp, Homo sapiens
ttttttttttttgggattttccatgtttaatttttaaataatggtacatattttcataacacatgtcaattttgttaaaggcattttaaaattctagatgaccctttattcctttaaaaaattcttattgagttccaagcattggagaatgtaacaacgaataagacaagcaggggccctgctctcatagagcttatattctaatggaagctaaagctttctgttttaaataaggctcagaaagcacacactccatcttttaatagctagatgacattcgtacttttagaacagtacttctctgtaatccccaggcaacctggggattgggggagagacagagagtcatctggaagacctgaaactccaagccttacccagtggtatccgatgttgcctcacaaagtccaccagatccagggatcctccctcaccggagttgagaaatgttccatgcccgattctgtcaggaagcagatccaggagtatttgtgtttcttttttttggtttggaatctctgaaagatgcaatgctaacttcagacctgctttcttagcttctaaaagaggttccaagaagtcttttgcttgtcctacagtagggtctccactgaggtcaaggccaagaactgtacc

SEQ ID NO: 89029 - DNA, 1727 bp, Homo sapiens
taccggtttcggaatccgggctggacccacgcgtccggcctggcatttcagccagggctggagatttatggacgcctgggtgagaggcaaagggcacaggcatgcaaaggccctggggcaggacggcacctggtatgcgggaggaacagagtgaggagaggagggcagggcgtgcagggccttgtgggcctcagggaggacttgggcacctaccccgagggagtggagctcctgggtgcgtgtccagatgggaaaggcagggtcgtatctgtggggacctgacaagggcaggggaagcggagaccagggtgcaggctccgcccccacccaaggccgggcccagccagaggaggggcagggcagggcaggaggtttctggatgtttgttgggtttggtttggttttgttttgttttgtttattggggtaaaatacaaaatctaccgtcttacagtgaggtggcgttcagtaccttcaccacgccgtgcagccatcccatctgattccagaacattctcatcacccagaaggcagccctgtccccattatgtcacctagtcacccccaggtccccctccccagtcccggcacccacgaatcctctccctggattctgtgggattgggtctgtccggggacattttcataggaagtggggatcacagcggtacccttctgtgtctggtgtctctcactgagcgtgacatcctcaaggtgcatccgcactgtggcctgggtcagagcttcgcacctccttgtggctgagtctcattccagcgcgtgggtgcgtgggtggccgcgccgtgctgatcccctcaccttcactgggtgttcggtgttctccgcctcgggctgtcacaaatcgtgctgctgtgagccactgcgtgcaggtctcatcagcgtcgcaggcgggtcggccacagcaggaggctacagagacacagggcagcggccacgcccacgccgcccgtcacagccaccatcgcccagtggtaaaagctcacgcaggccctgcagcagagctctgaggggcaagggtgcaggctctggatggccatgactgccagcccattggccaccttatccaagaagctcatggagccgtacacgaacgctccgctgttcgtgtggggaccgatgaggtcggccgtcatggccagcgaggtgacgaggatggtggcacagccagcacccagcagcacagccgctgcgtacacggccacacccagtccctccgccagcgccacccaggcggcaaaggccaggatcaccaggaggcctgagaagtaggtcatgttcctcccaatgcacttgttgatgggcttcatgaggaaggaggacaagaagccgctgaggtacatcaccaggggaatggtcgcgatgaacttcttgggcaggtggagcgagtaggtgaggtacatggccatgtaggtctgggacaggttcacgatgagcctggtggtcatgtacagtatgcccacctggtagaaagccggctcccggagccagtgcttccagagcagcaggggctgggccgtggcaggggccaacaggggggtgtgctcgcctggctcctccgcatgcggccggcgcctctcccgggtgcccaggtggaatagcagtgagaacccggcgccgacacccaccaccagcagggacaggttctggggatgcagcagaagcagtcagtggcggcgggcacagccgccgcccctggctcgacccggg

SEQ ID NO: 89030 - DNA, 1072 bp, Homo sapiens; identical to SEQ ID NO: 64946
  misc_feature (1)...(1072): n = a,t,c or g

SEQ ID NO: 89031 - DNA, 3066 bp, Homo sapiens; identical to SEQ ID NO: 64237

SEQ ID NO: 89032 - DNA, 2576 bp, Homo sapiens
atgaagggcaagggcttcttacggtccctcaccatgcgcagttcctggggcgccgggggctgtgttctgtggaaggcctggtctgggccctatgaagcctccttcagctgtgatacaagagccgcgtggaagtcgctccataaggggcagagccccaagagtgtccttcacagcctgatatcaaagcagcagctattaactgagccctccactaccacccccacactgcggagggcttggtgtgcaaacagcacggccctgtgcaaaggctggggcatgaataacaacatgctcggatgtgggatggaaacccctgggtctccatcagacaagatcatgtcagtcagtgtgtacgcggctgagctcctggccgtggtccgcctccccttcatccaccccagctacctgctcaatgtggttgacaatgaagagctgatcaagtcatcagaagcctgccgggacctggtgaacgaggccaaacgctaccatatgctgccccacgcccgccaggagatgcagacgccccgaacccggccgcgcctctctgcaggtgtggctgaggtcatcgtcttggttgggggccgtcagatggtggggatgacccagcgctcgctggtggccgtcacctgctggaacccgcagaacaacaagtggtaccccttggcctcgctgcccttctatgaccgcgagttcttcagtgtagtgagtgcaggggacaacatctacctctcaggtgggatggaatcaggggtgacgctggctgatgtctggtgctacatgtccctgcttgataactggaaccttgtctccagaatgacagtcccccgctgtcggcacaatagcctcgtctacgatgggaagatttacaccctcgggggacttggcgtggcaggcaacgtggaccatgtggagaggtacgacaccatcaccaaccaatgggaggcggtggcccctctgcccaaggcagtacactctgctgcagccacagtgtgtggcggcaagatctacgtgtttggtggggtgaacgaggcaggccgagctgccggcgtcctccattcttacgttcctcagaccaacacgtggagcttcatcgagtccccaatgattgacaacaagtatgcccccgctgtcacgctcaatggcttcgttttcatcctgggcggggcttatgccagagctaccaccatctacgaccctgagaaaggaaacattaaggcgggcccaaacatgaaccactctcgccagttctgcagtgctgtggtgcttgatggcaagatttatgcaactggaggtattgtcagcagtgaagggcccgcgctgggcaacatggaggcctacgagcccacaaccaacacatggaccctcctcccccacatgccctgccctgtgttcagacacggctgcgtcgtgataaagaaatatattcaaagcggctgacatcagcagaaagcccacgataagactgtggacaagtctggtgaggcaagtgccacgcaatgataattttccagcgacaccaacaagaggccaacaaaacacaatcaaggaactcactgcgctcaacatgttgaatattctctacattgaatgtagaaaatcatcctcgcctttggatgaaacggaggcaccgcgcttggagccgcaggaaccacgatcccgccatggggctggctgcctcctgaacaggggcgctcgctctgccaggtgcaatagagtttcacgtatttttcaactgggagagagaagctgttttttccttcctgcagagcaagcttgatccctaaacaaccatagatcagttatcttatgacaacattaggcatcaggctctcttggaataagatcaaagtggccttatcactttgattcctacttttggtttttaaccgatctacactttcagtggccgacagaaaacgagggacaatactgtgcatcacaaggcctaggaggctgctggtccccactggggctgaagagaagcccatctgcccacgcggagccaggggtggcagctgtgggacagccggggagcacggacagcggtctgtccttcacaggtgtttctactgtgtttttgctggagaaggaccgtgattgcgctagctttctcttacccggtatgaattatttagatatctgaggcattttcttgataaacaaaaggctatttttaagtactgagaggaggagcaggccacaagagggataatgttgtgggaattcccaaagctctttgtaggtagtgccagaggggggcttttgctctcatttttctatgtgcagaatagaggatctctcctggggtgggcgatgcccccattttatttttagaaaaagtaactcccagacagccccataaaagctgtgcccaaggaagaagagtctgctctagaaggagcccggttctggctcaggacaccggcccagctccctccatgaggtcaagctgaggaccaggccagtgggaagggaaggagggagaattagcgtctataaagcacaggagactatttttgatattcatagctatatattaaggccctgccacaagagctctcaggatggggacagcc

SEQ ID NO: 89033 - DNA, 2014 bp, Homo sapiens
tttcgttcagaaagcggtagtgttgcagcacaatccagggaggactctgaggcgccctgcagggatgacccttggctggcccatagtgtgggtgaagacccgagggaagcccattatagcccctgctgctggctcagctgtggccagtgtctaatggccttcgggagccaaccacggagtctggaaggctcctagagcccctaaagacaatgaagagcgtgtgttcagggaacgcatgcggccgaggaagcggcagggggccgtcaggcgcagggtccatcaggtcaacggccacaagttcatggccacctatcttcggcagcccacctactgctcccattgcagagacttcatctggggtgtcataggaaagcagggataccagtgtcaagtctgcacctgcgtggtccacaagcggtgccacgagctcataatcacaaagtgtgctgggttaaagaagcaggagacccccgaccaggtgggctcccagcggttcagcgtcaacatgccccacaagttcggtatccacaactacaaggtccctaccttctgcgatcactgtgggtccctgctctggggactcttgcggcagggtttgcagtgtaaagtctgcaaaatgaatgttcaccgtcgatgtgagaccaacgtggctcccaactgtggagtggatgccagaggaatcgccaaagtactggccgacctgggcgttaccccagacaaaatcaccaacagcggccagagaaggaaaaagctcattgctggtgccgagtccccgcagcctgcttctggaagctcaccatctgaggaagatcgatccaagtcagcacccacctccccttgtgaccaggaaataaaagaacttgagaacaacattcggaaagccttgtcatttgacaaccgaggagaggagcaccgggcagcatcgtctcctgatggccagctgatgagccccggtgagaatggcgaagtccggcaaggccaggccaagcgcctgggcctggatgagttcaacttcatcaaggtgttgggcaaaggcagctttggcaaggtcatgttggcagaactcaagggcaaagatgaagtatatgctgtgaaggtcttaaagaaggacgtcatccttcaggatgatgacgtggactgcacaatgacagagaagaggattttggctctggcacggaaacacccgtaccttacccaactctactgctgcttccagaccaaggaccgcctctttttcgtcatggaatatgtaaatggtggagacctcatgtttcagattcagcgctcccgaaaattcgacgagcctcgttcacggttctatgctgcagaggtcacatcggccctcatgttcctccatcagcatggagtcatctacagggatttgaaactggacaacatccttctggatgcagaaggtcactgcaagctggctgacttcgggatgtgcaaggaagggattctgaatggtgtgacgaccaccacgttctgtgggactcctgactacatagctcctgagatcctgcaggagttggagtatggcccctccgtggactggtgggccctgggggtgctgatgtacgagatgatggctggacagcctccctttgaggccgacaatgaggacgacctatttgagtccatcctccatgacgacgtgctgtacccagtctggctcagcaaggaggctgtcagcatcttgaaagctttcatgacgaagaatccccacaagcgcctgggctgtgtggcatcgcagaatggcgaggacgccatcaagcagcacccattcttcaaagagattgactgggtgctcctggagcagaagaagatcaagccacccttcaaaccacgcattaaaaccaaaagagacgtcaataattttgaccaagactttacccgggaagagccggtactcacccttgtggacgaagcaattgtaaagcagatcaaccaggaggaattcaaaggtttctcctactttggtgaagacctgatgccctgagagcccactgcagtt

SEQ ID NO: 89034 - DNA, 435 bp, Homo sapiens
tttcgtcaagtcctgttaaccccgtggtgttctttgatgtcagtattggcggtcaggtgagatccaggaggctgcccacacctgcgccgaagggaaactgctcggggctaggcaggcagaactcacccagagagagcggactcgggaagccagccagaaagtgaaattgcacccgaacctaccgacctgccgggcggggggaaaggaggaggaggagtctccccaatcctagcgccccgcttctggaggaactgggcggttagactagggaggcggaggtgggagataccgagcggcagggtggtgggtcagcccatcatgccccctgctccgtgaagccctcatggtcttggactgggccttctgacactctcccgctgattgcaggaagttggccgcatgaagatcgagctctttgcagacgttgtgcctaag

SEQ ID NO: 89035 - DNA, 636 bp, Homo sapiens
tttttagcattcatgcttggtttttattttccttgatttaaaaaaaaatcaacttagatattgttaaaatgcatcacagtacctctttgtcagcaagtcagtcaaaaagatttccaaacagctttacgggtttcaagctgccctctggaagcaacactagtttcacctcaaacaaggaagacacctcttggagtttcagctgttacaactcagctaaatttcaaggtctgtgttcccatattctctgtagtattttaaaccttctcagagcacttgttttgtcaatgggatgctgcattcctggtaaaacagcaatcatgtggtcacctaggcacactagccaaatggtcctgggatcccaaatcacccatgaaatccttcaagaagtcttcatcatcgggaaggtttgcttcctcgggtccggctctgctcctggctgggggtctccttggccttcttacaggtgtacagccacttgatgatgcgggcgttcctctcgatgaccgaagtggtgctgggcacctgctctatcagctcctcctcctgcagcccctcgtcgtcgccgccgctgtgccgggagaagccgctgccggaggtggcgacgctcacgctgcgcaccttgagggtcacacgaaa

SEQ ID NO: 89036 - DNA, 584 bp, Homo sapiens
tttcgttgtccatgtgcagagaggtgcacgtgtatgaatatatcccatccgtgcggcagacggagctgtgccactaccacgagctgtactacgacgcagcctgcaccctcggggcgtaccacccactactctatgagaagctcctggtgcagcgcctgaacatgggcacgcagggggatttgcatcgcaagggcaaggtggttcttcccggcttccaggcggtgcactgccctgcaccaagtccagtcattccacactcttaaaaagggtttcttgggaatcaatgtgcaataaggtactactgttgtactcaaagtcacaaaagaatacttgaagatagattttagacagtgtagttttgagtctttaaacagtaatttagtggtggtcatgataatccttctctttctaagccattgagtatgtattactgctttgaacatagaaatggtttttttaaaaaaataaggctcaagaaagatgcaaaaccaaggatagctagaaagaaaacacatgtatgaccatgggtatgatacctccagaaatggttaacaacttattcttctgccatggagtaccccctc

SEQ ID NO: 89037 - DNA, 1342 bp, Homo sapiens
gtgactgaggcgagatcttccaccctcctgctccagggcctctaggtggcctccagagtgggctccacagcttgaaggcggcgtttttccgcgggtggtcgcagcgtccgcagagtcggagaaagctgcgtcagagactgcaacagtcagcacacattcctgtctgatcaggctccctccctcaagtcctctgcgatagctctggcgatgcttcaggactggtgcaggaggatgggtgtgaacgcagagcgctctctgctcatcctggatatccctgacgactgcgaggaacatgagttccaggaggccgtgcgggctgccctgtcgcccctgggcaggtaccgagtgctcatcaaggtcttcagaaaggagctcggggccagggcagccttggtggaattcgctgagggtttaaaccaaagcttgattccccgccaaatagcaggcaaagggggaccctggaaagtgatctccctgccccaggcccttgatgctgagtttcaggatatacccagtttccctgcacagccccaggggcaagcagtggccagaggtgcaggtgaagcaggagctgcaggtgaggcaggatctgtaggtgaggcaggaggtgtgaatgaggaaagatctgcaggtgaagatgaggcaggaggtataggtgaggcaggaggtgtaggtgaggcaggagcagcaggtgaggcaggagcagcaggtgaggcaggagcagcaggtgaggcaggaggtgcaggtgaggcaggaggtgcaggtgaggcaggaggtgcaggtgaggaaggaggtacaggtgaggaaggaggtgcaggtgaggcaggaggcgcaggtgaggaaggaggtgaagatgaggcaggagctgcaggtgaggcagtaggtgcaggtgtggtggaggcctggacccagtcatggcgccagaccctgcggcctctggtgaaaactatggcctaccgggaactgagacccttttccgggagggagcagccaggctgcgtggaagagtcctttgagagctggttggaggacgccaaggatatgctgcagctgtggtgccacgcgtcggaaagggagaaaaggaggcggctgctggacagcttggatggcctggccctggatatcgtgagcggcctcctggaggaagatccagacttctctgcgcaggactgcctgacggcgctggggcaggtgtttaggagccgggatacatggatgacctcgcggatgaagttcctgacctgcacgcaggggccccaggaggggctgtttgccttcgtggtgcgcctggaaggcctgctgcagaaggccgtggagaagggggcggtccacccagacgaaa

SEQ ID NO: 89038 - DNA, 2670 bp, Homo sapiens
gctaggccctctggggtagttctggtgccagggtctactggggtagacctggaccttgggtttgttggagcaggcctggaacctgggttcactggaacctggggctgtagggaccagcagtcagtggacctaaagcctatatccactggtgccaacctggagactggggctgtagggcccaacctggtgttggagcctgggtctactggggtagacctggaccttgggtttgttggagcaggcctggaacctgggttcactggaacctggggctgtagggaccagcagtcagtggacctaaagcctatatccactggtgccaacctggagactggggctgtagggcccaacctggtgttggagcctggagcgggatttccggggtcacgggaaccggcaggggaacgggataaagttcccggagaaaggaaaggagagcgtgggatagtaaaagagaagacgcggagaagaggagaggacctacaagaacggaggacaggggcgcacgatggtcccggggggagcggaaacaaaggcacgcaaaacggaaaagcgtgtgtaggggagcggaaaaggaagtcaccaccgtggcctgcgacgaaatggcgaaaagtcttttgaagacagcctctctgtctggaaggacaaaattgctacatcaaacaggattgtcactttatagtacatcccatggattttatgaggaagaagtgaaaaaaacacttcagcagtttcctggtggatccattgaccttcagaaggaagacaatggcattggcattcttactctgaacaatccaagtagaatgaatgccttttcaggtgttatgatgctacaacttctggaaaaagtaattgaattggaaaattggacagaggggaaaggcctcattgtccgtggggcaaaaaatactttctcttcaggatctgatctgaatgctgtgaaatcactaggaactccagaggatggaatggccgtatgcatgttcatgcaaaacaccttaacaagatttatgagacttcctttaataagtgttgcgctggttcaaggttgggcattgggtggaggagcagaatttactacagcatgtgatttcaggttaatgactccagagagtaagatcagattcgtccacaaagagatgggcataataccaagctggggtggcaccacccggctagttgaaataatcggaagtagacaagctctcaaagtgttgagtggggcccttaaactggattcaaaaaatgctctaaacataggaatggttgaagaggtcttgcagtcttcagatgaaactaaatctctagaagaggcacaagaatggctaaagcaattcatccaagggccaccggaagtaattagagctttgaaaaaatctgtttgttcaggcagagagctatatttggaggaagcattacagaacgaaagagatcttttaggaacagtttggggtgggcctgcaaatttagaggctattgctaagaaaggaaaatttaataaataattggtttttcgtgtggatgtactccaagtaaagctccagtgactaatatgtataaatgttaaatgatattaaatatgaacatcagaattactttgaaggctactattaatatgcagacttacttttaatcatttgaatatctgaactcatttacctcatttcttgccaattactcacttgggtatttactgcgtaatctggaacatttagctaaaatatacacttttggcttaaaaattattgctgtcaattccaataataattcttagcttataaccaaagagcagtgtttaaaaggagagcttctatacaaaacctattcctggcgttacttttcatacaatttttgttctgttttacctggaaataatttaccaaaataactgagtgttgctgctaaagaacaaaagtggggaggtatcagggaacaagaaaacaagaaagggtatgatcaatcattttcttctgctccaaacagctggagtaaaattcatgggaaatggcccttcatttaaaaaaagatgtacctcactacccactacaaatttggaactttgttcttttcaataattagttttctattgtaaattacctactaaacagtggtagccatgacatggaaagtcaactgattctacaattggacattcatttgtgtgccctggaatttccaactagtaataaacaactactgttgatgtagttttaaaccacttgaagggactcatgaagcatcctgcaacataaatttgcatttttacatcagatttcttttttttcctgaaaaacaactaaccttctaacaactatctttcaaaagtaaatgtaataaaaatgcacaacataaaatgtttatgatcccagcaatacactttttaaaaaatgtgaaagtcaaagaattaagttctagttctgactcatcacaagaggtcaaaagtatttgctactgtaacattcaattcacatttgagaatcatggtaaaaataacttgcatttgccttaccatcatgatcctactgttgagttaggaaaatatggttagacagactcacattactttttttcagaggtaaactctagattactgtgtcaacccaatactatttggccatagatgtaaaaactaccaaataaaagtggattttgtgaaatccaaaaaaa

SEQ ID NO: 89039 - DNA, 1440 bp, Homo sapiens
ggaagcgggactccaaatgggtcgcagtcgcagccgctctccacggagggaacgtaggcgttcccggtccacatcccgggagagagaacgcaggcgccgagaaaggtccaggtctcgggagagagatcggagaaggagccgctcgcgatccccgcaccgaagacgctcccgatctccaagacgacatagatccacatctccttccccttctcgactgaaagaaagaagagatgaggaaaagaaagaaacaaaagaaacaaagagcaaagaacggcagattactgaggaagacttagagggcaaaacagaggaagaaatagaaatgatgaagttaatgggatttgcctcctttgactccacaaaaggtaagaaggtggatggctctgtaaatgcctatgccataaatgtctctcagaagaggaagtacaggcagtacatgaatcgaaaaggtggattcaacagacctttggatttcattgcatgagaattgaagtgttgaaggatgattttttttcccctcatcttggtcagagagtggattttgtattttgtatttaacttgcattcaaaaaacaggatctcagttctcctttcttgtaaagtaagaaaatcttatttatgatatatgcagttaacttaccttgcctcaacagaagaaaggttaaatattacatttttttcttttaggaaatatcatttgtggcaggcgtcaaccccattttatttgtccttattcctgtggaagcagtatatgttttcttcctgaatgctcattaggacttcttaaaaaacatgaaagtaatttggaagtaagtttatccaataaagcagtatttctacccttttagatttgataaatatttttattactaaagaatctccccagacattttcttttttttttcacacatagatttaagtatcttgattgttagtagtctaaaaatggggaagaatgaaaaagcataactagatttttccatcttctgtggtcgccccgccccccccccaaaaaaatacccatttatgggttctctcccgcaagtataaaggcattacatgcaaaaaaaagatctcaggggaaaacaaaagtaaagggaaaagcagaaaatcacctgttatctactcccaggaaataatcaatttcaacattttgtgtatatgtttttccaggctttctttgggttgattccaccctatgagatcaggatatgtatgcagttctttctttaaccctttttttctcctatggactggtgaacatttaaaaaagtacttttaaatattctttggaaacttagcttttaggtaactacttggttggtatcataatttattaactaatgttttattggtaaacattggcttgcctcccatgacttgccattataattaaaactgtgactacttatctgtctccattacatacaaaaaaaaaaa

SEQ ID NO: 89040 - DNA, 767 bp, Homo sapiens
gacccacgcgtccggacggaggcgcctctctctccccgcccctctcctcggccctttctcttcccagcacctcggctgctgcccggcagcggcagcagctgcgtcggcggcccacacagcagcgagaggcgagaggaggctgcctcgaggatgaagtgcaaacccaaccagacacggacctacgaccccgaggggttcaagaagcgggcggcgtgcctgtgcttccggagcgagcgcgaggacgaggtcctgttagtgagtagcagccggtacccggaccgctggatcgtgccgggcgggggcatggagcccgaggaggagccgggcggtgcggcggtccgagaggtgtatgaagaggcgggagtcaaggggaagttaggccggctcctgggcgtcttcgaacagaaccaggaccccaagcacagaacgtacgtgtatgtactgactgtcacggagctgctggaggattgggaagattcggttagcattgggaggaagcgagagtggttcaaagtcgaagatgccatcaaggttctccagtgccacaagcccgtgcacgccgaatatctggagaaactaaagctgggcggttccccaaccaatggaaactccatggccccatcctcgccagatagcgatccctagtgaatggcatagatgttgttcagatttactttgaaagaatcaagtatgtgaatggatggatgaatggaattgtgaagcacagatgagctctttcacactccaaggacacagctcatcctatg

SEQ ID NO: 89041 - DNA, 438 bp, Homo sapiens
  misc_feature (1)...(438): n = a,t,c or g
tttcgtcgtgattcccattctacagagcaggaaacgggcacacgtgattcccattctacaaagcaggaaacagacacgcatgattcccattctacagagcaggaaacggacacacgtgattcccattctacagagcaggaaacggacacacatgattcccattctacagagcaggaaacggacacacatgattctcattctacagagcaggaaacggacagatgtgattcccattctacagagcaggaaacgggcacacgtgattcccattctacagagcaggaaaggggcacaccgtgattcccattctatagagcaggaagcggacacatgtgattcccattctatagagcagggaacgggcacgtgtgattaccattctacagagcaggaaacagacacactgtgattcccattctacagagcaggaaacagacn

SEQ ID NO: 89042 - DNA, 418 bp, Homo sapiens
tttcgtcattaatctcaagtactcggtagaagaggagcagcgcgccgggacggtgattgccaacgtggccaaagacgcgcgagaggcgggctttgcgctggacccccggcaggcttcagcctttcgcgtggtgtccaactcggctccacacctagtggacatcaatcccagctctggcctgctggtcaccaagcagaagattgaccgtgatctgctgtgccgccagagccccaagtgcatcatctcgctcgaggtcatgtccagctcaatggaaatctgcgtgataaaggtggagatcaaggacctgaacgacaatgcgcccagtttcccggcagcacagatcgagctggagatctcggaggcagccagccctggcacgcgcatcccgctggacagcgcttacgatccagactcaaga

SEQ ID NO: 89043 - DNA, 2762 bp, Homo sapiens
atggacgggctgcccggtcgggcgctgggggccgcctgccttctgctgctggcggccggctggctggggcctgaggcctggggctcacccacgcccccgccgacgcctgccgcgccgccgccacccccgccacccggatccccgggtggctcgcaggacacctgtacgtcgtgcggcggcttccggcggccagaggagctcggccgagtggacggcgacttcctggaggcggtgaagcggcacatcttgagccgcctgcagatgcggggccggcccaacatcacgcacgccgtgcctaaggccgccatggtcacggccctgcgcaagctgcacgcgggcaaggtgcgcgaggacggccgcgtggagatcccgcacctcgacggccacgccagcccgggcgccgacggccaggagcgcgtttccgaaatcatcagcttcgccgagacagatggcctcgcctcctcccgggtccgcctatacttcttcatctccaacgaaggcaaccagaacctgtttgtggtccaggccagcctgtggctttacctgaaactcctgccctacgtcctggagaagggcagccggcggaaggtgcgggtcaaagtgtacttccaggagcagggccacggtgacaggtggaacatggtggagaagagggtggacctcaagcgcagcggctggcataccttcccactcacggaggccatccaggccttgtttgagcggggcgagcggcgactcaacctagacgtgcagtgtgacagctgccaggagctggccgtggtgccggtgttcgtggacccaggcgaagagtcgcaccggccctttgtggtggtgcaggctcggctgggcgacagcaggcaccgcattcgcaagcgaggcctggagtgcgatggccggaccaacctctgttgcaggcaacagttcttcattgacttccgcctcatcggctggaacgactggatcatagcacccaccggctactacgggaactactgtgagggcagctgcccagcctacctggcaggggtccccggctctgcctcctccttccacacggctgtggtgaaccagtaccgcatgcggggtctgaaccccggcacggtgaactcctgctgcattcccaccaagctgagcaccatgtccatgctgtacttcgatgatgagtacaacatcgtcaagcgggacgtgcccaacatgattgtggaggagtgcggctgcgcctgacagtgcaaggcaggggcacggtggtggggcacggagggcagtcccgggtgggcttcttccagccccccgcgggaacggggtacacggtgggctgagtacagtcattctgttgggctgtggagatagtgccagggtgcggcctgagatatttttctacagcttcatagagcaaccagtcaaaaccagagcgagaaccctcaactgacatgaaatactttaaaatgcacacgtagccacgcacagccagacgcatcctgccacccacacagcagcctccaggataccagcaaatggatgcggtgacaaatggcagcttagctacaaatgcctgtcagtcggagagaatggggtgagcagccaccattcccaccagctggcccggccacgtctcgaagttgcgccttcccgagcacacataaaagcacaaagacagagacgcagagagagagagagagccacggagaggaaaagcagatgcaggggtggggagcgcagctcggcggaggctgcgtgtgccccgtggcttttaccaggcctgctctgcctggctcgatgtctgcttcttccccagcctgggatccttcgtgcttcaaggcctggggagcctgtccttccatgcccttgtcgagggaaagagacccagaaaggacacaacccgtcagagacctgggagcaggggcaatgaccgtttgactgtttgtggcttgggcctctgacatgacttatgtgtgtgtgtgtttttggggtggggagggagggagagaagagggggctaaatttgatgctttaactgatctccaacagttgacaggtcatccttgccagttgtataactgaaaaaggacttttctaccaggtatgaccttttaagtgaaaatctgaattgttctaaatggaaagaaaaaaagttgcaatctgtgcccttcattggggacattcctctaggactggtttggggacgggtgggaatgacccctaggcaaggggatgagaccgcaggaggaaatggcggggaggaggcattcttgaactgctgaggatggggggtgtcccctcagcggaggccaagggaggggagcagcctagttggtcttggagagatggggaaggctttcagctgatttgcagaagttgcccatgtgggccccagccatcagggctggccgtggacgtggcccctgcccactcacctgcccgcctgcccgcccgcccgcatagcacttgcagacctgcctgaacgcacatgacatagcacttgccgatctgcgtgtgtccagaagtggcccttggccgagcgccgaactcgctcgccctctagatgtccaagtgccacgtgaactatgcaatttaaagggttgacccacactagacgaaactggactcgtacgactctttttatattttttatacttgaaatgaaatcctttgcttcttttttaagcgaatgattgcttttaatgtttgcactgatttagttgcatgattagtcagaaactgccatttgaaaaaaagttatttttatagcagcaaaaaaaaaa

SEQ ID NO: 89044 - DNA, 771 bp, Homo sapiens
agcagcacagttcctgtgagcccgaagcgtgtgggcacagggctccctaggataaaggaaggacagtctgatgagctgtagcccaagaggaagaggtctcccggtctgtatgctttgtgcatagcccacttctgaaaaaccctgctgcagagcgtaaagtacttgcgcacatcactgactggtaccccactctcattttactggctgaaggacagattgatgaggacattcaactagatggctatgatatctgggagaccataagtgagggtcttcgctcaccccgagtagatattttgcataacattgaccccatatacaccaaggcaaaaaatggctcctgggcagcaggctatgggatctggaacactgcaatccagtcagccatcagagtgcagcactggaaattgcttacaggaaatcctggctacagcgactgggtcccccctcagtctttcagcaacctgggaccgaaccggtggcacaatgaacggatcaccttgtcaactggcaaaagtgtatggcttttcaacatcacagccgacccatatgagagggtggacctatctaacaggtatcccaggaatcgtgaagaaagtctacggaggctctcacagttcaacaaaactgcagtgccggtcaggtatccccccaaagaccccagaagtaaccctaggctcaatggaggggtctggggaccatggtataaagaggaaaccaagaaaaagaagccaagcaaaaatcaggctgagaaaaagcaaaagaaaagca

SEQ ID NO: 89045 - DNA, 577 bp, Homo sapiens
cacagacgtgaatctgaagaatggaagtggcaaggacagtctaatgctggcgtgctatgcgggacacctagatgttgtgaaatatctccgaagacatggcgcttcttggcaggctagagacctgggaggctgtacagctctgcactgggctgcagatggaggccactgcagtgtgattgagtggatgataaaggatggctgtgaggtagacgtcgtggacactggttcaggatggaccccactcatgagagtctctgcggtgtcgggaaatcagagggtggcctctcttctaattgatgctggggccaatgtgaatgtgaaggacagaaatggaaagacgccccttatgagtgtagtctccttattagaagaaaggaaaaaaaagcagaggccaaagaagtcttgtgtctgctgatgagagcaccactcatctgcgaaacgcacgtaaaacaaagtgaaccgtgactgttaaactagggatgggaaattctgcatcttggggggctgtacatttatttatttagttgaagattcactgatcccactttgaaatacccctttttacctaaaaaaaaaa

SEQ ID NO: 89046 - DNA, 817 bp, Homo sapiens
ttttttttttttaatgtataaatccatttatataaagttcaaaaacaggcaaaatgaatcaaaggtgatgaaactcaaaaaaactgctatgtttgggaggtaatggctgaaaaaaggcaggaatgaggctgtgaagtgttgccaatattctacatcttcactttggcagtggttacacaggtgttcacgacataaaaatctatataacacggtacacggtttggcccacttttttgaatgcatggtatacttcagtaaaagtttactaaaaaataaaaataaaaaagacattgtgcttcttgttaccaaaataaaaccatggcagatattttggtaaatattctattttttccatcttctactgttgctgatgacagggatggtattcaggtgaacactttgtcacttagaatatcatttagctttagcctgtgcagccaatgcagcttcttcacgccacttagctttctttgccaagttccaacttgttaaggattcatgtcgttctacagcccttttggctgacactatcacagcaaagcaggcgataattgtgagtccaatcattatgtaacaagctttcactcgagctttgtttcttgcggtgtctatcatttctggcgggatccgaggcgggatctcctccatcgatttgaaacgccctgtccacagcaggattttcttgtcgaactgcgaaggcctgcgctgcgtggggactcggtgaatctccccgtgaccttggggcccagaattgctgggggccccgccgctggagtagcaggggagaccccggggcggaagagccggtgcgggccgt

SEQ ID NO: 89047 - DNA, 834 bp, Homo sapiens
  misc_feature (1)...(834): n = a,t,c or g
cggtggaattcggagaaacagggttcacagtacgtctactccttccctccagactgcggactgagggccatgaccgggcggatcgtgggaggggcgctggcctcggatagcaagtggccttggcaagtgagtctgcacttcggcaccacccacatctgtggaggcacgctcattgacgcccagtgggtgctcactgccgcccactgcttcttcgtgacccgggagaaggtcctggagggctggaaggtgtacgcgggcaccagcaacctgcaccagttgcctgaggcagcctccattgccgagatcatcatcaacagcaattacaccgatgaggaggacgactatgacatcgccctcatgcggctgtccaagcccctgaccctgtccggtgagggaatctgcactccccgctctcctgccccccagccccagcaccctctgcagccctcgcacttgtcagcatctgtcaactcatacccgggccccaaagcttctgcagggcagaagtcaaagactcttaaagatccttacatggaacacttctgtaatataattagggaaactgaagcccaagggttataaataagtttgctccaaatgacacatctcacattacaaattgatgacggagtcagggcttgggtactgatcttaatcaatagattgaattctttcactggtattaactgagcacctaggggccaaacgctatggtaggcatttcacacatatgatttcatttactcttcacaaccaaccctgtggagcaggcactattattaacttcatttgacatatgangaaatggagctttacagagagataattacctga

SEQ ID NO: 89048 - DNA, 639 bp, Homo sapiens
ggtttttttttgccagaaaaacctttatttccaagggggggcccatttggcctcctgcagttacccctcctccgggacattgagcttctccttcaccccacaggccaccacggcgaaaaagaactccgggaagaaggtgcggacgtacacggcggccttggggatggggttggccataaacacctcttgcttcttcctccgcacggtgcgcatcacctcctccgccacctttactgggtgcacgccgtaggtcagcttcctgaaaaagaatttccaaatggaagcttcccagtttccttgctctggatacacgtggtacgaccggatgaaagtcgggctcacggtgctgatgacaacatcgtattcctccacttcggctcggaggcagtcaaagaagcccagggctgcgtgcttggaggcagcgtaagtcgtacggaacgggattccaaacttcccttggatattattcactaacacgatttggcctgttctccgggagatcatgttgggaagcagggctttcgtcaatgtgatggggccaaagtaattggcatccatgatctttttgtcgagctccagagaaatcttatgggcaggccccttcaccttcacactggcattgttgatgaagatgtccac

SEQ ID NO: 89049 - DNA, 431 bp, Homo sapiens
agtttacgcgttccgacgagctggcccgccactacaggacgcacacgggcgagaagcgcttctcctgccccctctgccccaagcagttctcccggagcgaccacctgaccaagcatgctcgccgccacccaacctatcatccagatatgatcgagtaccggggacgtcgtcgaactccccgcatcgacccgccactcaccagcgaggtggaaagctccgcctccggctccggtcccggcccggcgcccagcttcaccacctgcctgtaggacagtcattgctgtcagtcttaccctcaaggatgatcccccaggccgttgtccctgctttctctctgcacatccttctttcccagagtcattacaccaaggcacagactggttcctctgctctgagggtggtccaggcagacatgtggactctggggaggg

SEQ ID NO: 89050 - DNA, 820 bp, Homo sapiens; identical to SEQ ID NO: 64425

SEQ ID NO: 89051 - DNA, 1083 bp, Homo sapiens
attcccgggtcgacggctgcgagaagacgacagaaggggaaggatggagccggggccaaggaggctgataagggcacaagcaaagccaaagcagaggaggatgaggaggccgaacgtatccttcctgggatcctcaatgacaccctgcgcttcggcatgttcctgcaggatctcatcttcatgatcagtgaggagggcgctgtggcctacgatccagcagccaacgagtgctactgtgcttccctctccagccaggtccccaagaaccacgtcagcctggttaccaaggagaaccaggtcttcgtggctggaggcctcttctacaacgaagacaacaaagaggaccccatgagcgcatacttcctgcagtttgaccatctggactcagagtggctggggatgccaccgctgccctcgccccgctgcctctttggcctgggagaagctctcaactccatctacgtggtcggtggcagagagatcaaggacggcgagcgctgcctggactcggtcatgtgctacgacaggctgtcattcaaatggggtgaatcggacccgctgccttacgtggtgtatggccacacagtgctctcccacatggaccttgtctacgtaattggcggcaaaggcagtgacaggaagtgcctgaacaagatgtgcgtctatgaccccaagaagtttgagtggaaggagctggcacccatgcagaccgcccgctcactctttggggccactgtccatgatggccgcattatcgtggcagctggggtcaccgacacagggctgaccagttctgccgaagtgtacagcatcacagacaacaagtgggcacccttcgaggccttcccacaggagcgtagctcactcagcctggtcagcctggtgggtaccctctatgccattggtggctttgccacactggagacggagtctggagagctggttcccacagagctcaatgacatctggaggtataacgaggaggagaagaaatgggagggtgtcctgcgggagatcgcctatgcagcaggtgccaccttcctaccagtgcggctcaatgtgctgtgcctgactaagatgtga

SEQ ID NO: 89052 - DNA, 1383 bp, Homo sapiens
gtgttcccccaactgtttcaccctcccctggctcctcagtgggggccatgacaggtgttagagaaagcagagctgagtgctcttcgcaagtgttgacagtgagctataggccatggacctgtggcctggcagctttgctccccggggtccaggggtcctcacttccttcctgccccagttccctagatgggctgtgcatctcagggacagggcctgcattgttgaccaccaattccttggagagggaggcagctcctgcagtgccctggggcctgttgtagggtgggtgagattgcagggagctgctcacccctccatgtctcctctctccacaggtgtcagcagctcccgtggtggagtctcctgtgggggcctctcctacagcaccaccccagggcgccagatcacttctggcccctcagccataggcggcagcatcacggtggtggcccctgactcctgtgccccctgccagcctcgttcctccagcttcagctgcgggagtagccggtcggtccgctttgcctagtagagtcatggagccagggcttcctgccaagcacctgcctgcctgcatcactgcactgaatggcatgtgaatggaaaatgtgtgcttgcttccagaatcttctggatgttcctacagaggggaagacctacagagggaaagaccctcgggccgctcccctgcgccttttcatgctagggagatgcatcctagttgtcctcctggcagctgttttcagaggcattcccagcccttcacttaactcctacttagctccaaaatacctgtatccaatttgtattattcccccagctctcagggataagaccagtcccccagcgtggtggtcagcacggaagctccaccttctgggtggaggcgccatcctaaccatccagccaggccacccacaacccgagaatcagggagaaagtccctccccagcagccccctcctcctggctgggaagaatggtcccccagcaagcacttgcctgttcattcccgttcatgttttgcttctctctcagactgccttcctgcttctgggctaacctgttccagccaggctcctcatgtgacctcgcagttgagaagcccattatcgtggggcatccttttgcctacagcccctggttagggcactttggacaggtcttgctattcagtgaacctttgtacatttcaaagaagactccatggctgctccagatgcccccttgctgggtgcaggtggggactgtccaatgcagagctggcgggacagagagttaagccacttcctgggtctccttcttatgactgtctatgggtgcattgccttctgggttgtctcgatctgtgtttcaataaatgccgctgcaatgcaaaaaaaaa

SEQ ID NO: 89053 - DNA, 427 bp, Homo sapiens
tcagatgggttatggtacacatcaggtcgggcattttctgggttacacactttgtactgagtggtgttatacaggcaagttccttttaaagttcctaggcattcataataactagaaaacagaaagattgttttaacttgttgccctacctcagtaacctgatgaatacactgggaacaatcttccatgtggggaaaatcagttgaagtccttattctacaagtccaaattttaaggagaataagtcccatgatgagtttcctcatgctttggccgcacatagaccagtcagcttccaggtgtgacaggagcagggcttgtcgtctttttcagagtcactttgcaggggttttccaggtttggtcctgtctcccaggagctgcaggttttacatgactgtggtggatccaggccgggattccctcta

SEQ ID NO: 89054 - DNA, 596 bp, Homo sapiens
gcaggaggctgctgccagtccagctgctgtagcccctgctgctgttcctcaggcggggggtcatcctgctgccagtccagttgctgcaatccctgctgctcccagtctagctgctgggtccccgggggctgccagggaaaaatctgaggctttggactcaggtctcatgtgagtcctgctaaccccattttccgaagctgtgacctgtccttcatcgttgacccccaaaccactgctcagggtccattcctcactataagatgaagccatatctgcctgccttttcctaaggagagtccaccctaattaatgtccattccctcctaacaaattctcttcccaagtcaactgcaactgcggctgaatcacccctcacccgctagccttgcctttgcttgtgtattcagaggcctgagctcctgaacccacttgaagtcctgtcttttccagctggagcagctgggcatgagtgtcccacctgcaacaaggtgggcgtttaagaggcttccttggagtggctttgcctgtccaacactctgctttatcttaaatgaaaagttgcaaactaataaaaataccatgccgacaaactgaaa

SEQ ID NO: 89055 - DNA, 1552 bp, Homo sapiens
  misc_feature (1)...(1552): n = a,t,c or g
ttttttttttttgtgttcattggtttaatcttttatttggaacaaaggaaaaaaggactgacaccagtttagcctttgagtgtgcagagctctgccctccctcccacccctcagccccaaatccaagatttcatagccctaacacccacccaagcagcttccctcacacatgccctttgttttcttcctctcttctatggttccttagggaaagccttctttagggatgaaaagctaactacagcccagtctggcctccagcagcccagggtcagctcagcctccactggaggcgagggaggagggcaaagggcatgggagaggtagggcttgcccctcccaggagcccttccccttcccctaggagcccagtccaggattggggaggaaggcaagagggggtccttagccagctgtcacattagaggaataggggctgggagtggggatgacaagaagtacaaagaaagagaaagttttgggggagatggataacaagctcagcctgtgtcaagtgatgtggaagggaaggtaatggtgggggaacccagccatggccctatcccaaccccaggctccacaggccccaaattggctttgcaaatccaaacattttaaggaagtggtttagggatggaagagaaacacggtagaggtctgtgctgtggattttcatctagggtggtgggaacaccagagatgtctcctctgccattgttttagttggctcctggacctcatcccagcagagggagggtgactgtcagcaggtcagtcccaccgccactgtccccctcgcagtgggcctctgtgtctcaggcctggccaggctccctgcccctcagagctcctcgtggacccgctcctcgtcctcatctgacttcagcttgagctcgtcgactgtgatcttgccgtcctggttgcggtcctggttctggaacatgtctcctatggttttctcagggtcctgcccaggcatgaggcgtcctttgccctcactcacttgagccttgatgaaggtggagaactcctccggagggacctcgccatccttgttgaggtccatgtcttcaaacaggttggcaggagggtccttgtgccacacaaacaggtagcctgtgggcagcccatcctcccgggacaccagctccacctcaaacagcagcacagcactgcctgggactccccgggctccactctccccgtgggccaggtgcgggggcacgatgagctgccgcctctctcccacacacatgccctgcaggcccgtgtccaggccttcgatcaccttgttggccccgagagtcgcctcctggggggccccgtagtcatgcctgggggagagcagatgcccaggtcagcagccaccctgtcccctgccagcgcacacccctctccctntgaggtgggcccagaacaagccctcagttccgcagttactcccactgctgactcgggnnnngcagcagagtgcaggggcacagctgaacagacgtggggttcccttctcatcttgccggacgcgtggctcggcccggatattcgaggcggt

SEQ ID NO: 89056 - DNA, 437 bp, Homo sapiens
  misc_feature (1)...(437): n = a,t,c or g
cctgcacgtaccggttcggaattggcgggtcgagctgcctgagctgacacgaggggaggggtctgtgtaacctacaggtgaccgaagggcttgcctgccgggagctgagcttggccaagggggttctgaagttcctgccggcaaacttagccttgctgcccagctcctcttcaattctgaggagctggttgtacttggccaagcgctcagatcggcaaggggcaccagtcttgatctgcccagtgcacagccccacaaccaggtcagcgatgaaggtatcttcagtctcccccgaacaacacttgcaggggtccctgctagttagcgccccaccgccgtggagttcgtaccgcttccttagaacttctacagaagccaagctccctggagccctgttggcagctctagctttgcagtcgtgtaattggcccaagtcn

SEQ ID NO: 89057 - DNA, 387 bp, Homo sapiens
cccagatcctccccgttctgacaccatggtcagctcctgttgtggctccgtgtgctctgaccagggctgcggccaagtcctctgtcaggagacctgctgccgccccagctgctgtcagaccacctgttgcaggaccacctgctaccgccccagctgttgtgtgtccagctgctgcaggccccagtgctgccagtctgtgtgctgccaacccacctgctgtcgccccagctgctgtgagacgacctgctgccaccctaggtgctgcatctccagctgctgccgccccagctgctgtatgtccagctgctgcaagccccagtgctgccagtctgtgtgctgccagcccacctgctgccaccccagctgctgcatctccagctgctgtcg

SEQ ID NO: 89058 - DNA, 411 bp, Homo sapiens
gtaaccctgtgcgatggcaggccttcaccctgggactgtccaagggccctagccccttcatcagaggtcacccatgactctcccgccctcatccgtttctgcacattcctcgccatgcccatctccctcctgcccatcccggagcccaccggactgcacagccagcatcagcacagcctgtcctgctgagtggggctgcctgcagtccatggcacgagatagaggcagaacctggaggcaggccgaggtcgccgctactcctggccacttccagaccaccctgccaccatcctcccttcagtccacggtccagacttcctggaaggcaccttgcagccttcgtttgccgaattgtgagatgcgtttgctcaccggcctcctcccgctgagcgtccctggtgtctgacccac

SEQ ID NO: 89059 - DNA, 707 bp, Homo sapiens
gcggccgcctcctggacagcggcagggaggggaggctcggcctcctgacacccgcgctggggctgcaaccgtgggtgcctccccaggccgagaccctgcccttggccaccatagtccccctctccttgggtagcttcctccctcctcaggcaggttaacaattgctgctgtttctgaactcgccgttctcagtaatctgcaatttggtggggttggtgggggagatgccgttacgggcttgcatgctgtacctctctttcagctgggtcagggcactcatgaggcgggcattggcggcatccaacgaggcaatgcgcttctcctgggcatcaatgatcttctgtttggagtccacagccgcttgcatctctgcgtggtccttcttcagttcttcctccacggacatcaacctgctgatgatgcccttcatctggatgtccttgtcctcctgctgccgccgcagccgctcctcgccctcctccagccgtgcctggtactccagcaccagcttctgcgtcgtctcctcctggcacttgaacagggtctcatactcctccagcttcttggtggagattcgcagcttgtcctgcagcaccgccaggtccttttctgcttggctgagctcgtccttactccttagcctatccctgtggggggggtctgggcccaggccctcgtcttctaacaactgcgcgttcatggtcaag

SEQ ID NO: 89060 - DNA, 1811 bp, Homo sapiens
  misc_feature (1)...(1811): n = a,t,c or g
ctcgtcgtgacagccatcactgccatcctggctttccccaatgaatacactcggatgagcacaagtgagctcatttctgagctgtttaatgactgtggccttctggactcctccaagctctgtgattatgagaaccgtttcaacacaagcaaagggggtgaactgcctgacagaccggctggcgtgggagtctacagtgcaatgtggcagctggctttaacactcatactgaaaattgtcattactatattcacctttggcatgaagatcccttctggcctctttatccctagcatggctgttggtgctatagcaggtcgacttctaggagtaggaatggaacagctggcttattaccaccaggaatggaccgtcttcaatagctggtgtagtcagggagctgattgcatcacccccggcctttatgcaatggttggggctgcagcctgcttaggtggggtgactcggatgactgtttctcttgttgtcataatgtttgaactgactggtggcttagaatacatcgtgcctctgatggctgcagccatgacaagcaagtgggtggcagatgctcttgggcgggagggcatctatgatgcccacatccgtctcaatggatacccctttcttgaagccaaagaagagtttgctcataagaccctggcaatggatgtgatgaaaccccggagaaatgatcctttgttgactgtccttactcaggacagtatgactgtggaagatgtagagaccataatcagtgaaaccacttacagtggcttcccagtggtggtatcccgggagtcccaaagacttgtgggctttgtcctccgaagagatctcattatttcaattgaaaatgctcgaaagaaacaggatggggttgttagcacttccatcatttatttcacggagcattctcctccattgccaccatacactccacccactctaaagcttcggaacatcctcgatctcagccccttcactgtgactgaccttacacccatggagatcgtagtggatattttccgaaagctgggactgcggcagtgcctggttacacacaacgggcgattgcttggaatcattaccaaaaaggatgtgttaaagcatatagcacagatggcgaaccaagatcctgattccattctcttcaactagaatcatagagttctggatgtaaagcgggaaggacattacagaccatggatatgttgtattaactgggtacccaaaacacattttccatatttggatggtgaagtcacattagtgtgttgtctctttcctacaagttaaccagttgcactacataatctctggaaattaattttctctttaggagaaattatagttaggcttccatgatgttacatttaggaaggtatcatgaaaggtttaaataaggttggctatgggtgtnaattatatttgcctttttaaaagatttttttaacttaaaaagtagttagccaatatgcaatcactgaaaactatgcaagagaaattccaaccgtcctgacctataacctgtaggaaaccgacgaaaaagtcactcttttgggatctaactgttgttactggaagacgaaggtaaactaaggggctttgcttttcaaaccagagaaaggaaagccagaaggaaaagagtaatggtattttctagactgtgaagattcagttcaaatgttatccttgttcctgttacaatatttagcattattagtttgttatgtgtgtatgtttatgttaattttaatttctgattataagacaatgctgctttggttaatctcttctaaaggaattta

SEQ ID NO: 89061 - DNA, 627 bp, Homo sapiens
  misc_feature (1)...(627): n = a,t,c or g
tcttggtgctggacaggcatctttgttttgggaacaaccaacctaagattggagggctcttggtacaggagcctttggggccctggatttaatactacgacagccactttgggctttggagccccccaggccccagtaggggatgtggctctaaatcagccggacatgtgcgtctaccgaagagggaggaagaagagagtgccttacaccaaactgcagcttaaagaactggagaacgagtatgccattaacaaattcattaacaaggacaagcggcggcgtatctcggctgctacgaacctatctgagagacaagtgaccatttggtttcagaaccgaagagtgaaggacaagaaaattgtctccaagctcaaagatactgtctcctgatgtggtccaggttggccacagacagcttagaagccattcggttgtctccaaaaggcctttggaaagacttgaatatgtatttaattccccccaccccctgccaatggtggcaaattttgtgaattgtttttctctcttccccttatctggctctaaaaccttctgctgcccaacctgactttgtagttctgaattttacttggttattnatggntnntgtcttgcctaggtttttaa

SEQ ID NO: 89062 - DNA, 474 bp, Homo sapiens
acaaaattccatgaaaagcatcattcacatcgaggctatagatctaactatctgtatgacaatcgatatcttcagcaatcatggggcatgaatatggaggattgactgccaaactccctgtggactcgcgtattctcattcagtcataccgcatcacactaccactgctttttgaagaattatcataaggcaatgcacaataatagagataccatgatttagtgaatgctgtgcttcacgatacttcccttcctaattatcatttgattagatacttgcaatttacatgttaagctgttttcactgctgtttctgagtaatagagattcattcctctccaaaagcaataacattcatgctcattataataaaatgactcttaaacgggggcccccttaaaaaaataggggtttccttcccggggatgcacaattataacttctttatgtgggcccttaatttatttatgggccc

SEQ ID NO: 89063 - DNA, 327 bp, Homo sapiens
cccagcgaatcagtgacgaacgcgcagccggtatcgaggtccggcgccacgatagccaggtgatcgattgtgcttttcacgcgatcaactccttcaagagattttttacgccccggctttattcagcctcactcgcactatcaccccgccaaactgaaggacacccttcctcttcgcgctcagtcacttcacgggactcacgcaattgcctcttcagcgtgcgcagtgacggcgcgtacagaaagccgaacgacacactgttcttgcgccccttcaccgcatgatgcaacaagtgcgcttgatacaggcgcttcaaatagggatgac

SEQ ID NO: 89064 - DNA, 405 bp, Homo sapiens
gaacactttggcattgttcctttccccctgtaagacaagttcctgcttttaagacaggatgaaaaattgataaaatttgagttaaatgtaaacttttattctaaggtaaagcctcttggtggtatatggggaaagttttcggagttttacagcaagaaaaacaccattatgtttgatgacatagggagaaattttctaatgaacccacagaatggactaaaggtaagacatacttttacttgttatgagctcatgtaatctgggctgagtggtacaacttttgtagtaagcactgttgaatttcatatatttttggaagtactgtattcttattgtataggcgagaaaagtttaagaaaaaatcatatagaaaatgaaccttggcttttttgaattgatgtatcg

SEQ ID NO: 89065 - DNA, 2839 bp, Homo sapiens; identical to SEQ ID NO: 63744

SEQ ID NO: 89066 - DNA, 1088 bp, Homo sapiens
aagaccttctggaggtacaacctcagccagcccagtgaggcgccaccgctggctgtacatgacgaggccgagaagcgactgcccaaagccatcctggtgctcctctccaagttcgagcccgtgctccaatggaccaagcactgtgacaacgtgctgtaccagggcctggtggaaatcctcattcccgacgtgctgcggcccatccccagtgccttgacccaagcgatccggaactttgccaagagcctggagagctggctcacccacgccatggtcaacatccccgaggagatgctgcgggtgaaggtggccgcggctggcgccttcgcgcagacactgcggcgctacacgtcgctcaaccacctggcgcaggcggcgcgcgctgtgctgcagaacaccgcacagatcaaccagatgctgagcgacctcaaccgcgtggacttcgccaacgtgcaggagcaggcctcgtgggtgtgccgctgcgaggaccgcgtggtgcagcggctggagcaggacttcaaggtgacgctgcagcagcagaactcgctggagcagtgggcggcctggctggacggcgtggtgagccaggtgctcaagccctaccagggcagcgccggcttccccaaggccgccaagctcttcctcctcaagtggtccttctacagctccatggtgatccgggacctgaccctgcgcagcgccgccagcttcggttccttccacctcatccggctgctctacgacgagtacatgtactacctgatcgagcaccgcgtagcccaggccaagggcgagacccccatcgccgtcatgggcgagttcgccaatctggccacctccctgaaccccctggaccccgacaaagacgaggaggaagaagaggaggaggagagcgaggacgagctgccgcaggacatctcactggcggctggcggcgagtcacccgcgctgggcccggagaccctggagccgccggccaagctggcgcggactgacgcgcgcggcctcttcgtgcaggcgctgccctccagctaagcccttggcctccccgccccacccgcccccgccacccctccacgccagggtcc

SEQ ID NO: 89067 - DNA, 978 bp, Homo sapiens
gaaagccacaaggacgacgcccacaaggaggaaaccagccccaacgtcccccacctcctccaggaaagccacaaggaccacccccacaaggaggaaaccagtcccaaggtcccccacctcctccaggaaagccagaaggacgacccccacaaggaggaaaccagtcccaaggtcccccacctcgtccgggaaagccagaaggaccacccccacaaggaggaaaccagtcccaaggtcccccgcctcgtccgggaaagccagaaggaccacccccacaaggaggaaaccagtcccaaggtcccccgcctcatccgggaaagccagaaggaccacccccacaaggaggaaaccagtcccaaggtcccccacctcctccgggaaagccagaaggaccacccccacaaggaggcaaccagtcccaaggtcccccacctcgtccgggaaagccagaaggaccacccccacaaggaggaaaccagtcccaaggtcccccacctcgtccaggaaagccagaaggatcaccttcacaaggaggcaaccagtcccaaggtcccccacctcatccaggaaagccagaaggaccacccccacaggaaggaaacaagtcccgaagtgcccgatctcctccaggaaagccacaaggaccaccccaacaagaaggcaacaagcctcaaggtcccccacctcctggaaagccacaaggcccacccccaccaggaggcaatccccagcagcctcaggcacctcctgctggaaagccccaggggccacctccacctcctcaagggggcaggccacccagacctgcccagggacaacagcctccccagtaatctaggattcaatgacaggaagtgaataagaagatatcagtgaattcaaataattcaattgctacaaatgccgtgacattggaacaagttcatcatagctctaactttaatataccaataaaataatcagcttgcaaaaaaaaaa

SEQ ID NO: 89068 - DNA, 886 bp, Homo sapiens
cgccatgttgcccggcctacgcatcgggggcgtggcccagtgacgtcacagctaagcgcctctgtatcgtcgcgaatccgttgcggaaccctgtctttacccagagctaccatgagcaagcggaaccaggtatcgtacgtgcggccagccgagccggcgtttctggcccgcttcaaggaacgggtcggctacagggagggacccaccgtagagactaagagaattcagcctcagcccccagatgaagatggggatcacagtgacaaagaagatgaacagcctcaagtggtggttttaaaaaagggagacctgtcagttgaagaagtcatgaaaattaaagcagaaataaaggctgccaaagcagatgaagaaccaactccagccgatggaagaatcatatatcgaaaaccagtcaagcatccctcagatgaaaaatattcaggtttaacagcaagctcaaaaaagaagaagccaaatgaagatgaagtaaatcaggactcggtcaaaaagaactcacaaaaacaaattaaaaatagtagcctcctttcttttgacaacgaagatgaaaatgagtaagtgtaaatattttgaatttagtctactttgaaagtatatggagtgttcattaaaatcacattttttccctattataaagatactacaagttctttatagaaagtttaggaaatagagaaaaaaatttaataaactacatctattcatcaatacccctctgacttaaaatgccaactctatagaaattagctagtattaacattttgttatttcccttgtgtggttgtatatatatgtaaattatatttttaagcaaaatacattttttgtgtgtaaacaaaattttataaatacaactgtattgcaaaaa

SEQ ID NO: 89069 - DNA, 442 bp, Homo sapiens
  misc_feature (1)...(442): n = a,t,c or g
taggtccacccacgcgtgcgctgaggacatgctagaacctaaggtgcatgacaaagacttttttactttttactttgtatatctcaggcagaaggagttttttcccgtagccactacagctagtaatgtgctgagtttcatcggaagccagcaagtctcaggggctcacccaaggcccttgatgtagtacctgggtatcactgctggttatttcatgtccaaggctcttcagatagcaggtgatgaacgctgctgggattgggttttttccttcaaggcagtgggttcccttttggctcaggttgtatctagaaatgtctaggagctatggcctggaatggggacctcatgattctgatggtgccctatcttgctttggcagagctggtatccaagatgtaagacaaagncttccctactcttcctctcctctcctccaggg

SEQ ID NO: 89070 - DNA, 542 bp, Homo sapiens
  misc_feature (1)...(542): n = a,t,c or g
cttgtaccggccggaattnnngntnnatcacgcgtccgctttntaggtattctgaaatgctgctctgaacacttgtatacaagttttttgtgtggacatatgattttatttcccttgagtatacatctaggagttgacttgctgggtcctatggaaactatgttcaacattttgaagaactaccaaattgtttttcaaagtgaacgtgccattttacaaagatcaactgtgttgatctttatcttaggatcttaggcaagttatacattcaagcctcatcaatttattcatcacatatatattaagaactatgttagaaatagagggtatataaaaatgtatctttaaaagtatgaaaacaaaaagtgtatttaaacatttgcagtcgtttggtaacttccatggtatgaaaatgcaagaatggggataaaggccttctagcttgatgaaacagaacatgcagaggcatgaanatgggagggagcatgattgatcaagaaactcctccaagggctttagctaaaagtggtgtgcaagggtgt

SEQ ID NO: 89071 - DNA, 939 bp, Homo sapiens
  misc_feature (1)...(939): n = a,t,c or g
gactctccagctggcagcatcagtgcccttctttgccatctccctgatatcctggtggctgccagaatccgcccggtggctgattattaatggcaaaccagaccaagcacttcaggagctcagaaaggtggccaggataaatggccacaaggaggccaagaacctgaccatagaggtgctgatgtccagcgtgaaggaggaggtggcctctgcaaaggagccgcggtcggtgctggacctgttctgcgtgcccgtgctccgctggaggagctgcgccatgctggtggtgaatttctctctattgatctcctactatgggctggtcttcgacctgcagagcctgggccgtgacatcttcctcctccaggccctcttcggggccgtggacttcctgggccgggccaccactgccctcttgctcagtttccttggccgccgcaccatccaggcgggttcccaggccatggccggcctcgccattctagccaacatgctggtgccgcaagatttgcagaccctgcgtgtggtctttgctgtgctgggaaagggatgttttgggataagcctaacctgcctcaccatctacaaggctgaactctttccaacgccagtgcggatgacagcagatggcattctgcatacagtgggccggctgggggctatgatgggtcccctgatcctgatgagccgccaagccctgcccctgctgcctcctctcctctatggcgttatctccattgcttccagcctggttgtgctgttcttcctcccggagacccagggacttccgntccctgacactatccaggacctggagagccagaaatcaacagcagcccagggcaaccggcaagaggccttcactgtggaaagtacctcgcttttagaaattgttgccttgcatggagccctttagtcaaagattcctgggaaaggatt

SEQ ID NO: 89072 - DNA, 1801 bp, Homo sapiens
ccccaccaaagtaaaggttcctcttcaaagatccccaggttggttataattcgccccactaaaaggacaaagttttttttcttcaatcacgggtaaaaatgggcccctccaagggtcatttaaagcggccggcccatttatttttattgggtttttttcagcttcaatgaatttttaattttgttcaatcttgcatttgttcaaccaaaaacaatttaaagaggaacacgacaatcagccttagattgagcaagttcagctcctcactagggagttcttgaatccaccatgaaaatcaacagtgtgcatctaacagttttcttttaatttgagaactgaaaagtgaatcatcacatcaaatattcttcagggtctctttggtttccagattaaacatgtaatgtgacggtcatcttgccacattctcacatttccattttaaataatcataaataagaaaaccttactattctttggcataacacagctgattgattccgctgagtttcaaagtcttagaaattgcactcattccttctttagagtcctgcttcatggcaaaagttttcagctgaaagactctttattgtattcaaatcttgtcccatatgagttgttctggttactcagtttatgaagagtcttggatagtgaattgggtccacaacagaaaacaccaactgtttttcctctgttatattttgctatttcatcaaacaaaagtttccaccgaggacgtcctataaacagtcttgaattcagtgcatgatatttttctccaattatcttctgtatcccatctgtttgactgaggtacagctggatgttgacatagtcaggtctgttctcttgccaaaacttgttatgcaacatacagagtaaatctgcaaaccaacggaaggactggatatctctgcatacccaaataaagtatagtcttctaagcttgtatggtttccagtcatccaacagggtgttgagtattgatgcaaatggagttactccaatgcctccagccacgcagaggctgacctcatagttcagtgattcctcaaatggacttccaaaaggaccatcaatatacagcttgggataatttctagattgaatgaagggcagaatttcggagtcttgactagatggaggcagtagtaaatctcgaaatcgttctgtccagtctcctactattttaagatgaaccccaaatgttgctttggtttcagttggccacattgtgagggtaaatggatgattttttaatgcagatacgctgggacaatgtagagtaatatactgaccaggtcttgctttaaaattttctttgaccattcggatttccatgacatctgagggatgacttatgaccgaaatgatggtgactggcttattgctccggatatacctgtaaagtctttcggcacagtacaggcacaaaggtccagaaatccaaagccaagtctgtggaaaattagcttggaatctgggctcttccatacaaatcttcacaaatttgtgctgggtaaactctgccggttttgaaaatccttcagggaaaggttcatgaaaatgttctgagaaatactctggtaaggaaatattctgagagctggttcggttaagactgatgcagccgggagggtgggtatctaaattagtttgatacttcagcagccctctaaaattacatttaaaacaaacaaacagagaaatgaaaagatttgagatcaggggacacggtaaaagaaaataatgtttttgtttttgtttttgtttgctaactttacacagcatttatccaaaa

SEQ ID NO: 89073 - DNA, 674 bp, Homo sapiens
  misc_feature (1)...(674): n = a,t,c or g
ggaaagcacgggtcgacccacgcgtccgcctgtttgtacatgagaattagggaaggaagaaagtgcagaaggaaagtactcaaggcaggggcttcctagtccttttaatctcatggcacatataggagatttttgtacagcaaatggaatcaatgaactgtccctcgggcactgccccagactctgcccaacggtccggagagctgagagaatccatatcctggcatacccttaactcattttttgcatgccattgggaagcttgccgagctctagcttggttttcttgataggtcaagattcaaaatattctgttgtgcctcatgactttttttttctgcccagtttaattttcatagtatttccaaggtgggcattattcctgtgttttgggtaggaattctaaggttctgaaaggtagaatttcagccctcgttggtcctgggattccaagtaatgctgtttctgccctaccacaggtgtaggtgctggtgtaattaactacagtgtggagtggtttgactttgcctatcttgaactttgagtgctccacaaagccatgcttgtgaagagcaccaaggagttgagtgcagagtctgagctaaggttgctggtctcaagagagaaaagaggattttgaaacagggcatctgacgcanaggctgtgaaggcaa

SEQ ID NO: 89074 - DNA, 436 bp, Homo sapiens
agcgtggtggaattcgctgaacaaaaaatcagtccattgaacattctttctattgaaaaagatgatggaactctgtgaggtttgcttcttcagtatcctttattctgatatgaagaatcctggtgttgagaattccttctgattttaccttgggagtactagctctccccagtctcttgtttttattattagtagaatgcattgactccaccctcttgttccaaaagtgggcacatttcccatgcttgataataaaacatggcactcctatagtcataggccccacggtggaccaatcagaatcaatgctaggatgctgtttggtgctactggatgaagagtactttctgctgagtttgctaagaatggcagacaacaaacttcatgtcgggagggaggacctgcctgagaaggaagagtcaagaaagaaatcagg

SEQ ID NO: 89075 - DNA, 1208 bp, Homo sapiens
cggggagcccccgggggccccgccaccgccgccgtccgccgtcacctacccggactggatcggccagagttactccgaggtgatgagcctcaacgagcactccatgcaggcgctgtcctggcgcaagctctacttgagccgcgccaagcttaaagcctccagccggacctcggctctgctctccggcttcgccatggtggcaatggtggaggtgcagctggacgctgaccacgactacccaccggggctgctcatcgccttcagtgcctgcaccacagtgctggtggctgtgcacctgtttgcgctcatgatcagcacctgcatcctgcccaacatcgaggcggtgagcaacgtgcacaatctcaactcggtcaaggagtccccccatgagcgcatgcaccgccacatcgagctggcctgggccttctccaccgtcatcggcacgctgctcttcctagctgaggtggtgctgctctgctgggtcaagttcttgcccctcaagaagcagccaggccagccaagacccaccagcaagccccccgccagtggcgcagcagccaacgtcagcaccagcggcatcaccccgggccaggcagctgccatcgcctcgaccaccatcatggtgcccttcggcctgatctttatcgtcttcgccgtccacttctaccgctcactggttagccataagactgaccgacagttccaggagctcaacgagctggcggagtttgcccgcttacaggaccagctggaccacagaggggaccaccccctgacgcccggcagccactatgcctaggcccatgtggtctgggcccttccagtgctttggccttacgcccttccccttgaccttgtcctgccccagcctcacggacagcctgcgcagggggctgggcttcagcaaggggcagagcatggagggaagaggatttttataagagaaatttctgcactttgaaactgtcctctaagagaataagcatttcctgttcttccagctccaggtccacctcctgttgggaggcggtggggggccaaagtggggccacacactcgctgtgtcccctctcctcccctgtgccagtgccacctgggtgcctcctcctgtcctgtccgtctcaacctccctcccgtccagcattgagtgtgtacatgtgtgtgtgacacataaatatactcataaggacacctccaaaaaaaaaaaa

SEQ ID NO: 89076 - DNA, 744 bp, Homo sapiens
ctggtttgaagaaagaaatctttattaataatcttaataatactgttagtttgaatggtcacaccttggaagcatacagaatggtaagaaaggaagcccggggctcggctgcagtcctggggatctgagtgagtcggggggttgagctgctgcaagaaaagggtccggaacagcagaggggacagggggctctgtacagaggacaaagccggaggcagggcgtggggctatgtacaacgggaatagaaaaggagaattccatttcaatagctgatgctgaatagaaagtgaggtgtatttttaaatttttgacacttcatgagacagtggagccacgttgggagcctgtattttttgctgcttccctacttcagtgctccctgcctcgccaggggttcctccctgccacctgctctgctcctgctcttcccaccgggtaagcctggctgtccttggtgctgctcccgccacctggacacctgccttgggagcagggaaggggccggcccaggcttccccatcccttgcccttcccatgggcccctgctctggctgtgcccgtccaggcccacagccactgtgactcccaacctcgcgatgcagccgggcgctggcccgtccctggccctgggcgcccacggtggactgggctcacaggggagcggcagggagggctgggtcccagcaggcagcacgaggtcagccttggtgtacacaggcccccggcctcctccagaaagggag

SEQ ID NO: 89077 - DNA, 416 bp, Homo sapiens
agcgctgcaccagcccctggctggtggttactgtccgaacggcgtggtgtggtcgctgactctctgggcgtgcagctccgcagccctgccggctcggttcgattgacttacgcaggattctcagcccttgcctgggagaacagttcaggagacagatggccccaagagcccagatccagggaccgctgacatttggggatgtggctgtggcctttacccggattgagtggagacacctggatgctgctcagcgggccctgtacagggatgtgatgctggagaactatgggaatctggtgtctgtggggcttctctcttccaaaccaaaactaattactcagttggagcaaggggcagagccctggactgaggtgcgagaggctccatcaggcacacatgcagtcgaggattactgg

SEQ ID NO: 89078 - DNA, 426 bp, Homo sapiens
  misc_feature (1)...(426): n = a,t,c or g
naatccccccatgacatcggcatcgccaaggtcaaaggacagttctaacctcgtctacactatggcagcgttcaacactgtgcattacaccgtcctctccgaaacattcctcgctttcttctgtgccattacactttcctggtcattctacctctccatcctcttttacattcctactgctcttactctagcgctccttataatgctagagttccttagggagcaggtcaggactcacattttctttataatatgatctaacatattcagtgctcaacacagcagcctgagtgatcgattctttaaagtataagatcatggcatacctctcgtcataaccacctagtggctccccaactgactcagccaaagtctttagagaggccttcaaggctctgtatgctccgcacagcccgcacgcgtggg

SEQ ID NO: 89079 - DNA, 2492 bp, Homo sapiens
gcgtccgatcaaaactttgggaattggatttcatttttcagtggatggagtacatttcttaacacagagggaagtacagaacttatggaaagaaaatttgattattctggatactgcaaaaaaacatggctatgaagtagttgacacattcactataacaatggggcgttacaaagagtttctacaggggaagtgtggatgtcatttccatgaggtagtgaaatcaaagttatccaaagaatataactttattaaaatgaaaagatcaagaaatcatatcatgggaagatatttcagcaatcaaagcaaactacaacaaggcactgtaacaaattttcgatcgccatatcatgtcagaggtccaataaatcaggtttgttctgaaatccttctcagcaggatgtgtgcaaataaaaggactatgtagggctccctgcagggggagctgaatctggagctggagacgagctagtcacccggacaatggtctaggagccaagcgctgcacatcgcacacatttgggatcgaccacacacacttgtgcacaccagcacatgcatgcacaccagtacacacacagttaaataatgataacacttcttacagctttatgaattcaagatgtgaccttgaacaccagtccatttcacagtgaaagatatacctagagaaacgttacttgaagtataattattaaccagaaccactgtgggccaggtatggcattgtgataataaagagaaatatagacacttaaaattatgtgaaaaaaaggataatgctctttcatgttgtcttaccatatctataggtacatcaatattgaaaaggagaaaaaccaatgacattccactggcaagtagaagttgtcctttcattctttaccaggagaaaatgtgatgtttatgatggcttaggctttgtgaatctaatgcttatgaaaaacatttcttcctatactttttaaattttattactgaaaggaaaagaacaggaatgttccacaagggaatttgaagagattctgtgagagagatatgaaatattttatagttaaaacaccaatatattcaactttacacttcttgtgtttttcataaacattccctcttgtcttatctgtgtacttcgatgggtaactgcagtctgaattaatgaaatatgtaattttaaagtaagtaacaaaatgtagttcctcatgtattactgtactatgtttcattgatgatattacttaaatcttgtgtttgccattacagccctatgtaacttaaaattacaattatattttatgtaaatattttgcaaaggactatgcattctgaaatgcataggtgctttttcccaccaagcatttgcatatgtccacaaatagtattatgttactagtatctatattttgattttcctgagcaactgtatcaaatccaaatttagattagacaaaaaattattattttaattaaactgtggcatacatataatacatacctaattatagtagtgagaactatttcttttatctctttaggttcaaaatggtgaatttctttattatatgaatgctttgttgtgagataacatcacactgttacaatggattttagaggtttgtcttttttgggtggggtgggaagctgagagggttaattcaatacatggctgaaattaccaaatgtataaatacctcattttcactaccatacaagaaaaaaacacctattttgattgatcagttcttttgtatgaatatccacctcctttaaatactctatttttatatatatttttatatgaagataaacatgaatttatatttaactgtcttaaattatatttacataaatgcaaatatcacttgatataaacaatacaaatctgcatcttacagatgataatttttttagaagaatgatacagaattaactttaaaaataaaacttttctaatatacacttaaatgcaaacatcatttttaaattttcagtgatttttttaatgacataaaacgttaccaatgtgtgcagcctctccatcatgttttaacatactgtatactctatagcagtattacagtcagtatttcatataattttctttagacctaactgttaccatctgactgaggttactctggtatttatctcttcgctgctgaaataataatggattttagaaacaattgtaataatatcattaataaatgtcttactagtaatagtctgtgtttgtagagtatcttttattttcttttttactgaagatgtacatctatgcaaacagtgaccacttggcagggatattatcatgtggattcaagtattatagcatggttaaacacgattaactatatagttccttctaagcctaatattctttaagtttatgatcagatgaacttcccactgtgcaatgaccaaaatgtatgaagataatgtattgtagtgacaagctttttaaaaataataataataagacacttacttaaatg

SEQ ID NO: 89080 - DNA, 473 bp, Homo sapiens
aagttcgacccacgcgtccgcccacgcgtccgcaggatttgtgattttggctttgctgttttatgattagcaaatattgtttgtatagagtgtctgggtgccctaaaaacacatgaaaataggtcaactaaatctcgttttaaagagaaaaccggaagagtgaacaccactctaaaaatagattttggatgtgtttgttttggtgccttgtatatcttaaagtggaggatgttgttcagcccaatctttcatttagaatttatgtctcaaatgagccagtgtatcatgtgggcagactggaaatacatttaaatattttttttcttcgctggttgttcagaacttggtagaattataattatcaggaaaactctctccaaatagctggtcttttagacaagagaagaaaaaagagataacttcttttaaaaggagatgtcaacttacaaagtggtttgtttcagtctccacca

SEQ ID NO: 89081 - DNA, 763 bp, Homo sapiens
ttttttttttttcatatatttaatatttgtatttgaatatattagactagaataaattttcctgccatttgtatatattatatattttatagccactctgtccagttatataacacaaaagacattccataggtaaaccattaaaatggcagtatacatattaataactgaacattaatgagacaataataatcaggtattcatttaatgggagagtctagtatttcctggtagtcctgccttcttaaattcctccagtaaagtttatagccaggcaaggacaaaaacactaatcataatgattacccctccaaaaacatcatagatgctaggaaatatgtgcagcacgagaagctgcaagaccatagctaccacaatctccaaatgttgtactgtgctaaccaaagctggatggaatttgtccaaggcataataaactcctaagaatgctgcagtagaacagacacatatagcaatgagataactccaggtttctccatctaatgggatgatgggttcttgaagaataaacatagtagatattccccaaattgtcccagtccaaccaaaagtaaacagtgcagtccacatgctgatcttctccttgatggatctgtatactatcattgagagagcagtggtcagtccagccatcacagtcatggtgtacccaaaggcttctttccaggcatttaacaaagaattgtcttcatcaacaatgtttgggatcccacgcgtccgcggacgcgtgggtcgacccgga

SEQ ID NO: 89082 - DNA, 1064 bp, Homo sapiens
atggggaagctgcctattaggggaatagatgacttctcatgtgtattaatgaaagcaatgtattgcaggctgggtagctggtagaaatgttgtgggcgtttgtaagtggaagatttacgccattataaccctaatatattcctgcagagtaacaacacagcctatctaatatacaatgatggagtccctaaacctgtgaattacagcagaaagtatggacacaccaaaggtttactgctgtggaacagagttcaagggttctggctgattcattccatccctcagtttcctccaattccggaagaaggctatgattatccacccacagggagacgaaatggacaaagtggcatctgcataactttcaagtacaaccagtatgaggcaatagattctcagctcttggtctgcaaccccaacgtctatagctgctccatcccagccacctttcaccaggagctcattcacatgccccagctgtgcaccagggccagctcatcagagattcctggcaggctcctcaccacacttcagtcggcccagggacaaaaattcctccattttgcaaagtcggattcttttcttgatgacatctttgcagcctggatggctcaacggctgaagacacacttgttaacagaaacctggcagcgaaaaagacaagagcttccttcaaactgctcccttccttaccatgtctacaatataaaagcaattaaattatcacgacactcttatttcagttcttatcaagatcatgccaagtggtgtatttcccaaaagggcaccaaaaatcgctggacatgtattggagacctaaatcggagtccacaccaagccttcagaagtggaggattcatttgtacccagaattggcaaatttaccaagcatttcaaggattagtattatactatgaaagctgtaagtaaacttggtgaaaggacacaggtactatcattgaaaaccttgacaatgggtcttcttccattacaccttctttatattttaaaggcctgtgaatatacttataacctgcatatcacaaaataaaacatttttctct

SEQ ID NO: 89083 - DNA, 382 bp, Homo sapiens
  misc_feature (1)...(382): n = a,t,c or g
aggagtttcacataagtctagtcttaactttggtttggtaactaattaggtctaaatatttatgctcaggttccattggttgtgggttccctgttaccttttggtttggattcctggttagaaaagcagctggatttagagaattgtcagtggttagtgtcaggtcatctctctctagcaggatagcttcatattttaaaattcttgagtcagcgagccacctttctgccttttggttgaggatagttctgacttcgtgaggtgtgctaacaatgagttttcccccagaggttaattttctgctttcctccctgagcaaggctgttgctgccagtggcccccatgctcttgggtgagtacccctatagccactcctttgctn

SEQ ID NO: 89084 - DNA, 1650 bp, Homo sapiens
atgttaacccgtaataatgggagccaaaattcagagaatgaaaatgagccatctgcaagacgttctagtggagaaaatgtggaaaacaacagccaaaggcaagtggaaaacccacgatctgaatcaacatctgcaaggccatctagatcagaacgaaattcaactgaagcgttaacagaggtcccacctaccagaggtcagaggagggcaagaagcaggagcccagaccatcggagaaccagagcaagagctgaaagaagtaggtcacctctgcatccaatgagtgaaattccacgaagatctcatcatagtatctcatctcagacttttgaacatcctttggtaaatgagacggagggaagttctagaacccggcaccatgtgacattgaggcagcaaatatctgggcctgagttgctaagtagaggtctttttgcagcttctggaacaagaaatgcttctcaaggagcaggttcttcagacacagctgccagtggtgaatctacaggatcaggacagagacctccaaccatagtccttgatcttcaagtaagaagagttcgtcctggagaatatcggcagagagatagcatagccagcagaactcggtctaggtctcagacaccaaacaacactgtcacctatgaaagtgaacgaggaggttttaggcgtacattttcacgttctgagcgggcaggtgtgagaacctatgtcagtaccatcagaattcccattcgtagaatcttaaatactggtttaagtgagactacatctgttgcaattcagaccatgttaaggcagataatgacaggttttggtgagttaagctattttatgtacagtgatagcgactcagagcctactggctcagtctcaaatcgaaatatggaaagggcagagtcacggagtggaagaggaggttctggtggtggtagtagttctggttccagttcgagttccagttccagttcgagttccagttccagttcaagttccagttccagtcctagttccagttccggtggtgaaagttcacaaactagctcagatttatttgaaggcagtaatgaaggaagctcatcatcaggctcatcaggtgccaggcgagagggtcgacatagggccccagtcacatttgatgaaagtggctctttgcccttccttagcctggctcagtttttcctcttaaatgaggatgatgatgaccaacctagaggactcaccaaagaacagattgacaacttggcaatgagaagttttggtgaaaatgatgcattaaaaacctgtagtgtttgcattacagaatatacagaaggcaacaaacttcgtaaactaccttgttcccatgagtaccatgtccactgcatcgatcgctggttatctgagaattctacctgtcctatttgtcgcagagcagtcttagcttctggtaacagagaaagtgttgtgtaattaagatctgaactctcagctatgtagctgatatagtgatgggcaaacaggaatcacttgcttttatgtccactttttgagtggtacttaaatgtaaagtaacaacctgaattgagtcattgctttctgaaggaatcattgtcctttctccagtttttgttccagaataaaaggaaatattttaaaagccaaaaaaaa

SEQ ID NO: 89085 - DNA, 397 bp, Homo sapiens
ccgacgccttaagtcccagatcttgcttaagaaatacctcatgaagaggcgctggaagaaaaacttcattgctgtcagcgctgccaaccgcttcaagaagatcagcagctcgggggcactgatggctctgggggtctgagccctgggcgcagctgaagcctggacgcagccacacagtggccggggctgaagccacacagcccagaaggccagaaaaggcagccagatccccagggcagcctcgttaggacaaggctgtgccaggctgggaggctcggggctccccacgcccccatgcagtgaccgcttccccgatgtgagccgcctcggagtgtggcctggatccatcctgctagcacctccccacaccatctggcccaggctggcccccacccac

SEQ ID NO: 89086 - DNA, 3945 bp, Homo sapiens
ttctcttagagccttcacaggacacttaatatcaaacaggtctatcctaaagtatttatacattggccttgtaatgtttttattttctgtggagtggcattgtttaatcatttaccaatgtcttgctgacttggataattcattatcagaagtatgtggtaaaaatattggaaatagatgaatatctgtgcttttcttaatttgggagggtttaggatacagtgagggataagtaaagaaatacgcatatatttgttgtctcttagacaggagagaagagtagagatgatgctttggaagccataaaaggaaatttagatgggttttccagagatgcaaaaatgcaccctactccagcatcgcaccccaagaaaccaggcccttccttggaggagaagttcctagtatcttgtgatataagtacatctgggcaggaacaaattaaattaaatacttctgaagttggccacaaagccctaggcccaggttccagtaagaagtatcccagtttaatggccagtaacggggttgctgtagatggatgtgtaagtggtaccaccactgcagaggcagaaaatacttcagatcaaaacctgtcaattgaagagagtggtgtgggagtatttccctcacaggatcctgctcagcccagaatgcctccttggatttacaatgagagtttggttccagatgcctataagaaaatcttagaaaccacaatgactccaactggaatagatactgccaaactgtatcccattctgatgtcatctgggcttcccagggaaactcttggacagatatgggccttagctaatcgaactacacctggcaaacttacaaaagaagaactttataccgttctagccatgatagcggtaacacagaggggcgttcctgcaatgagtcctgatgctttaaaccagttcccagcagctcctattccaactttaagtggcttttctatgactctgcctacaccggtgagtcagccaactgtgataccttcaggtcctgcgggctccatgcccctcagccttggacagccagtcatgggcattaaccttgttggaccagtgggtggagctgcagcccaggcttctagtggtttcataccaacctaccctgcaaatcaggtagtaaagccagaagaagatgacttccaggattttcaagatgcttctaagtcaggatcccttgatgactcattcagtgatttccaagagttgcctgcttcttcaaaaacaagtaactcccagcatggaaacagtgccccttctttgttgatgccacttcctggaactaaagcattgccttcaatggacaaatatgctgtgtttaaaggaattgcagctgacaagtcctctgaaaatactgttcctcctggagatcctggtgataaatatagtgctaacagagaacttgaacagacagcagagaataaacctttaggagaaagctttgcagaattcagatctgcaggaactgatgatggtttcaccgattttaaaacagccgatagtgtatcaccactagagccaccaacaaaagacaaaacttttccaccatccttcccctcaggaactatacaacagaaacaacaaacacaagtgaaaaaccctctgaacttagcagacctagatatgttttcctcagttaattgcagcagcgagaaaccattgtctttttcagctgtgtttagcacatcaaaatcagtttctacaccacagtcaacaggttctgctgctactatgacagcattggcagcaacaaaaacttctagtttggctgatgattttggagaattcagcctttttggggaatattctggtctagcacctgttggggagcaggatgactttgcagattttatggctttcagtaatagctctatttcatctgagcaaaagccggatgacaaatatgatgcccttaaagaggaagccagtcctgttcctctaaccagcaacgtgggcagcacagtgaagggtggacaaaactcgactgctgcgtctaccaagtacgatgtcttcagacaactttctctggaagggtctggactaggtgttgaagacctgaaagataacactccttcaggaaaaagtgatgatgattttgctgacttccactccagtaaattttcttccataaactcggacaaatccctgggagagaaagcagtggctttcagacacaccaaagaagactctgcatcagtgaagtccttagatctcccttccattggtggcagcagtgttggcaaggaggactctgaagatgcactctctgttcagtttgacatgaaattggctgatgtgggaggagatcttaagcatgtcatgtctgatagctctttggatttaccaacagttagtggccagcatcctcctgctgcagatatagaggacttaaaatatgctgcttttggaagctacagtagcaattttgcagtgagcacacttacaagctatgactggtcagacagggatgatgcaactcagggcagaaaactctctccatttgtcctctcagcaggaagtggatccccctcagccacctcaattcttcaaaagaaagagacttcatttggcagttctgaaaacatcaccatgacatctctctccaaagtaacgacctttgtaagtgaagatgctcttccagagaccaccttcccagctcttgccagttttaaagacacgattcctcagaccagtgagcaaaaggaatatgaaaacagagactataaagatttcacaaaacaggacctgcctacggctgaacggagccaggaggccacgtgtcccagcccagcgtccagtggtgcctctcaagaaaccccgaacgaatgttcggatgactttggagagtttcaaagtgaaaagcccaaaatcagcaaatttgacttcttagtagccacttcacaaagcaaaatgaaatccagtgaagaaatgatcaaaagtgagctggcaacctttgacctttctgttcaaggatcacacaagaggagtttgagccttggtgataaagaaataagccgttcttctccttctccagctttggagcagcctttcagagaccgttccaatactctgaatgagaagcccgccctgcccgtcatccgagacaagtacaaagacctgacgggagaggtggaggaaaatgagagatatgcatatgaatggcagagatgcctggggagtgccctgaatgtcattaagaaggcaaatgataccttaaatggaatcagtagtagttctgtttgcacagaagtaattcagtcagctcaaggcatggaatatttattaggtgttgttgaagtgtacagggtaaccaagcgtgtggagctggggataaaagccactgcagtgtgcagtgagaaactccagcagttgctgaaggacatcgataaagtatggaataacctaatcggcttcatgtcactcgccacactcacaccagatgaaaactcgctggatttttcctcctgtatgttacggcctgggattaaaaatgctcaggagcttgcctgtggagtgtgcctcttgaatgtggactcgaggagccggaaagaagagaagcctgcagaagaacatcctaaaaaagcattcaactcagaaacagacagtttcaagctggcctatggagggcaccagtatcacgccagctgtgccaacttctggatcaactgtgtcgaaccaaagcctcctggcctcgtcctgcctgacctgctctgaacaactcctctgtgaagcattgactttttttttttctgtgacaccccacggggggacagggaccaataaataaaatgcgagcactgcacagttcgcttccctgaatcgatatgaaaaacaccgcaggggacggggcccccgtcatccccatggccagtctgcaggacttcaggtaaaattgtcccacccaaactgcacgtggcaccagaag

SEQ ID NO: 89087 - DNA, 267 bp, Homo sapiens
gcggccgcctactactactactatacggctgcgagaagacgacagaagggatgccaaatctgtcaagatcaagaaaaatagggacaacgtgaagtttaaagttcgatgcagcagatacctttacaccctggtcatcactgacaaagagaaggcagagaaactgaagcagtccctgccccccggtttggcagtgaaggaactgaaatgaaccacacacactgattggaactgtattatattaaaatactaaaaatcctaaaaaaaaaa

SEQ ID NO: 89088 - DNA, 865 bp, Homo sapiens
cgtccgctctggtcgtggcagaggtattagaggcagagggatcataatagctcccacagctccttcaaggggccgtgggggtgccattcctcctcccccaccacctggacgaggtgttctcacccctcggggaagcactgtaacccgtggagcgcttccagtgccacctgtagcaagaggtgtccctacccctcgagcccggggggcaccaacagtgccaggatacagggcacctcctcctccagcccatgaagcttatgaagaatatggttatgatgatggctacgggggtgaatatgatgaccagacctatgagacttatgataacagctatgcgacccaaacacaaagtgtgcctgaatactatgactacggtcatggagtaagtgaggatgcctatgacagctacgcaccagaagaatgggccacaacccgctctagcttgaaggcaccaccgcagaggtcagccagagggggatacagggaacacccctatggtagatattgaaggtccttcccacctgtgacctcacctcaaagacaattcatagcctgtggtctccacataaacagcaacaagacaagtaatagtcctttttttgtttgtttgtttctattctagggataactgctcatgattactcccatatatttctagtatttccctctgtactgttggcgtgacattgacactagtattattttacaaaacagactgaaaaagacattagcaagcatagtctataaacctttcagtaggatgatattctcttggttgtttttcattgttgtgtgtaatcttttttttttctttttcttttttttttttttgaggaaaagcatgaatttgttaacagattttgag

SEQ ID NO: 89089 - DNA, 413 bp, Homo sapiens
  misc_feature (1)...(413): n = a,t,c or g
cccgaatgcctgaaagtactttactaattatctgtgaaaatggctatattcttgaagctccacttccaaccataaagcaagaagaggatgatcatgatgtagtctcctatgaaatcaaagacatgtgcataaaatgtttccatttttcaagtgtcaaatctaagattctgagattaatagaaattgaaaagagggagagacaaagggagttgaaggagaaaataagggaagaaaggaggaacaagctagcagcagagatgggagaagatggagaaaaagaatttcaggaggaggaagaggagaaagaggaggaggaggaggaagaagagccattacctgaaatatttattccgtcaaccccctctcccatcctctgtggattttactcagagccagggaagttctgggttttn

SEQ ID NO: 89090 - DNA, 2535 bp, Homo sapiens; identical to SEQ ID NO: 87471

SEQ ID NO: 89091 - DNA, 945 bp, Homo sapiens
aaccaagaggcaagaaacctgggattggttttcatggttgtttctaccatcagagtcaaagaatcatcttcacacaacaacacaaatggctggtaatgagttattattatctcatagcgtatgttttcttgacagccttgaataattttgattgacctctgggatgttattaaagcctaacgttccttctattctcacaaattttcgttatgacttcagaaggatcattaactctggtatctgtttgtttgcttgtatggcaccaataagcagatttcttctttctaatctatggattagtatagaccaggagaaggctaatacagagactatgaaacgggaataagtttttttaacgatatggcaaaattgtgactctgaaagatcattcatgtatattctaaaattaccacagtcataaaaagtcttggactttcatgaggaaatagcatagctagatatgaaaaaatatagaaaatcttcatcaatggaactattcttggggtagacactaatcatatgaaaagacaaatgctcattccctaagatagcctgaatctcatttaaaatgtagaaaacccctttttagtaaagagacatcttctacagtaaccactgagaagaaggggaagtttttcatctcctttttttattcaaaaagaaaaagaatttctcaatttctgaaccacagttcactttagttaacccctttgattgcctaataatgccaaaaatgatttctctgttaattggcttcacatttttgctctatgctgaagtagtattgggaactgcagtgtagcttccatctctgtttggaggtacactgatctgatctgatactagagaagataaaaaatgaattagcaaattgtgaacacaatgaaatgactgacgtaggtgtagattccaacatttttctgaaggtgtcttgaccaaaaaaaa

SEQ ID NO: 89092 - DNA, 627 bp, Homo sapiens
  misc_feature (1)...(627): n = a,t,c or g
cgtttatgtgcatgtgtgtgcatgagcacatgtgtgtgtatgtgcgcacatggttgtgtgtgcatgcaagggcccaacccaaagctactgacttccccctccagccctcatcacctcctggaaggtcctaaccagccaggcctaagttcacacccaaaggatttgtttttttcttcccttttctttccgtgcaaatttcaattaatacagtggtttctaaagcctgtcatttttaagaggctgtagtttttgtttagtctgttctgggtcccaaaccagcaacttggagaagttggtgggcagtgttggaacaaggcctgggagacagatgcaggaagagtggagggccaggtggagggcaggcgggcggggcctctgtgggcagctcccgcccacacagggcaaaggggagaaaacttccccatcctgcaactgacactgctgatttctgcctcctcaagggctgtgggcagccttctgagcctgttgtgtagggagactggggctctaaaaggagagcagaggagcgggggngggatgacttaccccacctttgctttggagaaggtagaagcgcagacctggtgtcctggggggaggtggccgtttccccggcagcttcaaggc

SEQ ID NO: 89093 - DNA, 423 bp, Homo sapiens
tgacccacgcgaccggtgcttttgaggtctttgtgtacaggtttttgtgtgtatggatgttttcttggaagctaacttttcgaaccagacatctagtaccgtttttgtggctttctggacgttcaactctttgaacagttgaactgtgggaatcttgcccatgtcctgcctcaccttcctccagggaactccggccgaatcccgggagaagaaccgcgagtgcattctgctggatttcttcgatgaccatgacatgtggcacttcctctctgctactgctctgtgtttctcattcttgagtttgttaactttggatgatgaccttgatgtggttcggagagaccagatccctgtcttctgaacctccaacattaagagaggggagggagcgaacaatcttggtgctggttcacaaaaattacc

SEQ ID NO: 89094 - DNA, 642 bp, Homo sapiens
gatttatcttgagcaccctctgctgcttgagccaggtcatcgcaagtttgacatccgaagctgggtcttggtggatcatcagtataatatctacctctatagagagggtgtgcttcggactgcttcagaaccatatcatgttgataatttccaagacaaaacctgccatttgaccaatcactgcattcaaaaagagtattcaaagaactacgggaagtatgaagaaggaaatgaaatgttcttcaaggagttcaatcagtacctaacaagtgctttgaacattaccctagaaagtagtatcttactacaaatcaaacatataataaggaactgcctcctgagcgtggagcctgccattagcaccaagcacctcccttaccagagcttccagctcttcggctttgacttcatggtcgacgaggagctgaaggtgtggctcattgaggtcaacggtgcccctgcatgtgctcagaagctctatgcagaactgtgccaaggcatcgtggacatagccatttccagtgtcttcccacccccagatgtggagcaacctcagacccagccagctgccttcatcaagctgtgacagagggcactccctgctgccttggaaaaagcacggtgtactgctccagggaatgg

SEQ ID NO: 89095 - DNA, 401 bp, Homo sapiens
  misc_feature (1)...(401): n = a,t,c or g
ctggaagagttccttatgatgactttcctctgtgaaggaagagaggaaatggccatttgggagtgggtgaaaaagagtcaggatgatggctgaggaaacaggattgtcagacacctcagtggacccagttagaggcatcagttggcccctcaggacacagcaagcagggtgaagcatggggaagggaggaagttggattaatctgtggttggggttttgagggtgtgtcaggaagttaagatattgacaagagtatgaaggaattttagctgatttgccaggagagagaacaagaagcggctgagcgggtaagacggggccaaggacctggggaagaaacttgaggtccaaggacaggagggctggaaagtaacgngggtttgtggatgaacagaaatcct

SEQ ID NO: 89096 - DNA, 119 bp, Homo sapiens
ttttttgttagatttttaataagaacatggaaatcccaatcagcccttcaacaaaattaaaatacagaaagtgaaattaaaagtattctacattaaatgacttttatttaaaaaaaaaa

SEQ ID NO: 89097 - DNA, 295 bp, Homo sapiens
  misc_feature (1)...(295): n = a,t,c or g
nnnngnnngcnnaccnngacntctacgccgnggngagctaccagctgctgggngcccagagnggcctctttgacatcaacagcagcaccggtgtggtgaccgtgaggtcaggtgtcatatttgaccgggaggcattctcgccacccatcctggagctgctgctgctggctgaggacatcgggctgctcaacagcacggcccacctgctcatcaccatcctggatgacaatgacaaccggcccacctttagccctgccaccctcactgtccatctgctagagaactgcccgcctgg

SEQ ID NO: 89098 - DNA, 756 bp, Homo sapiens
tttcgtgtgtattggctattgtatttacaacacagttctaggggtttaagcccagttgaacttggtagtgtttattagtgaaaggtaccttctctggtggtcagtgaacccttctggaattgtatgctaaattgtgagtatgctttagaatctcaaaggcaagaagaatcccgtaccttgtatcagtcagggtatgaactctctgctaaattaggtgtagttacttcagcagactggatgtgcctttttattgttttccctgtagcctgtctataatgttttgtccttaatgtctgtcatcaagattattatgtatcatttctgaaatcttaaatgatgatgtcactagaatttgcatggtcaattttctacattttcatgctttctagaacgtttatgagaaaaatgctaagacttctcctatttttcctccttgttgaggttttcttacaataatttttctttctttctttctttctttcttttttgacctcccatgggggaaaaagggcagtttgttggccccccttcccaagggctcagtgaggggggggtaaccaaagggaaaaaaaaattgggcctaaggaccgggaaaaggttcccccgcccccccccgtttttttgaaagggatttatattgcccccgccgggtcttgttttaattgggaaacccccgggccccccgcgattttggtggagattttttgcctccccgcccccaaacgatgggttttctaacccccccccccccccccg

SEQ ID NO: 89099 - DNA, 769 bp, Homo sapiens
ccgtctcgacgatttcgtgggaacctgtgatgctggaaaaggcgatggtgctggtcggctgtgacacgtgtgtgtatcgttgaggtaggaggtggcatgggtagagagggtaagaggatgatacacgaagagaattgcaacagtggcaagggaagtggcgttttcagtgtctctgccgcaatgttatttgcacgtgccgcctctcccatgacattccttccagccctttccacctcccttcaatctgcctttcaccaagaggagtcatggtatagattggttgagttttggataagcaggcccgagggataggcgtgaggtttgctttaaaaagatttatgaataagggacgcagatggagatctgtgtggatgcgaaaggtgtctgatagagatttttagagctgtactttgataaccgggccttttggtcttctagaaatgaggttgcagttactcttgtgatctgatgtcccatcggccatttctcttcatcctctgttcgacatcctctgatacttacaggctttagagtaaagatggtttttgtagtaaatgtggaaggttggttaaatgtaaaaaagtaaaggcggcacaggacccatctgccaatagttggaaatttaagtaagcccccaccccccccccctatttggtttggataggctttgattttatttgaggaagagttgaaaagggtaggggggggagagggggggggggggcccgccccccccccccgtttttttgggcggccccccccccccctt

SEQ ID NO: 89100 - DNA, 1465 bp, Homo sapiens
atgaccacaggcaccgagatcacagtcatgggcgaggtgagaggcatcggtccctggatcggcgggagcgaggccgcagtcccgacaggagaagacaagacagccggtacagatctgattatgaccgagggagaacaccatctcgccaccgcagctacgaacggagcagagagcgagaacgggagagacacaggcatcgagacaaccgaagatcaccatctctggaaaggtcctacaaaaaagagtataagagatctggaagtcgctccccaagtagggagaagaagagagctcgttgggaggaagaaaaagaccgttggagtgacaaccagagttctggcaaagacaagaactatacctcaatcaaggaaaaagagcccgaggagaccatgcctgacaagaatgaggaggaagaagaagaacttcttaagcctgtgtgggttcgatgcactcattcagaaaactactactccagtgaccccatggatcaggtgggagattctacagtggttggaacgagtaggcttcgtgacttatatgacaaatttgaggaggagttggggagcaggcaagaaaaggccaaagctgctcggcctccgtgggaacctccaaagacgaagctcgatgaagatttagagagttccagtgaatccgagtgtgagtctgatgaggacagcacctgttctagcagctcagactctgaagtttttgacgttattgcagaaatcaaacgcaaaaaggcccaccctgaccgacttcatgatgaactttggtacaacgatccaggccagatgaatgatggaccactctgcaaatgcagcgcaaaggcaagacgcacaggaattaggcacagcatttatcctggagaagaggccatcaagccctgtcgtcctatgaccaacaatgctggcagacttttccactaccggatcacagtctccccgcctacgaactttttaactgacaggccaactgttatagaatacgatgatcacgagtatatctttgaaggattttctatgtttgcacatgcccccctgaccaatattccactgtgtaaagtaattagattcaacatagactacacgattcatttcattgaagagatgatgccggagaatttttgtgtgaaagggcttgaactcttttcactgttcctattcagagatattttggaattatatgactggaatcttaaaggtcctttgtttgaagacagccctccctgctgcccaagatttcatttcatgccacgttttgtaagatttcttccagatggaggaaaggaagtgctgtccatgcaccagattctcctgtacttgttaaggtgcagcaaagccctggtgcctgaggaggagattgccaatatgcttcagtgggaggagctggagtggcagaaatatgcagaagaatgcaaaggcatgattgttaccaaccctgggacgaaaccaagctctgtccgtat

SEQ ID NO: 89101 - DNA, 1048 bp, Homo sapiens
atgaaacttgaacatatgaagtttcttcttgtggatgagtcaggaaagtggattctagagatggaatctactcctggtgaagatgctatgaacattgttgaaataacaaatgacttagaatattccatcttggttgataaaacagtggaagggtttgaaaatgttgaccccaattttgaaagaagttctactatggtgttttatcaagcagtcgtgtattcttatttgtctttcaatcaggtatttttgatcactgtctggaattttgaactatatatgatccccttggcattgttgctgatctttgtctacaatttcatcagacctgtgaaaggcaaggtcagcagcatccaggacagccaggagagcacagacatagatgacgaggaggatgaagatgacaaggaatctgagaaaaaggggttgattgaaagaatctatatggtacaggatattgtttcaactgttcaaaacgtcttggaggaaatagcttcttttggagaaaggattaagaacacatttagctggacggtccccttcctttcatctctggcctgtttgattctggcagcagccaccatcattttgtatttcattccactgcggtacatcattttaatctggggcataaataaatttactaagaagcttcgaaatccctattccatcgacaataatgagctactagacttcctctctagggtaccgtctgatgttcaaaaggtgcagtatgcagaattgaaactctgcagcagccacagccccctgcggaagaagcgcagcgctctctagggcacacaccgactttggacagcagcacccaatattgtgtttggttgagtagaccaatgttatggctgtttcagtggtacccaaggtgtccttctgaaatgcatgccctgtggcaccctctgtatacttcctcctccttcacgtgcacagacatacacacatgtgcacacaccctcatgcatgggtgtcctagttgcgtagagggtcagcccagcgaaaagcaacaaccccaagactgtgaaagactaacatccat

SEQ ID NO: 89102 - DNA, 1616 bp, Homo sapiens
tttttttttaacttggcaaagaggcttttactggaagttcaggaaatacaaatgcaaaggcaaatggccaagccagcagtacgtagttggtgctaatggacgaagccataaggtagccatgatgtggcaggggagggagggaggctgaggctggtgggctggaagctgcctgtgacctcctcccggccccactgtgtccctgtccccccaggtgctgcggctgctcatcacggcctgggagagaagactcatcttcactatcggcacgtccaacaccacgggcgagtcggacaccgtggtgtggaacgagatccaccacaagaccgagtttggatccaacctcacgggccacggctacccggacgctagctacctagacaacgtgctggctgagctcacagcccagggcgtatccgaggctgcagccaaggcttgaggcccaaggctgcccaccttccctcctgctttgcccctggtccggcaaatgcctccttcgccaggtgtgtcctggtagcccaggttcagggctggggaggagcctgcggaaggggccgcagccattcaggggacctgcctggtggcagctgggatgaagagagatggcatgtcaggctggccccgaatcatagctccctgagagggccaagcagagagtactggaaacctccctaccaaaaagacagagacccgccccctcacacacaaacacacatgtcctgttgaactcatgcacgcacacccacgtgcctgtacttgcccccaggctggaagagaagagacagaaagaccccatgacccccccatgtggatccccatctgtgtctcagttgcatctgtacagccttgtctgcaaactggaggatgcggggcaagcccttaggggcctgccagggctcggggggcaaagagggactcgggaaactcagtgtaccccagatgcctcacccattccgtgtcatcacccatgtctgccacccactgattgggcaattgtgggcccatggggtggaagcccccagatgactgagcagttctacaaaaaatggccagcacgagcggggactagagggtcctgattttgtgtctgtgcctcttcatctctctggactctgatctccttctcccttcccatctccaggccttctgtctgtcccagataaaggcgctgttctcccatcctccctaccccatcctctccaccaaatcgctcccaattttgagagccaaaggctggcgcttctgacttcaggagcgaaaggaggaggcctagtttgggccgatgtattttaaagcagagtggacagcagagagtcaatttccctttcgttgggagtgggcagtggggtggctaattgtcttcggccaacccaggggcctgttgcccaggcaactcaccagctccgcctctgctgattggctgccacggtgggagtcagccaagatttaaagggatgccagcgattgctcttttcaaaacctaccagtcccactgtgggtggagaaataaatggtctttctcctcctcgcctggtcttttcctgccaagagaggggtgggtagctctgttcatgggggctgcagtcagccccgttggggagtgagggctttgtgcggca

SEQ ID NO: 89103 - DNA, 495 bp, Homo sapiens
  misc_feature (1)...(495): n = a,t,c or g
ttctactcggccggaattcccgggtcgccatttcgtctctgatgagatgacatctgagcggagaccagaaggctgggaggaatgtagtcacacgattctaggaacagcatggcagccagtgcagctggaacagaatgagcaggggagagagagaggagatgagattgaatcatatagggcctgttttggaggaggaaaagggcttgtacataaatgtaaaacagtaaaagaaacatgggaggaagaccaagcgtagaactatccagcctcaggactctgagctaaactaagcatgaaaaagaaggtagaaagaaccacgtggaattgtaccagtctgagatgaccaccgtcacattctgacatccttccttcactttctcttccatgagtgcattcattatgtaattgtgatcatactgttgtgacaatgttgcatcctgttttatcactttagatttatcaaaatcattgtctcttgttntccaactctttgan

SEQ ID NO: 89104 - DNA, 583 bp, Homo sapiens
cttaggtaaataaaattctttattaaaaactaagaggtcattctgtttaaaactttcaaaataattcccggaaaacagatatattttttcaaatttaacattaaagggcccgggttctagctatagacctttatatgtgaagcagctcttttttttttttttctgagaccgagtctcactctgtcgcccagggtggagtgcagtggcccaatctcagctcactgcaacctccgcctcctgggttcaggcaattctcctgcctgagccccccaagtagctgggattacaggcgcgtgacaccacacccggctaatttttttgtatttttagttaagatggggtttcgccatgtttgccaggctggtctcgaactcctgacctcaagtaacccacccgcctcggcctcccaaagtgctgggattacagacgtgagccatggcgcccggccaatgaagcagctctttaaagaaataagacatgaaaataggtctgtcctggtatactacacataattgaaatgagtaacacctggaagaccaatattgttacgctatgttttgttaggatctttaaaaaaaaaaaa

SEQ ID NO: 89105 - DNA, 447 bp, Homo sapiens
  misc_feature (1)...(447): n = a,t,c or g
tttcgtggagttgtccagggacagagacgtatatgtgactacccatactcccagaaacgccagggatgagggcgctacaggcctcaggtaccaacgtgcccccagctctgctgccgccatgctaggatgtggggccagggcatgagaatacttttcagcaaatctgtgagcccttggccctggaagggcttgcccaagcctctacccagcatctggatacagttggaactgggtccagaactgagtccagctattcccactgtaaccagaggatgccaagcgctgacacagtgtgtgcagacagtcccaagtggccccagacagggatcctggggctggtaagggcctgggggaaggcagggtgactcaagttgtgtgcaccttctcatggtcaccctcccacatgcccttggngcaagtggctttcctgaaagtctctcggatgcg

SEQ ID NO: 89106 - DNA, 890 bp, Homo sapiens
tttcgtgcaagtggcagtcccctgacacccagggaccatcacctcacctgcctcgggctggcggctgggctgtgccccggggttgtgaccctcaaaccttcctgcagatccatggccccagactggcccacggcaccaccactctggccttccgcttccgtcatggagtcattgctgcagctgacacgcgttcctcctgtggcagctatgtggcgtgtccagcctcatgcaaggtcatccctgtgcaccagcacctcctgggtaccacctctggcacctccgccgactgtgctacctggtatcgggtattacagcgggagctgcggcttcgggaactgagggagggtcagctgcccagtgtggccagtgctgccaagctcttgtcagccatgatgtctcaataccggggactggatctctgtgtggccactgccctctgcggctgggaccgctctggccctgagctcttctacgtctatagcgacggcacccgcctgcagggggacatcttctctgtgggctctggatctccctatgcctacggcgtgctagaccgtggctatcgctacgacatgagcacccaggaagcctacgccctggctcgctgcgccgtggcccacgccacccaccgtgatgcctattcagggggctctgtagaccttttccacgtgcgggagagtggatgggagcatgtgtcacgcagtgatgcctgtgtgctgtacgtggagttacagaagctcctggagccggagccagaggaggatgccagccatgcccatcctgagcctgccactgcccacagagctgcagaagatagagagctctctgtggggccaggggaggtgacaccaggagactccaggatgccagcagggactgagacggtgtga

SEQ ID NO: 89107 - DNA, 447 bp, Homo sapiens
ctctcgaattcccgggtcgacgatttcgttcagaatccagtcgtctgatgtaacttgccagttccctggtgtgagaaaattctgatacaagaatagcacttttgttacttggaagccagtctgtgatgctgggggatccgtaatatacagggactacccccagtttcagtggcctccagaacttctcagtgatgtagtcatcacaaactgcattctcaaaagctaggataaacttatactgtgcaatgatcctataaaagccatcggcatccatagaggctggatttttcagctgctgagggaggtctttgtttcgtaaacattcaccataggaatcgacctcgatgtaagtcatcagctcgcgaacatagctgtccctgtctgatggtgggtcacagtctgactgtacatacaccagcggagcaagtctttttctaagcttgtttt

SEQ ID NO: 89108 - DNA, 1100 bp, Homo sapiens
tttttaaactcaaaaactaaaagggtttactatttcaacatattacttcctccagaactctcataacatgtacataaataagaatgtttctcatttcttaatttattaacaatgtatacatttgaaaaaatatatacaatatttcaaaacaagcccttcaagactatatttaagcaatgacatccaaggaagcagaactcaggtaccatgtaatatttggaaaatatggtaacttgaagattaagatttctcttccttgctggttactctgaagtctccaatatacaaaggttgctcctaacgtggttttcttattgagccaagcatcttgatgggtcaatcccagtttcattttctccagtactgggcaaacttgtgaatctgttccaccactgcagcaaaaagagcatggacactctcatcaatcagactctgcatgtaatgcacagcctcttcatccgacaggtctaagcggaatttatcctgaacctttttcacagttttatctggttcaagtgcaatatctggaatgtttgcatcaaccatcaaggaaaacaagttcaaaatcagattagaataccttcgcaggtggaggaaagccgtgtaacactgtttacggaactcttggtactgctcactctgtgtgccccccattccttctaccatttctttattcagcttcattggtggaggaagaggctttggatcccgacccaaaatatatccaaagtctatgtggaagagtttgcctgtttttgttagcaaaaggttatccaggtgcctgtctccaactccaagtatataggtgatcacgcaatatccagcacagcttttaacgtaagtgtccatgacctcagcactaatcccatttggcccattctcacttggtgcatattttctaaaaaagttctgaatgcttccctctgtatcaagaacttcagccacaggaactgactggataaactgcatgaagccatgttttgtactggtggctaacaccttataaggtgtcaatttcaagtccagattttctttccgtaacagcttgtccatgagtgaaatgatttgaagaataagttgatcttgacgtaaatcatctc

SEQ ID NO: 89109 - DNA, 629 bp, Homo sapiens
tttcgtcggatggcgtggactgaaagttgcacggcggcgtgtgcgtttcctagttgtctggtgctgctatataggggacgtggggtccccacagacctgcaggttccggcccctcttttctcaacccagagcaaattgaaacgtccgggtgagagtccgatttccaaagactcatgttacgtgaggaagccaccaagaagagcaaagaaaaggagccagggatggctcttcctcagggacgcttgactttcagggatgtggctatagatttctctttggaggagtggaaatgcctgaaccctgcacagagggctttatacagggaagtgatgttggagaactacaggaacctggagtttgtgggtgaggaaaatatccctccagacatgaggaatctgcccttgtctatcttggctcttcctggttttgtattctcttttgtgatgttgccccatacatgcttttcatgtacatgtcattgttttctacagtgatgaccctcatatttgtcatggacagcttcttagagactcccttatggagtgggtttacataaaaccagaaaattcatgaagaacactttgactaataagattgaacatcatcctgctctaggcagagatgcccct

SEQ ID NO: 89110 - DNA, 6152 bp, Homo sapiens; identical to SEQ ID NO: 64522

SEQ ID NO: 89111 - DNA, 404 bp, Homo sapiens
  misc_feature (1)...(404): n = a,t,c or g
tttcgtctctgctattcctcaccctcctcactcagggcacagggtcctgggcccagtctgccctgactcagcctgcctccgtgtctgggtctcctggacagtcgatcaccatgtcctgcactgcagtcggcactgacttttctgcttataactctgtctcctggtaccgacagttcccaggcaaagccccccaactcttactttatgatttcactcatcggccctcagggatttctcctcgcttctctggctccaggtctggcaacacggcctccctgaccatctctggactccagactgacgacgaggctgactattactgcagctcatatacacccggcaggtctgaagtgttcggcggggggaccaagctgaccgtcctaggtcagcccaaggctgccccn

SEQ ID NO: 89112 - DNA, 652 bp, Homo sapiens
tttcgttgtgggaccacgacagtctgtggggtgagtggctctgagcgacaccatgagcttagcagtgagtggagacttttcaccttctcttataagagaccatggccctgtgctgttgaaagtagacactggtacagatagaaataaagcagtggtggcctctcttatcagcctgtggtccttaaacagtgtgctcccataggattcttgtaagtggactaatttaattcaggggcagggataaggctgagaactgcctactgaggaaagctactacctgtgtgtgtttttaatggacattatcatgtatcaggggaacttaatgttaagcgtctcccatgagttggcactgtggtagccaccttctacatgttatcaatcctcccaacacccatttattccacagtgaatagagtgagtgctcttgagggcaaaaccctgtgctaaacgctggagataaaagagtaaacaggacacctgccctctgggtgtgtccaggcacaggacacttagaccagtaaaccagtaattacagcgtgtgatgtgcgctaagatgagggactcagtgtactcgagcacctgtcctgttgtaactccatgatgtgggtattattggccccattttacaggtaaggagactggggctcaggga

SEQ ID NO: 89113 - DNA, 4196 bp, Homo sapiens
gaattcccgggtcgacgatttcgtgtctgtttgagttgggtgaagaaggcgggaagttaatcctcttccaatcagctccccatctcgccctctggcggctccggaccacaggccgagttactctgattaccgccatgctccaagacccgcactgacagtccccacgtgagggaccgcggtgggagtcctaaatgggggaggaggggacgggcggcactgtgcatctgctgtgcctcgcggcctccagcggggtccccctattctgcaggagcagtcgcggcggcgcccccgcccgtcagcagctcccgttctctgtcatcggttccctcaatggagtccacatgtttgggcagaatctggaggtgcagctgagctctgcgaggaccgagaacacgactgtggtccttcttgtgggacttgaagaactgaccaatatccgcaacgtggagagactgaagaaggacttgagggccagttattgcctcatcgacagcttcctgggggactcggagctcatcggggacctgacccagtgtgtggactgcgtgattcctccagaggggtccctcttgcaggaagccctctccgggttcgctgaggccgcgggcacgaccttcgtcagtctggtggtgtccggccgggtggtggcagcaacagagggttggtggcggctggggacgcccgaggccgtgctgctcccctggctggtggggtccctgccgccgcagaccgctcgcgactacccggtgtacctgccgcacgggagccccacggtcccacaccggctcctgaccctgactctgctgccgagcctggagctgtgtctactctgcgggccgagcccacccctcagccagttgtatccacagcttctggagcgctggtggcagccactgctggacccgttgcgggcctgtctgccgttgggaccccgggcgctgcccagtggcttcccccttcacacagacatcctcgggctgctgctcctccacctggaactgaagcgctgcctcttcaccgtggagcccttgggggataaagagccttcaccagaacagcgccggcgcctcctccgaaacttctataccctggtcacctccacgcacttcccaccagagccagggccaccagagaagacagaagatgaggtctaccaggcccagctgcccagagcttgctacctggtgttggggactgaggaaccaggcacaggagtgcgtctggtggccttgcagctggggcttcggcggctgctgctgctgctgtctccccagagtcccacccatgggctgcgaagcctggccacccacactctgcatgccctcaccccacttctttgactacctagcagtgggtgatggacacagacatggggctgttagcgtctctctgtttattcgctcacaataatacacagcccctggatggggaggggggtaggaggggctacaacaagggtggggtgggaggggatggagacatccacttccctggcccctctcccctctgtgcttgggggggaaagggagggagggggactccccctaaccccccagaatgtaaacagcagcagatgaacaaaaataaaaatacaaaaggccggaggaaagtcccaggcatcccccaaaccctggtgtcttctctgtcaccagtggaggtcccccatccaccaaaactgcctcagtccaaggggctgcccagtgccggccacatcccccggggcagagtccagggctcagaactgctgtgccagcagctcacacaggtgacgggagacgggctccttgctggtgcgcagggtcagccggtacatctgggcctgggcattgggctccagccgaagcagacagcccacctgcagggctttagtctggatgatccccgcccccacgaagttctcagggttggggtccacattgtccaggagagcagagccaaaccccagaagcttggccttagtaacttctgcgtccatggggtggttggctttgaagattttctgcgcctcctgttgagggaggctcagctgcttccagcgctggaagaaatcctgggccgccatctcggtgggctggaagaacttgttgatggtcactgggagcttcagggtgagggcctggggggcgccaccgtaccggaagcgcacggacagcagcgggggcgtcaggaagtcccgcaggcactcgatattgagcacctgctgcacctgcgcgccgccgtccacctgcgccgccacgcgcttggtctgcacagccagatgagtctggaggtctcccgggtgaaccacagtgggtgagaaattctggaactgcaccgaggtcttgttgccatagaagagatacatgcggcccaggttctgtcggaactctgacttgactccgatctgcagcagctggttctcgaacaggaccccgttgttcttacacacaaacttattcagcaactcatcggcttccggaatgggagggccgatgtcctcaggacctgggtcagcagctggagctgggtcagccagcaaagccatggggctctcgggggcaggcggctccagctcgctgaggaaggcctcctcgggggtgggccccaggctgggctgggcggccgggccatcgaagacgtccaccagaaggttccctgctcctgcagaagccgggggtgctgccgggggaggggctgcccgcagccccaggaggtcggcggagggcgagggcgtcgacacagtgctgggggtgggctccatgcccccgttgatgtcgttgctgctggggtccctccggccatcgtccagggcgctgccggcccctggccccttcttgcgtttcagcttggccaggatggacgactcgcgctcggggaagggcggcatctcctccagcaccgtggccaggacgtcggtgctggccactgagctgagggtgaggtactccacggctcgctgctgcagctccacgtcagcattgcgcagctgggagccggcccgcaggacgccctggatggtggccttggtctcggggaagaggttgatgaacttgatgtaggtggacagcagcagcgcccgcgtggccacgctgcacagatggaacttggagtggagcagggagaactgcactggggggctggagcgggggtccccagcaatcaggttcccaaactccccaaggatgtagccgccaaccttcaccatgttctcgtgacaggcaggggcctggagcgcctcaaagacggtcttggcggcatagccctggacgtcatcacggttggtgacgatctgtagcacacggtaccacacctcctcactcacgtagtcgcccgcaatgcggatgaggttgaggatggtgtccacgtaccagctgtagtccacggcgtacttctcggccaggatggccaccttcaggacgatctcctcgcggatggcgtagtctgccgtctccaggtaccgcagcatctccgacacgatctgcttggcattgctccggtcacacatggcgtagaggaggtcagccgcccgctgccgcacgctgacgtcccgctccgtcttgagggcattgatgacggtgtcaatgtgcgtcttgacggcttcatgggagaactcggagctggccagcgtgcacatgctctccagggccaggtagcgcaggttggtctcccggtgctgcaggaactggcccagctggttgcaggcccgaaccaggaggttgggctcactgtcatagtggatgatgaggctgatggtctcgaagaggatggcgttcttggcgttggaatgctgcaccttcttggatttggggggctcctgggccttgttgagcacagtctccagacattccaccagccgccccttcacagccgcatcctctggaggcgggtagcactgcagcagccgcaggagcttcaccgagagccagggtgctgggacgaagtagtaggtgtagtcctggaggtcggtggaggcagaggagacgatccggctcaggcgcgacacagccagagagacgcacgtcttgaagtcatctgggttcttcttgcagagacaggtgatgaggctgacggcggccgtgaccacacccatgtgctggtcattgagcaggtgtaccacacgcgccgtccactcgcccatgggcaccaggtcaggcgaggccttgtacagtcgaaggaggcacagggccgcactctgcttgacactgtccatgctgtcc

SEQ ID NO: 89114 - DNA, 451 bp, Homo sapiens
  misc_feature (1)...(451): n = a,t,c or g
tttcgtaccagaatgggggtgtttagataagtgacacttagttggggccccaggggaggggtggtcggtgctcctttttctttaaagctcttttggccagctgcccctctgccccgggaccccttcccctcttcttttctctaattcagggactttggcttgagcccctctcgccctcctggtgagggtgctctgttggtctgcacttgggtgagctgtcctcctccccctccctgtggctgccgcccactcctcaggggagagagggagagaggaggtggtcctcccatgggagcaggaggtggggtgggacagagcagaccagagggtgctgggctcagggctgcatgtcggcagggatggatgggtggacacagatgcccccggaagccatggggattggggcagggggtggggggagggtgccnntcttnctgcgctttcactattg

SEQ ID NO: 89115 - DNA, 482 bp, Homo sapiens
atgggctgcaggctcctctgctgtgtggtcttctgcctcctccaagcaggtcccttggacacagctgtttcccagactccaaaatacctggtcacacagatgggaaacgacaagtccattaaatgtgaacaaaatctgggccatgatactatgtattggtataaacaggactctaagaaatttctgaagataatgtttagctacaataataaggagctcattataaatgaaacagttccaaatcgcttctcacctaaatctccagacaaagctcacttaaatcttcacatcaattccctggagcttggtgactctgctgtgtatttctgtgccagcagccaagacacagccctgcaaagtcactgcatccctgtgcacaaacctcccggctcagccaggaagctgcagggcagcgtgtgcacctgcacccagggctccagtctccattccctgatggcctctgatggagttccagtctgtag

SEQ ID NO: 89116 - DNA, 389 bp, Homo sapiens
accgctccggaattcctgggtcgacgatttcgtaatgttagtaatatgaacggtggactcagtacaaaacggtggaagcagtacaaatataaaagggggtagctgtgattatattcctatctgacaattactgagtgcttaccatctgacagcaattgtgttaaatgctatttatgtataatctaacttaattctcacaagtctgtaaaataagtaccctattccacctgtgaggaaactgtggcttagagatgttaagtcatttaccaaaggtcaaaattgtatttgaatctgggtctttaagactccaaagcctatggaattggttaattccactatattagcatgaaagttattttccaaacagaagacaaggaattctgaaaaag

SEQ ID NO: 89117 - DNA, 1824 bp, Homo sapiens
atgaatagcttcttcggaaccccagcggccagctggtgcctcctggaaagtgacgtctcatctgcaccggacaaggaggcggggagggagcgcagagcactcagcgtccagcagcgcggcgggccagcctggagcggaagcctggagtggagcaggcagtccgcgggggacagacgtcggctgggattgagccggcagactgcgaaaagtagctggagccggagcagggacagaacctgttgctgcagacgggcttggtggattctggttcctgccgccgacagggctcgccgggagaggttcatcatgaatgagaaatgggacacaaactcttcagaaaactggcatcccatctggaatgtcaatgacacaaagcatcatctgtactcagatattaatattacctatgtgaactactatcttcaccagcctcaagtggcagcaatcttcattatttcctactttctgatcttctttttgtgcatgatgggaaatactgtggtttgctttattgtaatgaggaacaaacatatgcacacagtcactaatctcttcatcttaaacctggccataagtgatttactagttggcatattctgcatgcctataacactgctggacaatattatagcaggatggccatttggaaacacgatgtgcaagatcagtggattggtccagggaatatctgtcgcagcttcagtctttacgttagttgcaattgctgtagataggttccagtgtgtggtctacccttttaaaccaaagctcactatcaagacagcgtttgtcattattatgatcatctgggtcctagccatcaccattatgtctccatctgcagtaatgttacatgtgcaagaagaaaaatattaccgagtgagactcaactcccagaataaaaccagtccagtctactggtgccgggaagactggccaaatcaggaaatgaggaagatctacaccactgtgctgtttgccaacatctacctggctcccctctccctcattgtcatcatgtatggaaggattggaatttcactcttcagggctgcagttcctcacacaggcaggaagaaccaggagcagtggcacgtggtgtccaggaagaagcagaagatcattaagatgctcctgattgtggccctgctttttattctctcatggctgcccctgtggactctaatgatgctctcagactacgctgacctttctccaaatgaactgcagatcatcaacatctacatctacccttttgcacactggctggcattcggcaacagcagtgtcaatcccatcatttatggtttcttcaacgagaatttccgccgtggtttccaagaagctttccagctccagctctgccaaaaaagagcaaagcctatggaagcttatgccctaaaagctaaaagccatgtgctcataaacacatctaatcagcttgtccaggaatctacatttcaaaaccctcatggggaaaccttgctttataggaaaagtgctgaaaaaccccaacaggaattagtgatggaagaattaaaagaaactactaacagcagtgagatttaaaaagagctagtgtgataatcctaactctactacgcattatatatttaaatccattgctttttgtggctttgcacttcaaatttttcaaagaatgttctaaataaaacatttactgaaagccctctctggcaaaaaaattaaaaataaacaaaaatggtcataagatcataaacaatcttatgttgtataaaaatacgtagagtgacttagacatgtttgcatgaataaatatatttctagagaacagttaaaaaa

SEQ ID NO: 89118 - DNA, 4515 bp, Homo sapiens
gtatcagcgactgatgaagatggacccctaaatagtgacattacctatagcctcataggagggaaccagcttgggcacttcaccattcaccccaaaaagggggagctacaggtggccaaggccctggaccgggaacaggcctctagttattccctgaagctccgagccacagacagtgggcagcctccactgcatgaggacacagacatcgctatccaagtggctgatgtcaatgataacccaccgagattcttccagctcaactacagcaccactgtccaggagaactcccccattggcagcaaagtcctgcagctgatcctgagtgacccagattctccagagaatggccccccctactcgtttcgaatcaccaaggggaacaacggctctgccttccgagtgaccccggatggatggctggtgactgctgagggcctaagcaggagggctcaggaatggtatcagcttcagatccaggcgtcagacagtggcatccctcccctctcgtctttgacgtctgtccgtgtccatgtcacagagcagagccactatgcaccttctgctctcccactggagatcttcatcactgttggagaggatgagttccagggtggcatggtgggtaagatccatgccacagaccgagacccccaggacacgctgacctatagcctggcagaagaggagaccctgggcaggcacttctcagtgggtgcgcctgatggcaagattatcgccgcccagggcctgcctcgtggccactactcgttcaacgtcacggtcagcgatgggaccttcaccacgactgctggggtccatgtgtacgtgtggcatgtggggcaggaggctctgcagcaggccatgtggatgggcttctaccagctcacccccgaggagctggtgagtgaccactggcggaacctgcagaggttcctcagccataagctggacatcaaacgggctaacattcacttggccagcctccagcctgcagaggccgtggctggtgtggatgtgctcctggtctttgaggggcattctggaaccttctacgagtttcaggagctagcatccatcatcactcactcagccaaggagatggagcattcagtgggggttcagatgcggtcagctatgcccatggtgccctgccaggggccaacctgccagggtcaaatctgccataacacagtgcatctggaccccaaggttgggcccacgtacagcaccgccaggctcagcatcctaaccccgcggcaccacctgcagaggagctgctcctgcaatggtactgctacaaggttcagtggtcagagctatgtgcggtacagggccccagcggctcggaactggcacatccatttctatctgaaaacactccagccacaggccattcttctattcaccaatgaaacagcgtccgtctccctgaagctggccagtggagtgccccagctggaataccactgtctgggtggtttctatggaaacctttcctcccagcgccatgtgaatgaccacgagtggcactccatcctggtggaggagatggacgcttccattcgcctgatggttgacagcatgggcaacacctcccttgtggtcccagagaactgccgtggtctgaggcccgaaaggcacctcttgctgggcggcctcattctgttgcattcttcctcgaatgtctcccagggctttgaaggctgcctggatgctgtcgtggtcaacgaagaggctctagatctgctggcccctggcaagacggtggcaggcttgctggagacacaagccctcacccagtgctgcctccacagtgactactgcagccagaacacatgcctcaatggtgggaagtgctcatggacccacggggcaggctatgtctgcaaatgtcccccacagttctctgggaagcactgtgaacaaggaagggagaactgtacttttgcaccctgcctggaaggtggaacttgcatcctctcccccaaaggagcttcctgtaactgccctcatccttacacaggagacaggtgtgaaatggaggcgaggggttgttcagaaggacactgcctagtcactcccgagatccaaaggggggactgggggcagcaggagttactgatcatcacagtggccatggcgttcattatcataagcactgtcgggcttctcttctactgccgccgttgcaagtctcacaagcctgtggccatggaggacccagacctcctggccaggagtgttggtgttgacacccaagccatgcctgccatcgagctcaacccattgagtgccagctcctgcaacaacctcaaccaaccggaacccagcaaggcctctgttccaaatgaactcgtcacatttggacccaattctaagcaacggccagtggtctgcagtgtgccccccagactcccgccagctgcggtcccttcccactctgacaatgagcctgtcattaagagaacctggtccagtgaggagatggtgtaccctggcggagccatggtctggccccctacttactccaggaacgaacgctgggaatacccccactccgaagtgactcagggccctctgccgccctcggctcaccgccactcaaccccagtcgtgatgccagagcctaatggcctctatgggggcttccccttccccctggagatggaaaacaagcgggcacctctcccaccccgttacagcaaccagaacctggaagatctgatgccctctcggccccctagtccccgggagcgcctggttgccccctgtctcaatgagtacacggccatcagctactaccactcgcagttccggcagggagggggagggccctgcctggcagacgggggctacaagggggtgggtatgcgcctcagccgagctgggccctcttatgctgtctgtgaggtggagggggcacctcttgcaggccagggccagccccgggtgccccccaactatgagggctctgacatggtggagagtgattatggcagctgtgaggaggtcatgttctagcttcccattcccagagcaaggcaggcgggaggccaaggactggacttggcttatttcttcctgtctcgtagggggtgagttgagtgtggctgggagagtgggagggaagccctcagcccaggctgttgtcccttgaaatgtgctcttccaatcccccacctagtccctgagggtggagggaagctgaggatagagctccagaaacagcactagggtcccaggagaggggcatttctagagcagtgaccctggaaaaccaggaacaattgactcccggggtgggcgagagacaggagggctccctgatctgccggctctcagtccccggggcagagcctgattgactgtgctggctcaacttcaccaagatgcattctcatacctgcccacagctccattttggaggcaggcaggttggtgcctgacagacaaccactacgcgggccgtacagaggagctcttagagggctgcgtggcatcctcctaagggctgagaggtgagcagcaggggagcgggcacagtcccctctgcccctgcctcagtcgagcactcactgtgtctttgtcaagtgtctgctccacgtcaggcactgtgctttgcaccggggagaaaatggtgatggagggcaacaaggactccgaggagcaccaccagggcctcgggccccagaggtcccactccttcagccttacacgcagagggaacggggcccacctcagagttcacaccattgggttgccagtcagggcctgccaggagtctacacagctctgaaccttctttgttaaagaattcagacctcatggaactctgggttcttcatcccaagtttcccaggcacttttggccaaaggaaggaaggaactaattcttcattttaaaaattcttaggcactttttgaccttgctgtctggatgagtttcctcaatgggatttttcttccctagacacaaggaagtctgaactcctatttagggccggttggaagcagggagctggaccgcagtgtccaggctggacacctgccattgcctcctctccattgcagacgcctgcccatcaagtattacctgcagcgactcaaccctatgcatggagggtcaatgtgggcacatgtctacacatgtgggtgcccatggatagtacgtgtgtaacacatgtgtagagtgtatgtagccaggagtggtggggaccagaagcctctgtggcctttggtgacctcaccactccctcccacccagtccctccctctggtccactgccttttcatatgtgttgtttctggagacagaagtcaaaaggaagagcagtggagccttgcccacagggctgctgcttcatgcgagagggagatgtgtgggcgagagccaatttgtgtgagtggtttgtggctgtgtgtgtgactgtgagtgtgagtgacagatacatagtttcattggtcattttttttttaacaataaagtatctttttttactgttaaaaaaaaaa

SEQ ID NO: 89119 - DNA, 594 bp, Homo sapiens
tccgcgaattcccgggtcgacgatttcgtcgcgttcccgtcctcttccgcttggccccagaaagtttcggttctgcccggcggtggacccacgagcgcgtgccaccatggagtctgaccactgctgagcagacagccaccgagggccgaaattctgagccttcctctggacccaggcaggagacatacagacgagaaaggcaaactcaccatggcctccaccaatgcagagagccagctccagagaatcatccgagacttgcaagatgctgtgacagaactaagcaaagaatttcaggaagcaggggaacccatcacggatgacagcaccagcttgcataaattttcttataaacttgagtatctcctgcaatttgatcagaaagagaaggccaccctcctgggcaacaagaaggactactgggattacttctgtgcctgcctggccaaggtgaaaggagccaatgatgggatccgatttgtcaagtctatctcagagctccgaacatccttggggaaaggaagagcatttattcgctactccttggtgcaccagaggttggcagacaccttacagcagtgcttcatgaacacc

SEQ ID NO: 89120 - DNA, 842 bp, Homo sapiens
ctgcatatgtattggctctcacataatttaaaaagttgaattgttactttcagtgtatataaattcatactttattgctgcattagtttttccaatagtataaattggttcttttcgtaagaatataattagttaaggctcaacttttggtcttttcatacaataagctgcattatatataattaattgggaatgttacctatatattgttgatatgctcattgccaaatctaaaatctgagttccttggcagatatgtagacttgtgataggcatttggcattttatgttttgggcagtgtaactttaaatctacataaacttctctgccttttgcctctgctgcgttcatagattccaggagggcttcgtgtatggacctcaagcgttggaggtagcagacttttcagcagaaggtaaagcagagtattgccttctggtgtcattgtgtgtgtgtgctggggtgggtatgtgacaggtgagagcttttcacaagtgtaatcactaagtaatttataatgatgcattaaatgattcactttcataaaatttaaaaccaagataatacccgtacaattgtattcagtattactaaaattcattaaaaaaagtaacatttagatagaactaaagactctaaatttcacttctttgccattaagaaatagtaggagtgagtaggaaaacagcattagtataatgtatgctatataccatgtaattttctcagacctagctttactctgatttcttcgtgggaacttgtccaagtcataattcatatgctgctccttttactgaaaaattgcttcacaatagaggggcagcctaatccatgactc

SEQ ID NO: 89121 - DNA, 422 bp, Homo sapiens
tttcgtggcggacgggaaggcggtagacgagaagcctgaaaagtcgcaccgagctggagccgccggaggtatataaactatttattaacagacaaggcctacagacttatttcttcttggacacacccacggtgcggccaccgcggccagtggtcttggtgtgctggcctcggacacgaaggccccagaagtgacgcagccctctatggacccgaatcttcttcagtcgctccaggtcttcgcggagcttgttgtccagaccattggctaggacctggctatattttccatcctttacatccttctgtctgttcaagaaccactctgggatcttgtactggcgtggattctgcataatggtgatcacacgttccacctcatcatcagtgagatctaccgccctcttggtgaggtcagtgtct

SEQ ID NO: 89122 - DNA, 464 bp, Homo sapiens
tttcgtcggcgtggtggtcggcgtggctgaggtgagaaactggcgctgctgctgcctcggcagcacctgttggtgccggagcctcgtgctggtctgcgtgttggccgccctgtgcttcgcttccctggccctggtccgccgctaccttcaccacctcctgctgtgggtggagagccttgactcgctgctgggggtcctgctcttcgtcgtgggcttcatcgcggtctctttcccctgcggctggggctacatcgtgctcaacgtggccgctggctacctgtacggcttcgtgctgggcatgggtctgatgatggtgggcgtcctcatcggcaccttcatcgcccatgtggtctgcaagcggctcctcaccgcctgggtggccgccaggatccagagcagcgagaagctgagcgcggttattcgcgtaaaggagggaggaagcggcctgaagtggtggcgcttgc

SEQ ID NO: 89123 - DNA, 449 bp, Homo sapiens
tttcgttgcccacagggcctggggggccttcctcgggttcagtgatgctcacagggcctggggggccttcctcgggttcaccgatgctcacagggcctggggggccttcctcgggttcaccgatgcccacagggcctggggggccttcctcgggttcaccgatgcccacagggcctggggggccttcctcgggttcaccgatgcccacagggcctggggggccttcctcgggttcagtgatgctcacagggcctggggggccttcctcgggttcaccgatgctcacagggcctggggggccttcctcgggttcaccgatgcccacagggcctggggggccttcctcgggttcaccgatgctcacagggcctggggggccttcctcgggttcaccgatgctcacagggcctggggggccttcctcgggttcaccgatgctcacagggcct

SEQ ID NO: 89124 - DNA, 444 bp, Homo sapiens
  misc_feature (1)...(444): n = a,t,c or g
tttcgtctttagctactataaatatttatagatgttattcttgtgccttatgtgcanagtgatattttattcacgcttactttgtagtattgatacacaataattgttgcttgaaaaagtgtctataccgggggtgtttaaaaaacaggaatttaatgtggagatgccagatatttctttttcagtgacacttctcttttcctaagagatatgcaaatctaataggaatgtcaagtctttcagcatggaaataggctatcagactcacttttctgtttcctggctgttgtatgcagntgaggcctgcatattcggaagaattccttccacccagcctgctgtgctctccaccagctggggttctcttctgtcggggctgtggggagtcagggggctcaggaagtaaaggggaaggatttccacttggtttctcctttacaactg

SEQ ID NO: 89125 - DNA, 843 bp, Homo sapiens
ttttttttttttatgtacctttaaaagccccaaactgtgttttataaaacactgattttttaaaactgaaatatgtttagctttggctgtttcttatcccaagtctcaaagaataattcacatctctaataatctatttctgaggccttggggtaggcagggagttaattcctaacacaacacacccctccagggcttgggagtctctctagatgagaaggcagagacaagagtggaagcagctgcccagagggcccagccaggagctccttgacgcctggacccctcacaccaggcctgctggtccctacacaagcccctccacacagtgcccaaagcctgggagttgccgaatgagtgccctccacatgccaagccaatcttcatatgaaataggactacggaaggcaccaacttccatgtgagggcagctcccggctacctaattcaaaaacttcaaggccggctccgcagtcaggccagacctgccgccttccactcaccatgatgacggagaccccggtggtagtgctgttctgtttggggagcgcattattaaagtgctgttttagtttacctgtcacctcagcttgcatgttattctcctgggaggcatcatctgacacccaggggtgactcaggatttgtcccgcggtacaccgagcttcaacatttacctgaagcatttgactgattaattccttggcagagtccgtgatgttatcacagtagggggccggaaactccagcttcccagccaagatctggtcgaagagatcttcctgcagattgttctcacttcggaatggtgcggtctattctcgtcgaaactggtcgtcaggg

SEQ ID NO: 89126 - DNA, 634 bp, Homo sapiens
acgaacgtggggcaggatggacggctagcgcttgaagaggctcatatagctatccaacaactctgtggcaaaatcaaagatatcaaagacaaagctgaaaaatcagagcatatggtgaaagaaatcacccgtgatattaagcaattagatcacgccaaacgccacctgaccacctcaatcaccacactgaaccacctgcacatgctggcaggaggtgtcgactccctcgaagccatgaccaggcgaagacaatacggagaagttgctaatctccttcagggtgtgatgaatgtcctggagcacttccacaagtatatggggattccgcagatccggcagctttccgaaagagtgaaggctgcacagactgagttaggacagcaaatcctggcagattttgaagaagcgtttccttcccagggcaccaagagaccaggaggacccagcaatgttctacgagatgcatgtctggttgctaatattctagatcccaggatcaaacaggaaatcatcaaaaagtttattaaacagcatctgtcagagtatctggtactttttcaagaaaaccaagatgttgcctggctggacaaaatcgacagacgctatgcctggataaaacgccagcttgtggact

SEQ ID NO: 89127 - DNA, 423 bp, Homo sapiens
tttcgtctgctcgcctgtctccgtcggaagggagcccaagctttgcagaggtgagtggaagcggcttggaaggagcgggccccacgccggagaggaggaagagggagtgcggcccagacgctgtgcccgcgcttgtgtggggcgccatgttgaaacctggcaaaggggacgacattctgggttgcgttgcggggagtggggacgagagctggattggaaggatggccctttactccctgcggcccccagagaaggagaggggcgggggagcggcctcgagggttggcggccaggctgcaggctggatgggaaggataggcttttccacagaaacttaggtgtttgcctccgaggcccactgcgcatgccctggagggctctgtgggttccgccttcagttttgcttttcacaggaggggcaaa

SEQ ID NO: 89128 - DNA, 433 bp, Homo sapiens
tttcgtgtgctactagctttagaaacagaaactgtttaccagcttcttaaatttctaaagtgtgaagacctacaaatgtactccaatggccaagagatgctgcaaaatactcaactgttgtgccttaactttgaatccaaattcaaggggcattccccttcctgggcactatttactctgctccaggaggcaaggatttgaacttctctccaaatctaagtgtccaaaagtttaccggcatcacatgcccaaatttatcacagagaagagctcatgttacaattctgaaatattgtggtgcatgcaggctgaaactctgatgtgatcctgtacccaccacatgccggactccttcctagagtcacaaaagaggccacattgttcctgcctatacactcaacctcaaaatttgaaaagcccctctcccttccct

SEQ ID NO: 89129 - DNA, 328 bp, Homo sapiens
cggccgcgtcgaccaagggggaatggaaacggaaaaatcagtccagatataggaagaaggcatgtccaaggaagagagggaggggtttgcaggttctaaatcagaaaaatactgagacctttaaaagagtcaaaaccaaacaagcaaaacaggaaaatgaacagattctttagaggggtggtgatgtgcttgatgtactcagtgctgaatttgaagggtgtcctgcagcctgaggggtgttacgtggagatgcctggccagccaggagaaaggacagtggctttgggaggtgcatgcaggcgaacctcgattgtggtcacaacgggac

SEQ ID NO: 89130 - DNA, 1146 bp, Homo sapiens
taaaaagaaaacctttactgaatcagctgagtgttaataatacgaatttccttttcttgccaattctgatctgaacagaaaatccaagaacagggatatgtgtggattacagttttctctgccttgcctacgactgtttctgccttgcatccaagggtccttaagccgttgtcttcattgattcatcttcaggcaaattctaatccttgggaatgtaactgcaaacttttgggccttcgagactggctagcatcttcagccattactctaaacatctattggcagaatcccccatccatgcgtggcagagcattacgttatattaacattacaaattgtgttacatcttcaataaatgtatccagagcttgggctgttgtaaaatctcctcatattcatcacaagactactgcgctaatgatggcctggcataaagtaaccacaaatggcagtcctctggaaaatactgagactgagaacattactttctgggaacgaattcctacttcacctgctggtagattttttcaagagaatgcctttggtaatccattagagactacagcagtgttacctgtgcaaatacaacttactacttctgttaccttgaacttggaaaaaaacagtgctctaccgaatgatgctgcttcaatgtcagggaaaacatctctaatttgtacacaagaagttgagaagttgaatgaggcttttgacattttgctagcttttttcatcttagcttgtgttttaatcatttttttgatctacaaagttgttcagtttaaacaaaaactaaaggcatcagaaaactcaagggaaaatagacttgaatactacagcttttatcagtcagcaaggtataatgtaactgcctcaatttgtaacacttccccaaattctctagaaagtcctggcttggagcagattcgacttcataaacaaattgttcctgaaaatgaggcacaggtcattctttttgaacattctgctttataactcaactaaatattgtctataagaaacttcagtgccatggacatgatttaaactgaaacctccttatataattatatactttagttggaaatataatgaattatatgaggttagcattattaaaatatgtttttaataataaaaaaaaaa

SEQ ID NO: 89131 - DNA, 405 bp, Homo sapiens
  misc_feature (1)...(405): n = a,t,c or g
tgaaagtacaacctttcacagacagccttaaatgcttgctttttcttgaatttagagctcctgctgcaacaagtgcaattattaccaatgatggaataggaataaatcctgcacagactgctggccttgcagttgaaagtcagccataaagaaaatgaagtgattcataattgcgaatttttgttacttcagtagttggtaatatataattttattataaaggattattgaaaatcgcgaggcactttattgtatggatgcctttaaacttactagacaaaggtttctttttttcttaatcaagaaactttccatattttacaggagtttgaattactgctaactctaacatactgcttgttttataatttttaaaaattgaatgtgcatatccttgatatgaan

SEQ ID NO: 89132 - DNA, 2680 bp, Homo sapiens
gcggccgcggtgcagctgctggtcaccctgagcttcctgcggagcgtcgtcgaggcgcaggtcactggagttctggatgattgcttgtgtgatattgacagcatcgataacttcaatacctacaaaatcttccccaaaataaaaaaattgcaagagagagactattttcgttattacaaggttaatctgaagcgaccttgtcctttctgggcagaagatggccactgttcaataaaagactgtcatgtggagccctgtccagagagtaaaattccggttggaataaaagctgggcattctaataagtacttgaaaatggcaaacaataccaaagaattagaagtttgtgagcaagctaataaactgggagcaattaacagcacattaagtaatcaaagcaaagaagctttcattgactgggcaagatatgatgattcacgggatcacttttgtgaacttgatgatgagagatctccagctgctcagtatgtagacctattgctgaacccagagcgttacactggctataaagggacctctgcatggagagtgtggaacagcatctatgaagagaactgtttcaagcctcgatctgtttatcgtcctttaaatcctctggcgcctagccgaggcgaagatgatggagaatcattctacacatggctagaaggtttgtgtctggagaaaagagtcttctataagcttatatcgggacttcatgctagcatcaatttacatctatgcgcaaattatcttttggaagaaacctggggtaagcccagttggggacctaatattaaagaattcaaacaccgctttgaccctgtggaaaccaagggagaaggtccaagaaggctcaagaatctttactttttatacttgattgagcttcgagctttgtcaaaggtggctccatattttgagcgctcaattgtcgatctttacactggaaatgcagaagaagatgctgacacaaaaactcttctactgaatatctttcaagatacaaagtcctttcccatgcactttgatgagaaatccatgtttgcaggtgacaaaaaaggggccaagtcactaaaggaggaattccgattacatttcaagaatatctcccgtataatggactgtgttggatgtgacaaatgcagattatggggaaaattacagactcagggtttaggaactgccctgaagatattattttctgaaaaagaaatccaaaagcttccagagaatagtccatctaaaggcttccaactcacccgacaggaaatagttgctcttttaaatgcttttggaaggctttctacaagtataagagacttacagaattttaaagtcttattacaacagagtaggtaataaaggcttttatgtgtctaactagagacataaagtgactgtggaaagccttttaattatggacattcatcagaaagacgctaatctgacttcaagaaaaatgacccattaaatagaaaatttaaatgctcacttgaatatttatgattcttaatagattattatcaactagagatatttataaatgaagtatatacttttaaaacatgtaagttatactaattttgtgtttaatttcatatgttttcatgtaatgaaaattctattttttttagaattggttttgtttttattctattatcctttatttccagttgtcaaactttaaatggctatgtctgcattctaataacactgttcagtctgttatggaaaaggagaactagggaacaaatgttgctcagggctggtgtcagtgagaaaaatttatcaatgctttttaatgtgtttttacccttgcctcactgtgtgtgtgtcactttctataatataaagaaatactataatatttctagaatctggaactgtcaccataatgaatggccctttcaatgcatagtttcagaaattcctgaagattccccaggacttcaatttcattggtttttatttgcagtttttagttgctgtaattgttgctgtttccagtctaaaggacctcctttggtaaaggtgaacaagacctctcccctatgctacccagccagattttgtgtgtgtaatgggctggcccaagagtgttcttttacttagaactccttttgattttgcttttctctgcccctagaaattttagggacaaagacattttggaaattgtcagttacttttagaaaaaaaacactgcagaaatatttaacagattacttcttgataaaatttaaatgggattatatgaatttgtaatgccaattgaaaatattatatacacaaattttgctattttcacttaaagtaagcatttttaaaggatttattttagaatacaatctatgcaatcctcgaactcagtgtgcttttccctgacaggatatataaaaaggtagattaggtcaaccctcctttaagcttactctcccctcaccttttcttttcactgtatataaacggtactttctgtgattcataccaacagtcctaaactgtcattttctaaatctgggatttaaaatctttaaacaatatttaaaatcttgattttttttaaatgtcagcagatacaatttggaagattgcatctgtgtagaagtaatgcaggtacaagatctagagtttttccttagactctttagtcttttctgaattaaagaataagtgc

SEQ ID NO: 89133 - DNA, 1891 bp, Homo sapiens
ttttttttttttggtaaaatagctttatcctctgtcagaacacaaacaaacaaactttgagaggggaggaaggaaaccgtctagctcagggctcacttaggagagggatgagattagaaagttcaacacactgcttgtgcagctggagataaagtcaagaccctagcacccacttataaatatctcgttatattaaaaaaaaagaaaaatgtccagggcccacctggctctgctcctgcacagaaagggttcatcttcactttgtgatctcacaggtcatggagtgagggtggtagagaggggcagaaatttcagggggaggggtggctgggaaaaagtaaaggggacaagccaatgtgtaactagcgctctccaagacatgcagaggagtgggggtggcctgtcaggggctgaaaagaaaagccagtgctgtacctggggggttgtctcactcctgtccccacaatccctgatactccggagtgatctgtcctttcagacacccactgtgaggtcccaatatcggggtttatcctttcctcagtcccagcctgttcagctctccaaccaagttttgggggcccctctaatgggggggatggccccagttgcttaggcctctgaggtcaacccctttacatcacagccctctccccaaataagaagcatgaggtgagctggaggaccctccctgggaggagggtgttctggggggtgagccagttttggggtcccccttcagtccctgaccaggcggtaaatgtgatgctgggccccacgctcgctggtggagacctcgaagacataggcggtgcagagcagcagttcctgggtgtctctgtttgtcaccacctggaggatggtgaagttttccaggacgctgttcatcatgtatcgctcaggcagctgccgcaacttgtgcaagaaattcaccaggtactcgcacatgggcgagcgcagcaggcggtacacaaatctgccgtcctccagctgggcccgttccgtctccaccttctccaccacctgcttgccaaaagagcagaccttggaggaacaggtgagggtcatgtgttccaggctctcatactggctgctcactccgtagaagccaccactgctgatgctgccaccggcccctgcctcctcaccacttgggccccagttcaggtccgcccagaacttgaccaggaagaaggcatggggggggccacgatcatatagctctcggaggccaccctttttctcagggaatttgtcgtagatctgccggacgtccacactctcgagcggcggcgctccggggctggggcagtgctggctgatgtgcacgaacaggtgcctctggtaagaatcaactgcatctggcggttccacgaaggctgagaactctaccagctgcaaccgggcggtgcccaggccccgagcctgccaggctgggggcgatggggtaggtgggggcaggggtgagagggcttgggggggctcgtaccctgggaggtcagtagatgggggagtcagtgacaaggtgaacggtgtctgtgagaatggcttcacatctggaacattccaggggggcccagatcctccagaccaaaactggaaaagctcagaggcctggaccacctgaggaccagtgggacccagtttggcctgcagagaaggcgcggagatgagctgggcagaggacatggttgccattgtctggaaagccttgtccttggaaacctggtccacgttcagagccttcaacttggactggatttcccttgatttccttcgggccaaaccctggatgtgactagaaacctgttttcgagttcgggtcttccccgttctcagcttgatgtagcgggcgatcagttcattccgaccatacatcttgccttcatca

SEQ ID NO: 89134 - DNA, 489 bp, Homo sapiens
attcccgtttcgacccacgcgtccggtggatcattcagacccagaagagacaaaagagtttcagctccttttatcttttctattcaaatctggttcagattttacagctctgggtaagtattgcagtataatttatccagctagatgccctagcatttggaaggttggattttggtttcttttacgtgaaacatcaggtgagatgtttcagtcaaatagatgagcaaatgaagtttctaggtatcatgcaaaatttctaataacctgctacaaggttgctttgaggtatcattttgcagctcagtttgcggtgagtattataccaattgctgtgctagtatgcaaacagatagcattagaaacacagtcaaaataaattaatttgtatagcactgccttggaatgcaggctgttttactgatacacactatgagataatactttgtgattaaatagtgtttcctctcaatttcgtctttgtggagatgg

SEQ ID NO: 89135 - DNA, 501 bp, Homo sapiens
gttcaagacattggggcttggaatagaacggaagcatctcaaaagcatgtttttctggttaaggaaagcacacgagaacgtttcacagcggtgctctgctatcttctctgtacccctccgccctacgctcatgggagagctcatttctctccccatcagacactgggaaatactcccaaggctctggcagtctcaaggctgcaattcctgagaccggggactctgtgctgccatctcgtggcagatctcagacacagcaagctggctgccggaatcctgtttgaacttggcttgcggcgggagctgtggtttggctcaaatccttatagagctttgttgccagtcatgttgatttttaaaaaatgttttactccctatgccccccttttagtttttcatgttggcacttcatttaatgtgcctccagaggctacattttgggttttgatgtgtttggtcaatgttaaagaatcggttaactatcttcctgaaagaaggcag

SEQ ID NO: 89136 - DNA, 448 bp, Homo sapiens
ttcacgccaagcttggcacgagggggtcgtcatggttgttgcgtcgctcgtgggggtcataggggcgatattgtcccagttctgcgcgaacttggtaaaccgcccctgaacttatccctgcaagctcagctattgcgcttgatcccgagcgcacccagcatctgctcggtctgcttttgcatctggtcctgcatctgggtgaacatgttctgcgactgctccatgtagctgctcatcatgttctgcatggctggcggctgcatgcgcatgaactggctccaagcctcgggcgaggtgccctgggcctgctcggccagcttgttctggaagtcggtgaacatctgcacgttcttttccaggtaggaacccatgtagccctgcatggcatggccgtagaaacggatgatgttggccagcacggtctcggagaacatgggcgcgccgccgg

SEQ ID NO: 89137 - DNA, 1297 bp, Homo sapiens; identical to SEQ ID NO: 64039
  misc_feature (1)...(1297): n = a,t,c or g

SEQ ID NO: 89138 - DNA, 651 bp, Homo sapiens
catcagcttctatgatagttgcctattctttgaagcagaagctggtgaacaaaggcggctactctggtaggttatgcatcacccccttggtctgtgtgctgaattctgatagaaaagcacagagcgtttacagttcgtatttacaaatttaccctgaatcctataacttcatgaccccccagcacatggaagccctgttacagtccctcgtgatagtcttgcttgggttcaaatccttcttaagtgaagagctgggctctgaggttttgaacctactgacaaataaacagtatgagttgctttcaaagaaccttcgcaagaccagagagttgtttgttcatggcttacctggatcagggaagactatcttggctcttaggatcatggagaagatcaggaatgtgtttcactgtgaaccggctaacattctctacatctgtgaaaaccagcccctgaagaagttggtgagtttcagcaagaaaaacatctgccagccagtgacccggaaaaccttcatgaaaaacaactttgaacacatccagcacattatcattgatgacgctcagaatttccgtactgaagatggggactggtatgggaaagcaaagttcatcactcagacagcaaagggatgggccaggagttctctgg

SEQ ID NO: 89139 - DNA, 443 bp, Homo sapiens
gaattctcgacctgtagatattcagggacctctaacagaggaagtaatttatttttcttacccttttaggatgtcaaaaaagctatccttgaagatatggtgagacttgggaaggattctggtctgaaaccatttgaacaggtatgaccttcatctgagtgggtgaattcctgtaaaacaaattttccattaagatttttttacaggtagattatataaacatatggggtgacctaaagacatacatgaggaataaataatggagtagtttgacaggggaaaggtttttaaatcaaaagcatttattctcttttcctggatatcagaatatgatcccgaatcctatcctaagaataggatgcctgtcctttgttgagaaggtgcagcttggctgaaatgagaggatggattggatggctggagagtgttgatcccctccaagg

SEQ ID NO: 89140 - DNA, 908 bp, Homo sapiens; identical to SEQ ID NO: 63856

SEQ ID NO: 89141 - DNA, 467 bp, Homo sapiens
gggtggaattcctggcactcagaatgggagggggcactgatggagtctctgcgggccccccgtggaagccaggcacacaggtgcgccagtctccatattccctctcagctcgtcttgactgaggacagctctgggccgtttccagatgaggatgctgaggctgagtctgtcacagcaaacggagggggcagggagctggggcccagtgccaggaaacggggtggcctcaggtccagcaggctggggtctgggtgtgtggccactacccaactctgtgacctggggctggggtgacttgggggttagcctgcctggcacagtctgcccagccactcctgcccacccccaccacccatctccttgccacggcccccatgggtggctgtcagaagtcaaggaacatcagacgggcaggatcggtctccaggcctggctcatgctgtctctggtccccaggagtgaccggg

SEQ ID NO: 89142 - DNA, 470 bp, Homo sapiens
gggtggaattccaggcccctacatctgcagtgagatggacctcgggggcttgcccagctggctcctgcaagacccccggttactgttgaggacaaccaacaagagcttcattgaagcagttgagaagtattttgaccacctgattcccagagtgattcctctccagtaccgccaggcaggccctgtcatcgcggtgcaagtggagaatgagtatggctcattcaataaggataaaacatacatgccgtatctccacaaggccctgctgagaagagggattgtggagcttctcttgacctctgatggtgagaaacatgtgctgagtggccacaccaaaggagtgttggccgccatcaatttgcaaaaacttcaccaggatactttcaatcagcttcataaagtccagaactggaattatggatttgtgttcatcaatggacgtaaccttgggcgatattggaatattgggc

SEQ ID NO: 89143 - DNA, 855 bp, Homo sapiens
agagcgtggtggaattcgacgcgaaaatggccgaaggagcgcgagcgcgcgggccgagaggctgtcgggttcgtgacggaccggcgggcggggcgggtaagatggcggccccgcggcgagggagaggatcctccacagtgctctcttcagttccccttcaaatgctgttttatctcagcggaacgtactacgccctgtatttcctcgccacgctcctgatgatcacgtataaaagtcaggtgttcagctatcctcaccgctacctggtcctcgatcttgctctgctgtttctgatggggattctagaagcagttcggttatacctgggcaccaggggcaacctgacagaggctgagaggccgctggccgccagcctggccctcacggctggcaccgccctcctctctgcccacttcctgctttggcaggccctagtgttgtgggcggactgggccctcagcgccacgctcctggcccttcacggcctggaggccgtcctgcaggtggttgccatcgcggccttcaccaggggcttcggaggagaggtcagggctaaggccggggatgagactgcaggagagagagcagcggagggccacattcggagcctccgtccactccagttttatcagcttttgccttctttgacggagtgctaaacaaattctagctctgtgttttttttcccattcccagatttactatcagttctccttaaaaagtatctaagctgttacagtagctttcccttcacttgattctattgtgtgttttctatgtttggaataattacacccaaatatctagatattttctcttcaccgcattttgtaaataaagagatgtgtatgcctc

SEQ ID NO: 89144 - DNA, 1843 bp, Homo sapiens
atgtcgctgctgagcctgtcttggctgggcctcaggccggtggcagcatccccgtggctgctcctgctggtggtcggggcctcctggctcctggcccgcatcctggcctggacctatgccttctatcacaacggccgccgcctccggtgtttcccgcagccccggaaacagaactggttcttgggtcacctgggcctggtcactcccacagaggagggcttgagggtcctgacccagctggtggccacctacccccagggctttgtgaggtggttgggccccatcactcccatcatcaacttgtgccaccctgacatcgtccgatctgtcatcaatacctcagatgccattacagacaaggacatagtcttctacaagaccctgaagccctggctgggggatgggctcttgttaagtgttggtgacaagtggagacaccaccgtcgcttgctgacgcctgccttccatttcaacatcctgaagccctatataaagattttcagcaagagtgcaaacatcatgcatgccaagtggcaacgcctggccatggagggcagcacctgtctggatgtgtttgagcacatcagccttatgaccctggacagtctgcagaaatgcatcttcagctttgacagcaattgtcaggagaagcccagtgaatatattactgcgatcatggagctcagtgcccttgtagtgaaacggaataaccagttcttccggtacaaggacttcctgtacttcctcactccctgtggacggcgcttccacagggcctgcagactggtgcacgacttcacagatgccgtcatccaggagcggcgccgcaccctcactagccagggtgttgatgacttcctccaagccaaggccaagtccaagactttggactttattgatgtgctcctgctgagcgaggataaaaatggtaaagagttgtcagatgaggacataagagcagaagctgacactttcatgtttggaggccatgacaccacggccagtggcctctcctgggtcttgtacaacctcgcgaggcacccagaataccaagaacgctgccggcaggaggtgcaagagcttctgaaggaccgtgagcctaaagagattgaatgggacgacctggcccagttgcccttcctgaccatgtgcctgaaggagagcctgcggttgcatcccccaatccctacattcgcccgcggctgcacccaggacgtggtgctcccagacagccgagtcatccccaaagggaatgtctgtaacatcaacatcttcgcaatccatcacaacccctcagtctggccagaccctgaggtctatgaccccttccgcttcgaccccgaaaacgcccagaagaggtcacctatggcttttattcctttctcggcggggcccaggaactgcatcgggcagaagttcgcgatggcagagatgaaggtggtcctggcgctcacgctgctgcgcttccgcatcctgcccgaccacagggagccacgcaggacgccggagattgttttgcgtgcggaggacggactttggctgcgagtagaacccctgggctgaggcctgcagtgacccacccacctacctttgcatcacctacctttgcaccaattaccttttcagatttccggtaataaatctgtgttggcccctgtgcctgagtcccacggatggccagtagggggcgctggaggactgcggggatctagggcctggctgggaagaggcggggagatgtctctgtgcccaagatactcactgcctctctgggtgagcacaggagccccgtgctgagggtgggatctcccagagtctaagtaaagactttttcccccccaaa

SEQ ID NO: 89145 - DNA, 416 bp, Homo sapiens
  misc_feature (1)...(416): n = a,t,c or g
cgattcttctttttcttctgctctggctggtgagtgatgggaggagaagcaggagaatttgctcatgtccaggggagggtaagaggaagaagaatttctctattgccccagtaggatctttctctgtttgccttcttcatgttgatgatcccatgtttgtgtttctcattatgcaggatcatcaggctgcccggctggggctggggctggggctgtggctctggggatctcagctgtggctctatatgattaccaaggaggtaggttgggagtggcccgaggagcctggtacatggaggcccctgatataagacagggggacatgtgaaaagagattcatgtctgaccattctaatatcccctcaactttctccccagagggaagtgatgagctttcctttgatccggacgacgtn

SEQ ID NO: 89146 - DNA, 1749 bp, Homo sapiens; identical to SEQ ID NO: 64203

SEQ ID NO: 89147 - DNA, 1402 bp, Homo sapiens
atggacccctcaattcgggcggggctactcacgcttgttgttcccgaaattgtgctgggtatcgataacctggtctccatcgccattcttgctgacaaactgccgccaaaacaccgcgataaagcgcttttgctggggttatcactggcgctgattatgcgtctggggctcgtgccgctgatttcatggatggtcacgctgaccaaaccgctatttaccgtcatggatttctccttctccggacgcgacctgattatgttgttcggggggatattcttgctgttcaaagcaccaccgaaactgcatgaacggctgaaaaaccgcgatcatgatcccggccacgtagggatggttaaccatctgccggtgatgatggcggcggtagtgattgcgatggcggttatgttgctggcatccaaaccgctgacgcgattcgttaaccagcaccccacggtggtggtgctctgtctgagcttcctgttaatgattggtctgagtctggtggcagaaggtttcggtttccacattccgaaaggttacctgtatgccgcgattggcttctcgatcatcatcgaagtgtttaaccagattgcgcgtcgcaactttattcgccaccagtcgactttgccgctgcgagcgcgtactgccgatgccatcctgcgtttgatgggcgggaaacgtcaggccaatgttcagcacgatgccgataacccgatgccgatgccgatcccggaaggtgcatttgccgaagaagaacgttacatgattaacggcgtactgacgctggcgtcgcgttctctgcgcgggatcatgacgccgcgcggtgaaataagctgggttgacgctaatctcggggtcgatgaaatccgcgagcaactgctctcttcaccgcacagtctgttcccgattcagctgtatgccagcctgctattacaggtgtttttctttgccgcgaatatttacggttggtatgcgtggtcgcgacaaaccagtcagaacgaggcggagttgaaaattcgctggttgccattgccgaaggcactcagctggttggcggtttgcgttgtttcgattggtctgatgacggtatttatcaatccggtgtttgcatttttgacccgcgtggcagtcatgatcatgcaagcattaggattacaggttgtgatgcctgaactgcaaccggacgctttcccgttctgggattcatgcatgatggtgttatctatcgtggcaatgattctgatgacgcgtaagtatgtggaaaactggctgttgtgggtgattattaacgtgattagcgtcgttatttttgcacttcagggcgtttacgccatgtctctggagtacatcatcctgacctttattgcgctcaacggcagccggatgtggatcaacagcgcac

SEQ ID NO: 89148 - DNA, 453 bp, Homo sapiens
  misc_feature (1)...(453): n = a,t,c or g
aggacttcggaagttgctgaacttctgttcttctatatgagaaacggtgataatagaactgaccatggagggtagtcgagtggattttctaagcgtgtgttggaatttctgttggatataaagcacccagcacagtgtaaatctttcgtaaatggtagctgttattatggtataacattacttaaaggaagttggaagagttaacttataagagctggggacctaagagaccgtgtgatgctccagcacttgagcccacatggaaaggctgtggccagggccctgacctgctgtgcctgcagcaaagctacttgagcccttctagacagcagacctggctctggccccttcttcccgccctcagggtttgaagaagatctctgcctacatgaagtccagccaattcctccgaggtcttttgtttggaaagtcagctacatggaacagcanatn

SEQ ID NO: 89149 - DNA, 1416 bp, Homo sapiens
  misc_feature (1)...(1416): n = a,t,c or g
ggggtaatcgagagggtgggtcggcgcgtgctgctcatcggtgggtacagcctgatgacctgctgggggagcatcttcactgtggccctgtgcctgcaggtagctggggtggatgagggctggggggtccaggccgggctgacttccacctcacccccgccccgtccacggcagagctccttcccctggacactctacctggccatggcctgcatctttgccttcatcctcagctttggcattggccctggtgagtgggcccaaggggctctgggcatccgtcatcacatagaaggagtgatgggtgcctgggtgcacagtgggtgggtgtgaatgcaatgtcccctgcaggccctcagagaccacctcatgccggggcttctgggagggaatggcaggaggagagcactgaggggccccccatacagactgggcctgggctcccactcccatgtctgggctggggtcggggagaggcaggcagggaaccctggccagcagccccctgtccctgcccctccttctagccggagtgacggggatcctggccacagagctgtttgaccagatggccaggcctgctgcctgcatggtctgcggggcgctcatgtggatcatgctcatcctggtcggcctgggatttccctttatcatggaggccttgtcccacttcctctatgtccctttccttggtgtctgtgtctgtggggccatctacactggcctgttccttcctgagaccaaaggcaagaccttccaagagatctccaaggaattacacagactcaacttccccaggcgggcccagggccccacgtggaggagcctggaggttatccagtcaacagaactctagtcccaaaggggtggccagagccaaagccagctactgtcctgtcctctgcttcctgccagggccctggtcctcactccctcctgcattcctcatttaaggagtgtttattgagcaccctttgtgtgcagacatggctccaggtgcttagcaatcaatggtgagcgtggtattccaggctaaaggtaattaactgacagaaaatcagtaacaacataattacaggctggttgtggcagctcatgactgtaatcccagcactttggggaggccaaggtggggaggatcaatttgagggccagagttttgaaaccagcctagggtaacatagttgaggaccccctattctcttacaaaaaattttaaacattaggctgggcatgggtgggtatgtgctaacagctctagctactcagggagggctgagggcagcaggatcactttgagttccaaggagtttcaagggtaggcagtaagctacaattcacaccactggcattgccaggactggggtgacagaggggaggacttcctncttctttttaaaacattattanttatta

SEQ ID NO: 89150 - DNA, 2304 bp, Homo sapiens
cagcccaaacagcacgacggatcatagggctggagctggacactgagggtcacaggctttttgtggctttttctggctgtattgtctacctccctctcagccggtgtgcccggcatggggcctgtcagaggagctgtttggcttctcaggacccatactgtggatggcatagctccaggggctgtgtggatatcaggggatctggtgggactgatgtggatcaggctgggaaccaggaatccatggagcatggtgactgccaagatggagctactgggagtcagtctggccctggggattctgcttatggcgtgcgccgggacctgcccccagcctcggcctcccgctccgtccccatcccactcctcctggccagtgtggccgcagcttttgccctgggcgcctcagtctctggcctcctggtctcctgtgcttgtcgccgcgcccaccgacgtcggggcaaggacatcgagactcccgggctcccgcgccctctctccctccgcagtttggcccggctccacggtgggggcccagagcccccgccgccctccaaggacggggacgcggtgcagacgccgcagctctacaccaccttcctgccgcctccggagggcgtgcccccgccggagctggcctgcctgcccacccccgagtccacgccggagctgccggtcaagcacctccgcgccgccggggacccctgggagtggaaccagaacaggaacaacgccaaggagggtccgggccgctcacggggcgggcacgcggcgggcgggcccgcgccccgcgtgctggtgaggccaccgccgcccggctgtcccgggcaggccgtggaagtcaccaccctggaggaactgctgcgctacctgcacggcccgcagccgcccagaaagggggccgagccccccgcccctttaacctcgcgggcgctcccgccggagcccgcccccgccctcttgggcggccccagccccaggccccacgagtgcgcctcgccgctgaggctggacgtgccccccgagggcaggtgcgcctctgcccccgcccggcccgcgctctccgcccccgctccccggctgggcgtcggcggaggccggaggttgcctttctccggccaccgggccccccctgccctgctcactcgagtcccctcgggaggtccctccaggtactccgggggtcccgggaagcacctcctgtacctgggccggcccgagggctaccggggccgcgccctgaaaagggtggacgtcgagaagccccagttgtccctgaagcctcccctcgtcgggccctcctcccgccaggccgtcccgaacggcggccgtttcaacttttaaagggagcggtccacggcctccagcgtggggagcgcccgagtcctctcggccacgagctggacgctcttcaggacgtttgaccgccccctcgccccgcacctccagccttcccgactcgcagagtctcccgaggccccttttcgcctcgggtttatttattgactgtctttccccctgtcctcgacagaagagtgggaggtaagaagcccgtctcctcagtgagccagcatttcagggggagctggcggactcccactccccgctcccttccagccaagctgccttaactcgcccctcggggctcccccagagactgtgccccgggcgggccgcgcgcgctgtgtccagagtcctcgggcctcctgggtctgggacgtgcctctcctactgtgtaggagcctccgcttcccaatacagccgtgtctgcagccactgcctgacttcactcgggcgggggagggcggcagtcggtcggctcgctctgggcgccctcgctctctgccttcatctgggccctgggctctcccgggtaatgggatggctgcggtcccgccggggggcagtctggaaaggtttcctaaaggagacgagcgaattaacggtgtcgaggtgagccagggccagggggaccccggtaaagtttagttgaggctggggaaggccctcggagctcgtttccagatcgaggtaagagggactttcttaaaggcctagtctatgggatggggcggcggagggaattttttgagaaataaaatgaagctgcagtgtacgttacttgaagttccaaaaaacaaaaaaaaaaataaaaagggggccggggttttggaagaacaaattttaaaacccggggctgggaaagaaaaattttttttttgggggccccaaaattaaattccggggccgggttttaaaaacgggggggggggaaaaccccggggttcccccaattaaatccctt

SEQ ID NO: 89151 - DNA, 1890 bp, Homo sapiens
ccgcggggagcgaggagcgcgcggagccggccatgggcaagtcagcttccaaacagtttcataatgaggtcctgaaggcccacaatgagtaccggcagaagcacggcgtccccccactgaagctctgcaagaacctcaaccgggaggctcaacagtattctgaggccctggccagcacgaggatcctcaagcacagcccggagtccagccgtggccagtgtggggagaaccttgcatgggcatcctatgatcagacaggaaaggaggtggctgatagatggtacagtgaaatcaagaactataacttccagcagcctggcttcacctcggggactggacacttcacggccatggtatggaagaacaccaagaagatgggcgtggggaaggcgtccgcaagtgacgggtcctcctttgtggtggccagatacttcccagcggggaatgttgtcaatgagggcttcttcgaagaaaacgtcctgccgccgaagaagtaacttgttaaatgtaatgggaaggtggcagacttaagaacgtggatatgaagtgcctagaaccaccacaacctggctgtgcgtctgtccctgtgggtgtatgtgcttgtgtgtgtgatgcatgtgagcgtctctggcacacacacttggacatacagttctgtgtgcgctcattcttattacaggagtgagcaaaggaagcatttaccccgatggttacctagaccacgattatttggattggggggaggggggatccgtttttttttttaattttttgttatttctaagcaaacctcttttgtacttttcttacttctaatatccatccctggactttttgtattccaaatgtttgtgatgctgagaagtgaagttcattttatgtgatcttcatgcgtcgtaatctacttttggtagataattaagattattaaaccctcatttaaatgtgacataaaatacagctttaagcacataaatataaagcagcttccatcaggaacatggagcaggcagggactccattttacagaattactgagatttctcagttgtaaaacatgatgtcatcctgcatgcctcctggaattctccaatggggtcgccaaacaacaaatggagaaaaaaagttttacttccttgcattcttctacctttaaatagcaaagtaccactaccaccaccacctcttgcccccttccctcttttcttaaacttctggcatttcagagctcagcaggctacccctggtttctggagagttgggctaggcctgaagctccccctcccccacctctgctaggcagcccaggcctggtctgggagacagcccctcaccctgcctgggctcttggccaagcggccttggatggatgaagtcagagaggtggggtgagggtgagcttactcagggcccccagaggaagccctcagcctctgccctccccccacacagggcgggagcccaggcctgttcctggcagctgtggctgcagctgtgctcctgctccctcctggaatgtgcgacaagcccaaatgttccggggaggcggccggggcagggggcttagaagtgctaatatggttctgtgttttgcctgaaacgataccaggttcccctgaatagcaactttacaaggtccatgtgggagggaccaacccagatgccctgctgagtgtccctgaaaccatggcagctccatctgtcaagatggcaggggccggagtgagggggctgctggcttaacagcaggcatctgggcaggccagtcctcaaagcagctcctgaaggtctgtgttgcactgtcaccagtctcaagctatgcctctaatttcaccagggatattgactaagaagacaataaaatctttttctttgtgtaaaaaaaaaaaa

SEQ ID NO: 89152 - DNA, 392 bp, Homo sapiens
ggaattcgggagattctggggggcccctggtctgtgaattaaatggcacatgggtccaggtggggattgtgagctggggcattggctgcggtcgcaaaggataccctggagtttacacagaagttagtttctacaagaaatggattattgatcacctgagacaagcttcctgtttgaattcaaagacttcctcatcctagtcctgtgtctggtgatgcccctgggcatcctggtgacctcgtgatcagaccccattccactcttctgctgtttctgagtctcacacttaggtgtctcctctgaccaacttcccactccttctcaatgccctttccgcaaatcccagttggaatccacgggccctctggagatccgtacaatagagcatggcg

SEQ ID NO: 89153 - DNA, 806 bp, Homo sapiens
taatcactgtggtggaattcgagttaattatcacagaattataatatgctttaacatttaatatttgtatttttttctattacttctggaacaaattaccaaaaatgtagtatactgttttagtacattataccagtatattagtattagtaaatcagtaaaattaatatagtactattttctgttcctttattgtcctgcctaagtgccttataagaactttgagcccagaatttttatctcaggattctttgacaaactactgtaatcggcagattaacatagtttttaatggtctccatctcctgggattccagcccttgtctaataccctacccatgtgtgtgagctggatctattggcttgctgctattgcatagaatacagcaaacatgatgagatgttgattctgtgattaggtgacaaaagatgtgacttctgtctttgactcttttcaatggctttttttttttttgggtttgccaattttgaaaaaaaaagcttccttggggggaggggttcaatttttgggaatttgggaccacccctggtaaaggactgaatttccccaaaaccctggggggggaaatggatttaatttgggaaatttttttaagggggcccttaatattttttaaaaaaaccctttaaattaaccccttccctaaaaaaaaaacccttttttgtttccccaatagccaaaaaagggggttttgcttggggaccacccctaaaaagccccttttggttgggcggaaccaaaaaaaaaaagggctttaaggccccggaaactttttcttttaaac

SEQ ID NO: 89154 - DNA, 4144 bp, Homo sapiens
atggggaacgcggagcgggctccggggtctcggagctttgggcccgtacccacgctgctgctgctcgccgcggcgctactggccgtgtcggacgcactcgggcgcccctccgaggaggacgaggagctagtggtgccggagctggagcgcgccccgggacacgggaccacgcgcctccgcctgcacgcctttgaccagcagctggatctggagctgcggcccgacagcagctttttggcgcccggcttcacgctccagaacgtggggcgcaaatccgggtccgagacgccgcttccggaaaccgacctggcgcactgcttctactccggcaccgtgaatggcgatcccagctcggctgccgccctcagcctctgcgagggcgtgcgcggcgccttctacctgctgggggaggcgtatttcatccagccgctgcccgccgccagcgagcgcctcgccaccgccgccccaggggagaagccgccggcaccactacagttccacctcctgcggcggaatcggcagggcgacgtaggcggcacgtgcggggtcgtggacgacgagccccggccgactgggaaagcggagaccgaagacgaggacgaagggactgagggcgaggacgaagggcctcagtggtcgccgcaggacccggcactgcaaggcgtaggacagcccacaggaactggaagcataagaaagaagcgatttgtgtccagtcaccgctatgtggaaaccatgcttgtggcagaccagtcgatggcagaattccacggcagtggtctaaagcattaccttctcacgttgttttcggtggcagccagattgtacaaacaccccagcattcgtaattcagttagcctggtggtggtgaagatcttggtcatccacgatgaacagaaggggccggaagtgacctccaatgctgccctcactctgcggaacttttgcaactggcagaagcagcacaacccacccagtgaccgggatgcagagcactatgacacagcaattcttttcaccagacaggacttgtgtgggtcccagacatgtgatactcttgggatggctgatgttggaactgtgtgtgatccgagcagaagctgctccgtcatagaagatgatggtttacaagctgccttcaccacagcccatgaattaggccacgtgtttaacatgccacatgatgatgcaaagcagtgtgccagccttaatggtgtgaaccaggattcccacatgatggcgtcaatgctttccaacctggaccacagccagccttggtctccttgcagtgcctacatgattacatcatttctggataatggtcatggggaatgtttgatggacaagcctcagaatcccatacagctcccaggcgatctccctggcacctcgtacgatgccaaccggcagtgccagtttacatttggggaggactccaaacactgccctgatgcagccagcacatgtagcaccttgtggtgtaccggcacctctggtggggtgctggtgtgtcaaaccaaacacttcccgtgggcggatggcaccagctgtggagaagggaaatggtgtatcaacggcaagtgtgtgaacaaaaccgacagaaagcattttgatacgccttttcatggaagctggggaatgtgggggccttggggagactgttcgagaacgtgcggtggaggagtccagtacacgatgagggaatgtgacaacccagtcccaaagaatggagggaagtactgtgaaggcaaacgagtgcgctacagatcctgtaaccttgaggactgtccagacaataatggaaaaacctttagagaggaacaatgtgaagcacacaacgagttttcaaaagcttcctttgggagtgggcctgcggtggaatggattcccaagtacgctggcgtctcaccaaaggacaggtgcaagctcatctgccaagccaaaggcattggctacttcttcgttttgcagcccaaggttgtagatggtactccatgtagcccagattccacctctgtctgtgtgcaaggacagtgtgtaaaagctggttgtgatcacatcatagactccaaaaagaagtttgataaatgtggtgtttgcgggggaaatggatctacttgtaaaaaaatatcaggatcagttactagtgcaaaacctggatatcatgatatcatcacaattccaactggagccaccaacatcgaagtgaaacagcggaaccagaggggatccaggaacaatggcagctttcttgccatcaaagctgctgatggcacatatattcttaatggtgactacactttgtccaccttagagcaagacattatgtacaaaggtgttgtcttgaggtacagcggctcctctgcggcattggaaagaattcgcagctttagccctctcaaagagcccttgaccatccaggttcttactgtgggcaatgcccttcgacctaaaattaaatacacctacttcgtaaagaagaagaaggaatctttcaatgctatccccactttttcagcatgggtcattgaagagtggggcgaatgttctaagtcatgtgaattgggttggcagagaagactggtagaatgccgagacattaatggacagcctgcttccgagtgtgcaaaggaagtgaagccagccagcaccagaccttgtgcagaccatccctgcccccagtggcagctgggggagtggtcatcatgttctaagacctgtgggaagggttacaaaaaaagaagcttgaagtgtctgtcccatgatggaggggtgttatctcatgagagctgtgatcctttaaagaaacctaaacatttcatagacttttgcacaatggcagaatgcagttaagtggtttaagtggtgttagctttgagggcaaggcaaagtgaggaagggctggtgcagggaaagcaagaaggctggagggatccagcgtatcttgccagtaaccagtgaggtgtatcagtaaggtgggattatgggggtagatagaaaaggagttgaatcatcagagtaaactgccagttgcaaatttgataggatagttagtgaggattattaacctctgagcagtgatatagcataataaagccccgggcattattattattatttcttttgttacatctattacaagtttagaaaaaacaaagcaattgtcaaaaaaagttagaactattacaacccctgtttcctggtacttatcaaatacttagtatcatgggggttgggaaatgaaaagtaggagaaaagtgagattttactaagacctgttttactttacctcactaacaatggggggagaaaggagtacaaataggatctttgaccagcactgtttatggctgctatggtttcagagaatgtttatacattatttctaccgagaattaaaacttcagattgttcaacatgagagaaaggctcagcaacgtgaaataacgcaaatggcttcctctttccttttttggaccatctcagtctttatttgtgtaattcattttgaggaaaaaacaactccatgtatttattcaagtgcattaaagtctacaatggaaaaaaagcagtgaagcattagatgctggtaaaagctagaggagacacaatgagcttagtacctccaacttcctttctttcctaccatgtaaccctgctttgggaatatggatgtaaagaagtaacttgtgtctcatgaaaatcagtacaatcacacaaggaggatgaaacgccggaacaaaaatgaggtgtgtagaacagggtcccacaggtttggggacattgagatcacttgtcttgtggtggggaggctgctgaggggtagcaggtccatctccagcagctggtccaacagtcgtatcctggtgaatgtctgttcagctcttctgtgagaatatgattttttccatatgtatatagtaaaatatgttactataaattacatgtactttataagtattggtttgggtgttccttccaagaaggactatagttagtaataaatgcctataataacatatttatttttatacatttatttctaatgaaaaaaacttttaaattatatcgcttttgtggaagtgcatataaaatagagtatttatacaatatatgttactagaaataaaagaacacttttgga

SEQ ID NO: 89155 - DNA, 435 bp, Homo sapiens
gcgtggtggaattcgccagtcggtgctacaaccatcccgctttccctgacctgcaacaataggacactagccccagccctgttcactctgcaagggcccctccctacttgtctgagtgacttagacagccagtgatgaatcagagcttgagagaactggaaggttcctaggggtcagctgagaaaaagacagctcagaaaaagtaatggatgtgcctagaccttgcagctggtcaacagccacaggcaccccaaggccagcatctaactccccatccagggagctctccaagcacctgccctcctgtacccacagcacccgcctggcccctcaccgaacacacaaaggacttgagcaggtgtttgctgagcaggcttagggatgccggcctagagaacagcatgacatctggagtgccctgcggaggcgagacag

SEQ ID NO: 89156 - DNA, 693 bp, Homo sapiens
atgaaggtgctgggagggttactgcatggaagctccaagtaccactacaccataccccatacccaccttgtgcattttttccgtttggctgttctgggttgtatcctttatgattagccaataatcgagaaaacagtgcctttctgagttctgtgagccatttcagcaacttaccaaatctgaggagaggccatcgggaacccctgaatttattgctgactggtcagaagtaccggtgacacactgggacttggaactgtcgtctgaaaggggggcagtcttgtgggactgagcccttgacccgtgggttctggtgctaactccaggtcgatgatctcagagttgagttgaatgtggagcacgcagctggtgtcggaggggtggtattgaaaaagacgtgcagtgtcagaaatgtaagaacagttcctaggcacacagaatatttgttgaatgggtggatggagatttgcacttcctatggttcacatttattacagacatgttactggtgcaatttttataaaagatgggcagttaccagaaaggaaatgtttaagttcccagattccacataggcagaataagaggatgttcacagctgacatggggcccacgcttgatgagaagcggcttccaatgctccaccttgcatgatgcgttgtgttcccaagtgaacacgtgtgattgaatgct

SEQ ID NO: 89157 - DNA, 590 bp, Homo sapiens
ttttttttttttacattttttaaaagttttttatttttcagtttttgtagagatgaggtctcaccatgttgccctggctggtcttgaactcctggcctcaagccttccttccgcctcggcctcccaaagtgctgagattacaggcctgagctgctgtatggctatgattttgttaaaggccgacacagaggtgaagtcaactgctagaaatcacggcttttaagaggtggagtcacatttgaactctggcctctgatgccagatctgcaggtcacatgttcaccatggtccaggtgaccctgactgcggtccccacctcttctgtgaggcacagggcaggattccacctgaggcgcgaggagcctgggacgactcctttggtctcttctggggttcgcaaaaacctgggggtcccgggtgtgaagaagggtgtctgcgctctcagcggtcaggctccaggcgctgcgacaggacgccgaggacgcgctggaacttctcaaagcgttcagcgcgcggagctcccgcgccccggctaccccagagcagcctccgcacgaagccggtggtcagggcgaattccaccacactgt

SEQ ID NO: 89158 - DNA, 495 bp, Homo sapiens
gagagtggcggaattctgtttttggatgaataactggctgatagattggttgacctgggcttatgaaacaaaccttgggagcatggtgagggtcccagaccaggtagattcacatggtgggggtctggcatggggttctctcttggaatgactcatctatcccacccacttcccagggacaggaatatgataattgcaagaagaagcctcctgcattagaaccaccacaaacccagcatgattcccctttattcagagtaccttctaatagtgcctcccctatgatgtcatccaccctctcctccccagtcctgagggcctgggatactgggtctctccatacctgggcccagcagagaagggcataaaggcaaagggatggcgtttggatgcattctcagtggaaaagcgcagagagtcaaagacctgaagggacatgccttgcttaaacactcgccaggttctggcagagggtgaccctcccagtcccccacc

SEQ ID NO: 89159 - DNA, 2454 bp, Homo sapiens
gatgtggagctggggtccctgcaagtcatgaacaaaacgagaaagattatggaacatgggggggccaccttcatcaatgcctttgtgactacacccatgtgctgcccgtcacggtcctccatgctcaccgggaagtatgtgcacaatcacaatgtctacaccaacaacgagaactgctcttccccctcgtggcaggccatgcatgagcctcggacttttgctgtatatcttaacaacactggctacagaacagccttttttggaaaatacctcaatgaatataatggcagctacatcccccctgggtggcgagaatggcttggattaatcaagaattctcgcttctataattacactgtttgtcgcaatggcatcaaagaaaagcatggatttgattatgcaaaggactacttcacagacttaatcactaacgagagcattaattacttcaaaatgtctaagagaatgtatccccataggcccgttatgatggtgatcagccacgccgagccccacggccccgaggactcagccccacagttttctaaactgtaccccaatgcttcccaacacataactcctagttataactatgcaccaaatatggataaacactggattatgcagtacacaggaccaatgctgcccatccacatggaatttacaaacattctacagcgcaaaaggctccagactttgatgtcagtggatgattctgtggagaggctgtataacatgctcgtggagacgggggagctggagaatacttacatcatttacaccgccgaccatggttaccatattgggcagtttggactggtcaaggggaaatccatgccatatgactttgatattcgtgtgcctttttttattcgtggtccaagtgtagaaccaggatcaatagtcccacagatcgttctcaacattgacttggcccccacgatcctggatattgctgggctcgacacacctcctgatgtggacggcaagtctgtcctcaaacttctggacccagaaaagccaggtaacaggtttcgaacaaacaagaaggccaaaatttggcgtgatacattcctagtggaaagaggcaaatttctacgtaagaaggaagaatccagcaagaatatccaacagtcaaatcacttgcccaaatatgaacgggtcaaagaactatgccagcaggccaggtaccagacagcctgtgaacaaccggggcagaagtggcaatgcattgaggatacatctggcaagcttcgaattcacaagtgtaaaggacccagtgacctgctcacagtccggcagagcacgcggaacctctacgctcgcggcttccatgacaaagacaaagagtgcagttgtagggagtctggttaccgtgccagcagaagccaaagaaagagtcaacggcaattcttgagaaaccaggggactccaaagtacaagcccagatttgtccatactcggcagacacgttccttgtccgtcgaatttgaaggtgaaatatatgacataaatctggaagaagaagaagaattgcaagtgttgcaaccaagaaacattgctaagcgtcatgatgaaggccacaaggggccaagagatctccaggcttccagtggtggcaacaggggcaggatgctggcagatagcagcaacgccgtgggcccacctaccactgtccgagtgacacacaagtgttttattcttcccaatgactctatccattgtgagagagaactgtaccaatcggccagagcgtggaaggaccataaggcatacattgacgaagagattgaagctctgcaagataaaattaagaatttaagagaagtgagaggacatctgaagagaaggaagcctgaggaatgtagctgcagtaaacaaagctattacaataaagagaaaggtgtaaaaaagcaagagaaattaaagagccatcttcacccattcaaggaggctgctcaggaagtagatagcaaactgcaacttttcaaggagaacaaccgtaggaggaagaaggagaggaaggagaagagacggcagaggaagggggaagagtgcagcctgcctggcctcacttgcttcacgcatgacaacaaccactggcagacagccccgttctggaacctgggatctttctgtgcttgcacgagttctaacaataacacctactggtgtttgcgtacagttaatgagacgcataattttcttttctgtgagtttgctactggctttttggagtattttgatatgaatacagatccttatcagctcacaaatacagtgcacacggtagaacgaggcattttgaatcagctacacgtacaactaatggagctcagaagctgtcaaggatataagcagtgcaacccaagacctaagaatcttgatgttggaaataaagatggaggaagctatgacctacacagaggacagttatgggatggatgggaaggt

SEQ ID NO: 89160 - DNA, 1046 bp, Homo sapiens
ttttttttttttcaggcctccaggcgtttattcagccccttccctctgccgccagctgcttgagtgaagcccccactccatgaggagccttgagacccctccagtcctgtgctcagaggctgagtctgggccccccacgcagagctggctgctgctcacgcctggctgcctttacccactcgccgatgatggtggcctccagcttccgcgcctcaaccacggaagcaggatcttctgggtgggaggctctgaggtcgaggtggtgcgctcccccctggatggtgacggcgatgactgaggcactcaggttcctccgaatcccgccccctgcccaggggtccaggttcccgttggagaagatgatgttgctggcggctctaagatcacccccccagaagctggtcagcagccagtcgggccggggccacacgccccaggtgtccaggcagtaccgctggcggagctcgtcagtgaagggcaggtcggggaacatatcggtcacattgttgctggcgaaggtcaggttgatctcggtgcaggcctggtagtcccaggccctggcgtcggggccggtgccgcagccagtggggtcagcacagctgtggtagagccggtagatgtcgtagcagtgctcggagcccgaggcgttgtagaccagccctggggaggagaggcgctggggcccagcggccacacacagacacaccgcgggctccggccaccaacctgtcccccctcggaatggtcctgcaggggatctggggctctgggatctgtaggtcccagtgaggaaggccctccaggctacctgcttggaggtcggcggtgtctgtgctgccagccccgggcctgactgttgagggcccccccgctctccacggggcagggtggggcctgctgccctctgttgccctccatgctggggaccccaggggccccttgggcagcacccaccaagctgggcctggctacagccagtgctgagagggtccccagggacggcccctgcctcccaaaagggtttctgggaaggtcgtgctgtccac

SEQ ID NO: 89161 - DNA, 419 bp, Homo sapiens
agagcttcgaccaagttcctttcctggtcacgtactgttttatttttatcattaccattagcactctgatttataggatccaattactactaatttgcagacaaacaaattttcctgttgaatacagattccatggaaatctgacagtgcatttattgaactctgctgcccatcagctgaggactaaggatgtttttgccagtggaacataccagttttcatggtatttgtcccagtagaatttgatccatattaaaccagcttaaatcaactgtatttagggaagaaaactatttctttcagtttatttttctttggaaattcttttaaaagagggttaaagacagaaaactaataaatcgttacatagcaatgaggaattgagaaattaagtaaataaacctactgtcaggcctctg

SEQ ID NO: 89162 - DNA, 818 bp, Homo sapiens
gtttctaccccgggtggccgggggcagtgctgagctgggactgttgtttgcccagtctggcgtgcagtaagcacgagttaaagttcgtttctggtcactgctccaggaagccaccttactctgagggtcaagaattgccgcttccttttagttactggggcttgtacatgacagctggaatagcctccagttgaggggcttggtggtgctccttatctctaaagcagctgggcccagcagcgtgaacacttcatgtcagaactatgacatggtcagtgggatctactcatgtcaaagaagtttggcagagatcacggagctaattcatattgctctccttgtacatcgtgggatagtaaatttaaatgagttgcaatcatctgatggtccactgaaagacatgcaatttggaaataaaattgctatcctgagtggagactttcttctagcaaatgcctgcaatggactagctctgctacagaacaccaagtcattttcatttaatggacctattgctatatatcagatgggagactgtgagtcagcctggatcttgtctaaacacccaagagcattgtcatgatgtcactcctggaggttgttctatttaagcattagtgatttatacttccggataaccagtggcacagatgtactctttacatagctgatgtatttccttatgttaactttgttttcctaaaggcgtaaatatgttgtttaaaatgaagtattttgtttgtacaaatatgctcaatttatgcatataaatctccctttacaccatctatatagtttaataaagatgctattgtcta

SEQ ID NO: 89163 - DNA, 1484 bp, Homo sapiens
  misc_feature (1)...(1484): n = a,t,c or g
aatggaaatagtgagggccaatgcccagggttggagggaggagggcgttcatagaagaacacacatgcgggcaccttcatcgtgtgtggcccactgtcagaacttaataaaagtcaactcatttgctggttccaggcctcaaggctcccaaggcctgagtgggcaggtagcacccaggtatagaccttccacgtgcagcacccaggacacagccagcatgaactgggcatttctgcagggcctgctgagtggcgtgaacaagtactccacagtgctgagccgcatctggctgtctgtggtgttcatctttcgtgtgctggtgtacgtggtggcagcggaggaggtgtgggacgatgagcagaaggactttgtctgcaacaccaagcagcccggctgccccaacgtctgctatgacgagttcttccccgtgtcccacgtgcgcctctgggccctacagctcatcctggtcacgtgcccctcactgctcgtggtcatgcacgtggcctaccgcgaggaacgcgagcgcaagcaccacctgaaacacgggcccaatgccccgtccctgtacgacaacctgagcaagaagcggggcggactgtggtggacgtacttgctgagcctcatcttcaaggccgccgtggatgctggcttcctctatatcttccaccgcctctacaaggattatgacatgccccgcgtggtggcctgctccgtggagccttgcccccacactgtggactgttacatctcccggcccacggagaagaaggtcttcacctacttcatggtgaccacagctgccatctgcatcctgctcaacctcagtgaagtcttctacctggtgggcaagaggtgcatggagatcttcggccccaggcaccggcggcctcggtgccgggaatgcctacccgatacgtgcccaccatatgtcctctcccagggagggcaccctgaggatgggaactctgtcctaatgaaggctgggtcggccccagtggatgcaggtgggtatccataacctgcgagatcagcagataagatcaacaggtcccccccacatgaggccacccaggaaaaaaggcaggggcagtggcatccttgccgtagcagggtggtgaggagggtggctgtgggggctcaagaagctcgcccaggggccaatgtgggaggttgggggtagtttggtccctgggtcctgagcctcaggggagggaggttgatagctactggggattttgtatatggcaacagtatatgtcaaacctcttaataaatatgattttcccagtnnnnnnnnnnnnnngggggggccgttttaaaggacccaagttaacttacccgggattgagagaacattaccttttttatggggccccctaaattcaatccccgggccggttttttacaccggggggacggggaataaaaatccgccccgagaatagactcatgagtcgacatgacgattagacgtcagcacgacc

SEQ ID NO: 89164 - DNA, 529 bp, Homo sapiens
ctggtcgacccacgcgtccgcggagagcctggacctccatcggatgccgtctttgctcgggaccccatgagaccccctgggctggtgaggaatctccaagtcacagacagatcgaacaccagcatcactctgagctgggctgggccagacacccaggaaggggatgaagcccaggggtatgtggtggagctgtgcagctcaaacagtctccagtggctcccgtgccatgtgggcaccgtgccagtcaccacctacacggccaaggggcttcggcctggagagggctacttcgtgcgggtgacagcagttaatgaaggaggccagagccagcccagtgccctggacacattagtgcaagccatgcctgttactgtctgtcccaagttcctcgtggactccagcaccaaggacttgctgacagtcaaggtcggggacacagttcgtgtgcccgtctcctttgaacatgcccgcaggcccctgggcccatccacctgcaggagaacgtgcctgggacggtgacggccgagtg

SEQ ID NO: 89165 - DNA, 565 bp, Homo sapiens
  misc_feature (1)...(565): n = a,t,c or g
cccacgcgtccgatgctgttcgcctccgtggccctgcgttatgccttcccctgccaggtgtacgcagagaagaaggagaattcaccagcccccccggcacccatgcagagcatctccagcggcatcagggagacagtgagcccccaggacatcgagcaggacgccatccacaacttctcccccgcctaccagcactacacgcagcaggccacgcacgaggcgcccaggcccggcacccaccccagcggcggctccggcgggagcaggaagagccggagcctggagaagcggatgctgatcccctcggaggacctcggaggggggctgntctgncagngctgtaggcacccatgctggccaagcctatggggaagaacaggggccacccacccaccaactcctgtcataggttgagcctcttctagaagcccaccatggagggcctcggaagccacgttcccatactccctacgctcatggggctagggcacctgcatggcccttgactagcttcttagaggggccctctcaaggttaggagagtgcaccatggtggtaatcgaag

SEQ ID NO: 89166 - DNA, 738 bp, Homo sapiens
ccggacattcccgggttgtacaggacgcacgcttacgtacacgcgcatgcgacggcttaactcttctatagagacacctaaattgaattcactgtccgccgctatacaacggcctgactgggaaagcaattcctactgggaaaatagctttgttattgcaagtgtgaagccccattgctttatcccccactcccttaccccttgaaacaatagtttttatattcattttttgatgactctgggtttcttaagaacggaactgccttatcagagcaaagcagcttggccttccgcctggctcagagtcctgccctgggcttgggctgatgaaaccagcactccatgtagtttcatgaaggcctatggtcgtcctgcttgcctgaccgagcaaggcggctagtaagtttagtcattgaggaaaggggtcagagagttcacagagccagtaaggagcctatgggacatctgatcccacctcctaagcaattctggaatcttgtcttcagcatccactgcccctgtgttttcagactccaggagctcattgttttgtgagtggcttatagtactctagccagctctctgaaccggatgctggttctgccattagaaacaacacagaatatgactaataaagaacttcactagggggctgggtacagtggctcatgcctgtagtctcaacactttgggaaggccaaggtgggaggattggttgagcccaaaaggtccagacaa

SEQ ID NO: 89167 - DNA, 463 bp, Homo sapiens
tcgcgtcgaggcccgaagccaccgcttcctcccccgcctccccattcaggtgggcgccttcggcgggtgtgagggtgtccaggccgccgggctggcaggtgcgagcacgcacagggagaactctgcccagtggttcgccgggcgctgtaatccccgggatcctagggaccgaggcggccaggccctggggccccttgagtgcggcagctaatgctctcaccgcggcgggggaaggagcttgccaccgagacccccagccacgtgcgtccctcgcattctttaccggggccggggtggcggctacggaccgtcagctgggcccagatggagtcttgggagccctcaagtgtctcctgtccttgcccgcgccgcccctcgccactggcgctgaggcctgacgccgcctgcgtcccggctagaggcgcgcttgcctacaggtgagggaagacccccttcaccgccg

SEQ ID NO: 89168 - DNA, 2061 bp, Homo sapiens; identical to SEQ ID NO: 64112

SEQ ID NO: 89169 - DNA, 443 bp, Homo sapiens
aaaaaatcaaaatattaccttaaacatttgcttctgtgagaagctccagcacctgtgtgtcactgtcatcgagatcagtaggctgtttgatggtgatgaagatggtggcctccttactcagaatgctgttttctcatttcctagtgggattttagtgtgcactgatgtgatggcccggggaattgatattcctgaagtcaactgggttttgcagtatgaccctcccagcaatgcaaggtatggtacgaggctgccacccactctctgttgaggaatttagcctaataaaggaggaatcccgaagaagataaacagataatgatgttcactgaaacattttatagcaagcctccagcgtgcttgggtctgcagtgaccccgtggattcctacagggcttgccagaacagttttgaaatggtttgaggccttgccctgctccatg

SEQ ID NO: 89170 - DNA, 1549 bp, Homo sapiens
gacatcatcccatgggactacgacgtggacctgggcatctacttggaggacgtgggcaactgcgagcagctgcggggggcagaggccggctcggtggtggatgagcgcggcttcgtatgggagaaggcggtcgagggcgactttttccgcgtgcagtacagcgaaagcaaccacttgcacgtggacctgtggcccttctacccccgcaatggcgtcatgaccaaggacacgtggctggaccaccggcaggatgtggagtttcccgagcacttcctgcagccgctggtgcccctgccctttgccggcttcgtggcgcaggcgcctaacaactaccgccgcttcctggagctcaagttcgggcccggggtcatcgagaacccccagtaccccaacccggcactgctgagtctgacgggaagcggctgaagcctgataacctcgcctttgtttttcgggggtctgtctggatgtggagaagctctgtgtgagcggtgaggggtggagggatgtcgcggggatgggaagggggaaactgaccaagaaagaaattctaaggagagcatgagagaaggctggcattggcaggaggagagcaccaggacgaggatgggaagcgacctccagatttatcaaatggtcatgcccactgggagccgtggatatgcgtggggacatcctgggtcatctcagtcatggagggagacggggatgtcacgccgtcccgcagggcccagcacagccccagacccgaaaaaagtgttctgcccaagattccgagagccctgcgctctagggcaggggcagagttttggaaacagtgcaggctctggagccagactggcgagattcaaatcctggctctatcgcttcggagccaggtgggcctgggggggcgtcgcagtctctctgtgcctcagttgcttccaggatgcgggacccttggctgcaggggttgcttccgccactagagggcgcgccggtcccgctcctggtggcccactgtggctgcccgggcgacagtacgcccagggcctgtgttccatagccatctactctcttgagcctttggacttctctccaagcccctgtgggaggcggacagcagtgaccacctccccttcttttggactgcgacctccttccctcctgggagagccctgtgacctgcatgctactcttaactgttctattcaagactgaatagaagtatttcagtcttgcagaggaggaaatgctcagagctccgaggtgcggctgtggtcgagaaccgggtgctgggccgggcgcgggggctcacgcctgtaatcccagcactttgggaggccgaggtgggaggatcgcttgagcccaggagtctgagaccagcctcggcaacatgccaagaccccgtctctatttttaaaaaagaaaaagaaccgacttctgaatcgcagctccactcatgactaatacctcattatttcagctgtctgcacctaattccccacttgcacggcagtgttaggacaataaccatagctcacactcactgagcacctactgggtacca

SEQ ID NO: 89171 - DNA, 4201 bp, Homo sapiens; identical to SEQ ID NO: 64674

SEQ ID NO: 89172 - DNA, 742 bp, Homo sapiens
ccgtccgcaattcccgggtcgaggtagcagtatgggagtccgcaatagcccccaggctctgaggcggacagcttctgggggacggacggagcagggcatgagcagaagcacgagtgtcacttcacaaatatccaatgggtcacacatgtcttatacataacttaataattgagagtggcaattccgctggagctgtctgccaaaagaaactgcctacagacatcatcacagcagcctcctcacttgggtactacagtgtggaagctgagtgcatatggtatattttattcatttttgtaaagcgttctgttttgtgtttactaattgggatgtcatagtacttggctgccgggtttgtttgtttttggggaaattttgaaaagtggagttgatattaaaaataaatgtgtatgtgtgtacatatatatacacacacatacacatatattatgcatgtggtgaaaagaattggctagataggggattttcctgaacactgcaaaaaatagaacgtagcaaaatggcttcagttatcacttttgggtgtctgtatcctaagaagtttctgaaaagatctaaagcctttttatcccatatcccaaattcttatgagccactcacagctaggcagcatatgttgaaataagttattacttggtacacacctgcattgcctcaccattgtatttatttgttattaaattgatctgacttttcagccttttttgggactaaaaaaaaa

SEQ ID NO: 89173 - DNA, 720 bp, Homo sapiens
cgcggtcttccgggcccgggtcggggctcgatggctacgtggaggcgggacggccgactgacaggcggccaaaggctgctgtgcgctgggctggcggggacgctcagcctcagcctcaccgcgcccctggagctcgccaccgtgctggcccaggttggcgtcgtgcgaggccacgcccggggaccgtgggccacagggcaccgggtgtggcgggcagaggggctccgggccctgtggaaggggaacgcggtggcgtgcctgcgcctcttcccctgcagcgccgtgcagctcgccgcctaccgcaaatttgttgtgctgttcacagatgacctgggccacatttcccagtggagctccatcatggctgggagtctcgcaggcatggtttccaccattgtaacatatcctacagacctcatcaaaacccggttgatcatgcagaacatactggaaccatcgtacagggggctcctccatgctttttctactatttaccaacaggaagggttccttgccctttatcgaggggtttccctcactgttgtaggtgctctcccgttctctgctggctcccttcttgtttacatgaacctggagaaaatctggaacggaccccgagatcagttctctctcccacagaactttgctaatgtctgtctggctgctgcagtgacccagaccctctcctttccctttgagaccgtgaagagaaagatgcag

SEQ ID NO: 89174 - DNA, 1725 bp, Homo sapiens; identical to SEQ ID NO: 64728
  misc_feature (1)...(1725): n = a,t,c or g

SEQ ID NO: 89175 - DNA, 669 bp, Homo sapiens
cctgatttagaccagaagggcaagaaatctgatatctgcaagagggttcaaaccaaagtgcaaaagaaggttcagaaaaatattgaagaagtgaggtctcttccaaaaacggatcaatttttcaagaaggtaaaatttcatggagagcctcagaaaccccccatgaatggataccagaagtttcaccaagattcctggtcaagtaaggagctgcaacatttgtccctgagggagcgcatggtagagattggcagacgctggcagcgcatcccgcagagccagaaggatcattacaagagccaggctgagttgctgcagaaggaatacaaagtggaattggatctctggctcaagactttgtcacctgaagattatgctgcgtacaaagaatcgacctatgctaagggtaagaatatggcgatgatgggaggcccggcccccagcttgaaacaaacagatccgcagtcctcatcagcaaagggtctgcaagaagggtttggggaggggcaggggctccaggctgcaggaacagaggcatcacagactatttgggtaaactgtcaggtctccatggaaccagaagagaacaggaagaaagatggcgaagaggaagaaagcagtaactctttagactgcagcagtggggaagacatggaagttgatgtctga

SEQ ID NO: 89176 - DNA, 401 bp, Homo sapiens
  misc_feature (1)...(401): n = a,t,c or g
ccctgctgctgccaatccagctgctgccagtctagctgcttcaagccctgctgctgccagtccagctgctgtgtccccgtgtgctgccagtgtaagatctgaggctctggacccagaccttcaggtttctcctctttggtgaaagcatttcttatggtttctctgaatcagttcatcccacacatcatcctgaggcacctgcacctgctctagctcatcatccatgcatgcacctctttccatggctcggctctcctctaggccctgccttcagcttcctcactccggaaacatgtgtttccttgatgcaggaggtgttcttccctggacgccatggtgttccctgcacttgggtgtggaccatcttcttcttctccctgggctgactgagatgctaggtn

SEQ ID NO: 89177 - DNA, 1182 bp, Homo sapiens
  misc_feature (1)...(1182): n = a,t,c or g
cgaccacgcgtcgctcccatgtagctggaaccacagatttgatgttgaaacccggcatgtgtttatcggtgaccactcaggccaagtaacaatcctcaaactggagcaagaaaactgcaccctggtcacaacattcagaggacacacaggtggggtgaccgctctctgttgggacccagtccagcgggtgttgttctcaggcagttcagatcactctgtcatcatgtgggacatcggtgggagaaaaggaacagccatcgagctccaaggacacaacgacagagtccaggccctctcctatgcacagcacacgcgacaattgatctcctgtggcggtgatggtgggattgtcgtctggaacatggacgtggagaggcaggagacccctgaatggttggacagtgattcctgccaaaagtgtgatcagcctttcttctggaacttcaagcaaatgtgggacagtaagaaaattggtctaagacagcaccactgccgcaagtgtgggaaggccgtctgtggcaagtgcagctccaagcgctcctccatccccctgatgggcttcgagtttgaagtgagggtctgtgacagctgccacgaggccatcacagatgaagaacgtgcacccacagccaccttccatgacagtaaacataacattgtgcatgtgcatttcgatgcaaccagaggatggttactgacttctggaactgacaaggttattaagttgtgggatatgaccccagtcgtgtcttgatgactctcccaggaatcagaaagatagtatttactaaagaaacggttgttttaacccaaatcattaccagagtggtaaagcagacatgtgagaagtaagaaagaaactaaagaccctgaatgaatttgcagattacccatgtgcacagtggggacctggccagtgagcactcgcaaggggactcttccaacttgttcatacaatataaaagaagctatttttttaacaaatggtttatacagtctggctgtgctgcattgttttgagtgtaccgaaaaatctgtgttggggtgtttaatttttatacttttcaacaccccatttttacttgttggcctttgtccagggganttaagggaggtatctactccggngtattttttggnccattatacttnccgtngtttacttcaccnggtgtcangtgg

SEQ ID NO: 89178 - DNA, 435 bp, Homo sapiens
ttcccgggtcgagagagccctcctggacctaagctaggtgagccctctggctaaggtcactcgtgatctctttgtggttggtttgttagtgatggggtcatgtctcagggctgcctgagactggaaccccaggagaggcgctgaggtacctcaggcttggagggagcctgggagtccatgctcctctgtcctgtagatgctgctggtggagttctacaagggttcccctgacctcgtgaggctccaggaaccctggagccaggagcacacctacctcgacaagcttaaggtgagccccaagtccccgcagacctcctaacggggccccaggagaggccccctgggcagcctaaaaggtggcagcaatgagccccgtgggcctcaggggcctgagacagcccagctggcagactggtgaccctgtcaccccgtggc

SEQ ID NO: 89179 - DNA, 432 bp, Homo sapiens
aaaccctacaaatgtgaagaatgtggcaaagcctttagacagtcctctgcactgaatgaacataagaaaattcatactgcagagaaaccctacaaatgtaaagaatgtggcaaagcctttagatggtccagaagcctgaatgaacatacgaatattgctattttcttcggaaagtgggtacaagctctcatgcaaacacaattgcttgcttcataattttcttacacccaaggtttatctttggagcacaacatttgtatgtttaactccatgtaaattaaaactaagtctgtatgtttgcaggagaacatgatgcatgtccagggataaatatgaaacatttttgaaaatcattcaggactcaggaatgtatgaattataattatactctgatatacttattacagtcataaaatgacctgtagtagaaaa

SEQ ID NO: 89180 - DNA, 1922 bp, Homo sapiens
ggccatggtcttcggaggggtggtgccctacgtcccgcagtatcgggacattcgcaggacgcagaacgccgacggcttctccacgtacgtgtgcctggtgctgttggtggccaacattttgcggatactcttctggtttggaaggcgctttgagtccccgctgctgtggcagagcgccatcatgatcctgaccatgctgctgatgctgaagctgtgcaccgaggtccgtgtggccaacgagctcaacgccaggcgccgctcctttacagctgcagatagcaaggatgaagaagtcaaggttgcccccaggcggtccttcctggacttcgacccccaccacttctggcagtggagcagcttctcggactacgtgcagtgcgtcctggccttcacgggcgtggcgggctacatcacctacctgtccattgactccgccctgtttgtggagaccctgggcttcctggctgtgctgaccgaagccatgctgggtgtgccccagctttaccgcaaccaccgccaccagtccacggagggcatgagcatcaagatggtgctcatgtggaccagtggtgacgccttcaagacggcctacttcctgctgaagggtgcccctctgcagttctccgtgtgcggcctgctgcaggtgctggtggacctggccatcctggggcaggcctacgccttcgcccgccacccccagaagccggcgccccacgccgtgcaccccactggcaccaaggccctctgacagtggggaggacgaggatgtgggaccgccagccgtgggcactggtgggccctgacctccccgcggggagggtgggtaccgtggcccctgcaggtgtggcagagatggggcataggcattggggtctccatcagcctctgtagggtgtctcagggttgtcagtgggggtggggctgggacgctgtttgtgctcagcggggacagccagggttgatctggccccgagggttttggatgtttttaggatgacataaaaagcaagtgttttccccatttcctcttatgaaacaccgtctgagcccaaggtacacattgggcggcctgcaggaacctgctccaggtggacacacgggccagcagccgcgaaccttgaagctggggtgaccgcaggagaccctgtaaggcctgtgagcggagccctcgaccccgtgacaccctggccagacaccctgcttggactggggtggcctctgctacccaggggtctggcacgggggagggctggggctttctctgcctggtacacacggaaaggcggctgtgcggacgcagggtcaccgtgctccgggttttctgacagtcggtgtttcctgggcctttggagtggctgcgaggcctgaacgccttgtggatccgctgtgtccagcccggctgagcatcgccagggctagctcatgctgctcttgtcagcctctggttctcctcgagtccttggggacgtggcagatgccagcgaccatcagacaacgtggaggccctcatgggcaatggctgagggggccgggctgaggctgtgcacatgcagtctgcacgccactcttgggctctgctggcggagatccccttccttctgggtgcagactgcacctccggatgcagttttgatgtccatcttccaggagagagacggtctcgggtccagggagtggagggggctgcccctgccgtgcaggtcctggccgatggcgccttaccctgctgccctgggcttttggcctgaagcaaattcctgagtggggggtactggggcctgccgcatcctgtcctgtccactgcccacccccgtgtgctggctccctcacttctggctgcagtgggagccgccagtctgacccttgtcaccgcacgctctgcccccaccccgttgcaagaggtcacaccatgtcagcagcct

SEQ ID NO: 89181 - DNA, 447 bp, Homo sapiens
gggtcgaccagatcgttctgaacttgtcaggatgcacattttagaagaaacatttgcagagccatccctgcaggctactcagatgaagttgaaaagagctcgactagcagatgatctgaatgaaaagattgctcaaagacctggtcctatggagctggtagagaaaaacatccttcctgtggactccagtgttaaagaagcaattataggcgttgggaaggaggactatccccacactcagggcgatttctcatttgatgaagacagcagtgacgctttgtctccggaccagcctgcgagtcaggagtcacaggggtcagccgcgtccccaagtgagccaaaagttagtgaatcgccatctcctgtgactacaaacactccagcgcagtttgcttcagtgtccccaacagttcctgaattcttgaaaactcctccaactgcagatca

SEQ ID NO: 89182 - DNA, 388 bp, Homo sapiens
tttgcattcatctctcaaacttagtttttatctttgaccaaccgaacatgaccaaaaaccagaagcgcattcaaccttacctgaaacaaagagcaaaaaaagaactcatgaagctcttttttaaaaaacccctaattatggccccaggggcattgtttggttaaaaggggaccattcaaaaaattttaaaaattccgggggcttgggcccttttcctttgggcctaaaaaaaggaccaactttttttaaaaatcggccctgggaggattttggatttttaacgcccccccctaagggcccaaaatttttgggggattaagaaccctttattttttggactggaaaaagggccccttttcaggggaaattaaaacccccggggaaaccc

SEQ ID NO: 89183 - DNA, 427 bp, Homo sapiens
cttactcacacaggctatgctggtactgccccatcgaccgcagtggttcaccccaggcccaaggctccaggctcaggggccctgtcaggaaggatggagatgggaacttaggctgcggaactatgtgccggaggatgaggacctgaataagaggagggtgccccaggccaaaccggatgcagtgcaggagaaggtgaaggagcagctggaggccgccaagcccgagcccgtcatcgaggaggtggacctggccaagctcgctcctcggaagcctgactgggacctcaagagagatgtggccaagaagctggagaaactactgaagcggactcagagggccattgccgagctgatccgcgaaaggctgaaaggccaggaggacagcctagactctgcagtggatgctgccaccgaacataagacctgt

SEQ ID NO: 89184 - DNA, 446 bp, Homo sapiens
  misc_feature (1)...(446): n = a,t,c or g
ttacacattaatggaccaacaggtggaaataagaattcacttcatgcagatatggatactaatggttatgaaacagataaccttaccactgacccaaaacttgcccatatgactgcaagaaatgaaaatgattttgatgaaaaaagtgagagacctgccaaaaggcgaagggtaaacagcaatggaaaagaaagtccaggttcttctgaatttttccaagaagcagtctcacatgggaaatttgaagaacttgaaaacacagatgactaaattttagacctattttactttctttggagtaaattctggtgtgactaaaattttcagggttgatgggttaccttaaaaagttgatttccttgaagcagtttgaaaatttgaattgagtcttaactttaggaaatgaggtttcataattctgccttttgcagatttttttactttan

SEQ ID NO: 89185 - DNA, 369 bp, Homo sapiens
gcacgagcggtcctcgtcgtggtgagcgcagccactcaggctggtcctgggggtggggctgtaggggaaagtgctaaagccgctgaggtgcagtggctcacgcctgtaatcccagcactttgggaggccaaggcaggtggatcacctgaggtcgggagttcaagaccagcctgaccaacatggagaaaccccatctctactagaaatacaaaattagccaggcatggtggtgcatgcctgtaatcccagctactcgggaggctgaagcaggagaatcgcttaaatccgggaggcagaggttgctgtgagccgagatcgcgccatttccagcctgggcaacaagagggaaactccgtctcaaaaaaaaaa

SEQ ID NO: 89186 - DNA, 1839 bp, Homo sapiens
agccatgttaaccatttgttaatttcttctgaacagatcaagcaaaagtagataatcagccagaaaaattagtgcgtagtgctgaagatgtttccacagtgcctacacaacctgataatccattttctcaccctgacaaactcaaaaggatgagcaagtctgttccagcatttctccaagatgagagtgatgacagagaaacagatacagcatcagaaagcagttaccagctcagcagacacaagaagagcccgagctctttaaccaatcttagcagctcctctggcatgacgtccttgtcttctgtgagtggcagtgtgatgagtgtttatagtggagactttggcaatctggaagttaaaggaaatattcagtttgcaattgaatatgtggagtcactgaaggagttgcatgtttttgtggcccagtgtaaggacttagcagcagcggatgtaaaaaaacagcgttcagacccatatgtaaaggcctatttgctaccagacaaaggcaaaatgggcaagaagaaaacactcgtagtgaagaaaaccttgaatcctgtgtataacgaaatactgcggtataaaattgaaaaacaaatcttaaagacacagaaattgaacctgtccatttggcatcgggatacatttaagcgcaatagtttcctaggggaggtggaacttgatttggaaacatgggactgggataacaaacagaataaacaattgagatggtaccctctgaagcggaagacagcaccagttgcccttgaagcagaaaacagaggtgaaatgaaactagctctccagtatgtcccagagccagtccctggtaaaaagcttcctacaactggagaagtgcacatctgggtgaaggaatgccttgatctaccactgctaaggggaagtcatctaaattcttttgttaaatgtaccatccttccagatacaagtaggaaaagtcgccagaagacaagagctgtagggaaaaccaccaaccctatcttcaaccacactatggtgtatgatgggttcaggcctgaagatctgatggaagcctgtgtagagcttactgtctgggaccattacaaattaaccaaccaatttttgggaggtcttcgtattggctttggaacaggtaaaagttatgggactgaagtggactggatggactctacttcagaggaagttgctctctgggagaagatggtaaactcccccaatacttggattgaagcaacactgcctctcagaatgcttttgattgccaagatttccaaatgagcccaaattccactggctcctccactgaaaactactaaaccggtggaatctgatcttgaaaatctgagtaggtggacaaatatcctcactttctatctattgcacctaaggaatactacacagcatgtaaaagtcaatctgcatgtgcttctttgattacaaggcccaagggatttaaatataacaaaatgtgtaatttgtgactctaatattaaataagatatttgaacaagctaggaaaattgaatttctgctgctgcttcaaagaaaaagctgccccagagcattaaacatggggtattgttaagaagcaaaatgttcttgtttgccatcatgtgtttcacaccacaattctgtgccacagttaagagggtctggtacccttgcaggacctttgtaggttgtgggaaaaagtcgcagaaagatactcaaagtggagcagggaatggagacagacatcagtgatgataaaaaaaaaaaatggaccttaagaaactatttactctgtaatctctaataaaatatggaattccatattagggcaatgagaaaaaaaaaa

SEQ ID NO: 89187 - DNA, 1887 bp, Homo sapiens
taaaatatagtggcgtgcattttaattctcagtccatagctcctaccatagaacagattgaccagtcttttggcgcaacccatcctggagtgtacaactccgctgagcagctcttccatctcaacttcagaggactgtctttctcttttcagttagactcatggactgaggctccaaagtatgagcccaattttgcccatggcctggcttctctccagataccccatggagcaactgtaaaacgaatgtacatctacagtggcaacagcctgcaggataccaaggctcccatgatgcctctgagctgtttcctgggcaatgtctatgctgagagtgtagatgttcttcgagatggaactggacctgcaggtttacgacttcgcctacttgctgcaggttgtggacctggcctattagcagatgccaagatgcgggtatttgaacgttcagtgtattttggtgattcctgccaagatgttcttagcatgcttggctctccacacaaagtcttctataaatcagaagacaagatgaaaattcattctccttcccctcataaacaagttccatcgaagtgtaatgactacttttttaactacttcactcttggagtggacatcctctttgatgcgaatacacacaaagtgaagaagtttgttctacacaccaattaccctgggcattataatttcaacatttatcatcgctgtgagttcaagatcccactagccataaagaaagaaaacgcagatggtcagacagaaacatgcacgacctacagcaagtgggacaacatccaggagctcctgggccaccctgtggagaagcctgttgtcctgcacaggtcttcctccccaaacaacaccaacccatttggttccacattctgctttggtcttcagcgaatgatctttgaggtcatgcagaacaaccacattgcctcggtgaccctgtatggcccccccaggcctggtagccacctgagaacagcggaactcccctagggacaccaccacccatgcccctctgtcccgtggaactgtgcatcacatcctgctcagtgggcctctgtaccaccctgtgggttttcttggacacctggccagtgctgaagggctgttgtgatgttctgaggttgggctcaggctgggtgctctgccatgggctgagtggcccagatattcttctgtccatctttggcctgctggtgccagcaggggacacagactgcaaagagaagcacaaagtttgagccttgattcctggacccaggagctctcaactaacaaggaggcaggagaggtcaacccttgtcccatgcacattgggaagacttggggctctttctgtgactgaggacacaggcacccaggataaggacaaggtcctgcctttggctccacattgccacatgacccttaaggcaagcaggtagcgtgtccatagtacttggttgcgacatttgcactacatccactttagttacttgatgagctggctgtggccagggtggcccacctgcccttccctgttcctttcttgcacgcgctccctgcctgggcacaccaaactggttgaaacacagctttctaccatccaggtacatgcccaggcctggttctcacccctgttggagtcagctttcaagattgcctgtgcccctgctctgccccatcctggctggcagggctgcatgtttccatcctgtttgcctcttttatttaatgccaaagttttagccaaagacatcttcctacttttgttgtgtttcagcattctgttctgcactgtgggctggctctctgccccaaccctgggcactggcccctggctgggccatttcatggctcaaagcctctgggggctcaaggaaggctgggctgctca

SEQ ID NO: 89188 - DNA, 375 bp, Homo sapiens
ttcggctgttactcaaagaaaaatgggaatgttttataaagaggagagtcatgatctgacctagatgccatatatatggtcagcttatatatgaggcttgaagagatttggaaaggtatggaatagtttctgagcagaatgtgagaggaatctgatcagaaattgtcatggactgtcacggagcagacagagccagtctgagatatgatgatgtactatcatgtatgctggcattattttactctgttgttttgttagcagcgattagttattgagatgtggctgtggaagaaacagataataggactggatttgctgaagggcaaggtggtaattcaagtaatgtgctgtagaatctaggctggttaaagattt

SEQ ID NO: 89189 - DNA, 1432 bp, Homo sapiens
atgcaagacttactgtttggcaagggtccaagtggaatactgtcacttcagtcctctcagaagaggtcctggacaataacctgtagtatgctgagcacgttaccaaatccagcgggacgcgtgaggtccgatcgatcggatagaaatggcgttcggcactaccaagatgggcacttcctgcaggcattgttgcaagcgctcgtctataattgcaaaacagttaggcgaagaattgttacgatggttgatgctgagacacgggttaaaggtttcttaagatttgcagatggagaaatggcacacaatgaggctgtctcagatccctcaaagaggcagctagcagtggacctgggaacagaacccagttcccagcctggcttacgggatcagctgggaagggtgtcagtgccttccgaacccggaggtcttaagaggcggcctgccagcgcaagattggagaattggcccttaatgaacacgtggccaataagaccaccgagcctggtattctacaaggaaaggttaatggaccgcggtcccaaggcgcgcgcaccccaaccaggtgaaggagatgggatccacctaatggggcggcaaagacctggtgggaccccttataacgacgtccaagctatccttctgaccgctgacgccgctcatgtaatacccatggccctgggcttggatcgaccagctagagttggtgcccaacacatgcatgagggcgttgtcacagagtctggggtgcgctgtgttgttcattgtaaaaaccctttggagcatctgggaatgtgctgccccacatgtccaggctgtgtgtttgagggtgtgcagtatcaagaaggggaggaatttcagccagaaggaagcaaatgtaccaagtgttcctgcactggaggcaggacacaatgtgtgagagaagtctgtcccattctctcctgtccccagcaccttagtcacatacccccaggacagtgctgccccaaatgtttgggtcagaggaaagtgtttgacctcccttttgggagctgcctctttcgaagtgatgtttatgacaatggatcctcatttctgtacgataactgcacagcttgtacctgcagggactctactgtggtttgcaagaggaagtgctcccaccctggtggctgtgaccaaggccaggagggctgttgtgaagagtgcctcctacgagtgcccccagaagacatcaaagtatgcaaatttggcaacaagattttccaggagtacctcatctcgttggagatgctcaatgacatttgtcaaggtgatgatccttgtcaagatcctgatggatctatacagcttgaagcttttagaagtttttcacaaagctacctttgcaaagaaaaattttctcatttggaagatattcagataaggatgttaatagtgtatgtagttgagccag

SEQ ID NO: 89190 - DNA, 1923 bp, Homo sapiens
  misc_feature (1)...(1923): n = a,t,c or g
aaaagtctgcccttcaacaacgacatctgtatgatcactctcattgtggggtttcggatttcacaagaagtggcaaaccttggtggctgaatgacacatccactgtttcttattcactaccaattaacaacacacatatccaccacagacagaagagatcagtgagcattgaacggtttgtggagacattggtagtggcagacaaaatgatggtgggctaccatggccgcaaagacattgaacattacattttgagtgtgatgaatattgttgccaaactttaccgtgattccagcctaggaaacgttgtgaatattatagtggcccgcttaattgttctcacagaagatcagccaaacttggagataaaccaccatgcagacaagtccctcgatagcttctgtaaatggcagaaatccattctctcccaccaaagtgatggaaacaccattccagaaaatgggattgcccaccacgataatgcagttcttattactagatatgatatctgcacttataaaaataagccctgtggaacactgggcttggcctctgtggctggaatgtgtgagcctgaaaggagctgcagcattaatgaagacattggcctgggttcagcttttaccattgcacatgagattgttcacaattttggtatgaaccatgatggaattggaaattcttgtggacgaaaggtcatgaagcagcaaaattatggcagctcacattactgcgaataccaatcctttttcctggtctgcttgcagtcgagantacatcaccagctttttagagaagtgtgtagagagctctggtgtctcagcaaaagcaaccgctgtgtcaccaacagtattccagcagctgaggggacactgtgtcaaactgggaatattgaaaaagggtggtgttatcagggagattgtgttccttttggcacttggccccagagcatagatgggggctggggtccctggtcactatggggagagtgcagcaggacctgcgggggaggcgtctcctcatccctaagacactgtgacagtccagcaccttcaggaggtggaaaatattgccttggggaaaggaaacggtatcgctcctgtaacacagatccatgccctttgggttcccgagattttcgagagaaacagtgtgcagactttgacaatatgcctttccgaggaaagtattataactggaaaccctatactggaggtggggtaaaaccttgtgcattaaactgcttggctgaaggttataatttctacactgaacgtgctcctgcggtgatcgatgggacccagtgcaatgcggattcactggatatctgcatcaatggagaatgcaagcacgtaggctgtgataatattttgggatctgatgctagggaagatagatgtcgagtctgtggagggggcggaagcacatgtgatgccattgaagggttcttcaatgattcactgcccaggggaggctacatggaagtggtgcagataccaagaggctctgttcacattgaagttagagaagttgccatgtcaaagaactatattgctttaaaatctgaaggagatgattactatattaatggtgcctggactattgactggcctaggaaatttgatgttgctgggacagcttttcattacaagagaccaactgatgaaccagaatccttggaagctctaggtcctacctcagaaaatctcatcgtcatggttctgcttcaagaacagaatttgggaattaggtataagttcaatgttcccatcactcgaactggcagtggagataatgaagttggctttacatggaatcatcagccttggtcagaatgctcagctacttgtgctggagtggccaccaatgcaattctttacctctggctgggagagcaggacagttggcttccttcaaagccaa

SEQ ID NO: 89191 - DNA, 1820 bp, Homo sapiens
cctccccacatcatcttcatcctcacggacgaccaaggctaccacgacgtgggctaccatggttcagatatcgagacccctacgctggacaggctggcggccaagggggtcaagttggagaattattacatccagcccatctgcacgccttcgcggagccagctcctcactggcaggtaccagatccacacaggactccagcattccatcatccgcccacagcagcccaactgcctgcccctggaccaggtgacactgccacagaagctgcaggaggcaggttattccacccatatggtgggcaagtggcacctgggcttctaccggaaggagtgtctgcccacccgtcggggcttcgacaccttcctgggctcgctcacgggcaatgtggactattacacctatgacaactgtgatggcccaggcgtgtgcggcttcgacctgcacgagggtgagaatgtggcctgggggctcagcggccagtactccactatgctttatgcccagcgcgccagccatatcctggccagccacagccctcagcgtcccctcttcctctatgtggccttccaggcagtacacacacccctgcagtcccctcgtgagtacctgtaccgctaccgcaccatgggcaatgtggcccggcggaagtacgcggccatggtgacctgcatggatgaggctgtgcgcaacatcacctgggccctcaagcgctacggtttctacaacaacagtgtcatcatcttctccagtgacaatggtggccagactttctcggggggcagcaactggccgctccgaggacgcaagggcacttattgggaaggtggcgtgcggggcctaggctttgtccacagtcccctgctcaagcgaaagcaacggacaagccgggcactgatgcacatcactgactggtacccgaccctggtgggtctggcaggtggtaccacctcagcagccgatgggctagatggctacgacgtgtggccggccatcagcgagggccgggcctcaccacgcacggagatcctgcacaacattgacccactctacaaccatgcccagcatggctccctggagggcggctttggcatctggaacaccgccgtgcaggctgccatccgcgtgggtgagtggaagctgctgacaggagaccccggctatggcgattggatcccaccgcagacactggccaccttcccgggtagctggtggaacctggaacgaatggccagtgtccgccaggccgtgtggctcttcaacatcagtgctgacccttatgaacgggaggacctggctggccagcggcctgatgtggtccgcaccctgctggctcgcctggccgaatataaccgcacagccatcccggtacgctacccagctgagaacccccgggctcatcctgactttaatgggggtgcttgggggccctgggccagtgatgaggaagaggaggaagaggaagggagggctcgaagcttctcccggggtcgtcgcaagaaaaaatgcaagatttgcaagcttcgatcctttttccgtaaactcaacaccaggctaatgtcccaacggatctgatggtggggagggagaaaactgtcctttagaggatcttccccactccggcttggccctgctgtttctcagggagaagcctgtcacatctccatctacagggagttggagggtgtagagtcccttggttgaacagggtagggagcctggataggagtgggtgggaataaaccagactgggatgcctgtgtctcagtcctgcctcctcacggacttgctctgtgacctcaggtgacccacatgagctt

SEQ ID NO: 89192 - DNA, 869 bp, Homo sapiens
ttttttttttttcactgagtaaacacagtttattactgaactgcactttcaccttcacacagactatttcaaagagctggaacaagtgtggggtgggggttgggggaggggcagatgcccctcaggagccaggaccctcggccagcttccctggaccagggcaggggagggagcatcaggccgtccaatctccgggcaccagctctccacgtgcacgcgcactgcaagccagcagctcctcacacataaatacagacacgcttaacaaaaatagtatatcatcttcacaaggaataaaaactaagtctcaaatatgtacagcagaagagccccggggtggcttgggacccccaaggggattgagacagggccaagggttggaagcagaagagagagggagggtagagtggatggtcagtgtctggtcatttccgactgaagagtgagcccagcagaaccacgccggccacagtcatgcccgtcaggaaccagcggttgaagcgttcctggccctttcggctctcggctgctgcattgttcccatagagttccacaaaagtatcctgcagggagagagaaggaaggtgcagttttagtcctcagagagtgatgtaggtgggtggggaaaggggccatctgcatgctatggccttggtgatgtgaaaaactgtagccatctgtgcccactctgggccaggtaaagggctaagggtggtcctctttcttgaccctccattggtgataatcaaaccatgttactgctgagaaacaggtagagaggaggaaagtgccctgtctgatgtaagtcaagaagtagcacttactccagaatacaaggtgggaacgagatgggcagggtcagggaactg

SEQ ID NO: 89193 - DNA, 498 bp, Homo sapiens
cacatgtagtttatttatttaaaaaaatagagacaggggtcttgctatgttgaccaggctagatatgaactcttgggctcaagcgatcctcctgcctcagcctcccgagtagctgggactacaggcacacgccactgcgcccggctagtttacttctttcagaacatttgttatcagcaaatttaaacatttcaacaaatatttcagtttccatttggaaacaaaattcttgtttgaaaagctgactggaaacctgtgagaatgggagttccaccctcctgtggggatggaggttgaaacagcaccagaggcttcaagaccagtctcctctcatttcggggcagtaagatacatttagcttacttaaacagactgtgctggcagagcaagtcagtggcagagctgaagttcagcattgtcctgtggaactcctggatttttctcttaatttgcttcatggcaggagtgttacatttagtcttgaaggtcatttgtttc

SEQ ID NO: 89194 - DNA, 381 bp, Homo sapiens
  misc_feature (1)...(381): n = a,t,c or g
ccgaggagtggcggggaggctgagcccggggatggcgcgccaggtgtccatcaccttcaaggacttggccgtgcggttctcggaggaggagtggcggctcctggaggaggggcagagggagttctaccgagacgtgatgcgggagaactacgagacgctggtctctgtggggacagctgagctgctccccctctctgctttcctgtcaccctcanagcctggaagagctgttgggggagggagccacgctgatgaggggcaggagcctgctgggtgtggagatccccaggggggacagcctcgggacagcctgcacctcacagnccttggtgcaacttgggaaaggagaatccacaggtctttgtttggagaagtcaaggg

SEQ ID NO: 89195 - DNA, 364 bp, Homo sapiens
gattaggaaactacttcaatattcaggtagattatttgtatagcggggatgataagagtacctaacacacagagcctgcctgaggaataaacatactgaatattgaagtagttttctaatctgccaaggtatagggcaagcgagtgacagtgctataattgaaacctaggatatcttgctgaacacaccatgctgctggagacataatgctcccagccagctttgctttactgattcttgtttcctccttatttcctgataatggactcccagtgctgacctctgaggggacccgttctatactgactggcttgagtgatctcagcttgtgatgtgcccatgaccactttggtcagaatggcag

SEQ ID NO: 89196 - DNA, 391 bp, Homo sapiens
gtctgagatttctgaagcgtggggcttgtgatgttaggtgaggcagggcactagagaaagtcgcatcacagagcccggaggtcatttctgccgtccctccttcccacctgtctctgcagtgctggggcttcagtttggcctggtgtcttactttgcaccttgtcagcgcttgtcagccttgttctaagggagaggagagtttgcctgggcaggcagcagggtagagctgcaaccgaatacagtagttttgttttcattgcattgtacaactaccattttacttctgccaggtaattcttgctttctacgtgtggtagagatgagaggtttcctttctaataagtttatttttattatttggccaggcatggtggctcacacctattatccc

SEQ ID NO: 89197 - DNA, 364 bp, Homo sapiens
agcaggctcagaatctgcccccattgcctcacccatcccacaggacagcctaagagaggggtctactcctcctccccttccctctgtccccttcctccccacccctgcccctcacctatccataggcctccacagcaggcttccagagatgcttgaggccaagcccctcgcagtcataaattatggtgatggtctccaccttcctccccaactgcagggaacagagagcaggaagtcttgtcaggctgtcctacttcagaagcccgttccagtccaggccaaatgattgcactgtgcatccagagagcaatcagagctagttagggccggacctagagttttccaaactgagataatcacccca

SEQ ID NO: 89198 - DNA, 183 bp, Homo sapiens
ttttttttttttaaaaaaaaattttctttttggggcccagggcggaaataagggggagcaattcgggccaaggagacacccggcctgggtgggtaagaaattttttggcccccaaccccccaaaaggggggatttaaaaggggggcacacctgggccacttagggtttttcttaaaaaaaagg

SEQ ID NO: 89199 - DNA, 378 bp, Homo sapiens
gggagactgtgacctactcttttgaactgtcagggtatatgtgtactacgatgtatgttgctataattggcaaagcctataacaaggatttttatttaaattaatcttttgaagatatgaaaccagttctacatcagctggtgatcgatatgattccttgctgggtcgctctggatcatacagttacttagaagaaagaaaaccttaccgccccaggctagaaaaggatgactcaactgactttaaaacggtacttgcgttatttagttatatttaataaaaagtcatcttttatgttgagatactcattcaaatattattgtaaaaactcataatgaaaagagtattctgaaataacttattttcagttttcggcag

SEQ ID NO: 89200 - DNA, 656 bp, Homo sapiens
  misc_feature (1)...(656): n = a,t,c or g
tgagcttcaataccctggatgtctgcatgtgccagaaagcacgcttgggggaaacaggagagaaaagctccgtggcaagccctcctctctcctctgagtgctcttggctggattcaggccgtgcatttatgtgcttgtcgtaaatcactgttaatgtctttggtaaagggctccaacagtagactccctctccttcacatccgcttcctctggccacagggtcatttttcttcatgtacaaagaaaacacaggaaactctgcacggccatgaggatgatgtctctgatggaggaaaagtgcggcctggttcctctccattagcaaggggcggaacctgctttatggtggagctggacagggagggccttcctcagggactagagcagacaagacacacttctgtgctggaaggagaaaaacagcagcttccctcctagtccctgtcacttggtccaagcagcctggggaaaccaaacttctgtcagtccatttctaatgcagcctccaaatgatccgcacggggctctgtgacaaggtgtaggaaaactgacttttcactttcttccttctttatggaaagttacaaagagtaatgaattgcaggccagatattagatattatatcataactcantgacagntttcaaaaaaaaaa

SEQ ID NO: 89201 - DNA, 1227 bp, Homo sapiens
atgacagttcaagaagaagaaagagagatttacagacagctgctacagatggtcacagggaaacagtttactatagccaaacccaccacacattttcctttacacctgtctcgatgtcttagttccagtaaaaatactttgaaagactcactgtttaaaaatggaaactcttgtgcatctcagatcattggctctgatacttcatcatctggatctgccagcattttaactaaccaggaacagctgtcccacagtgtatattccctatcttcttataccccagatgttgcatttggatccaaagattctggtactcttcatcatccccatcatcaccactctgttccacatcagccagataacttagcagcttcaaatacacaatctgaaggatcagactctgtgattttactgaaagtgaaagattcccagactccaactcccagttctactttcttccaggcagagctgtggatcaaagaattaactagtgtttatgattctcgagcacgagaaagattgcgccagattgaagaacagaaggcattggccttacagcttcaaaaccagagattgcaggagcgggaacattcagtacatgattcagtagaactacatcttcgtgtacctcttgaaaaggagattcctgttactgttgtccaagaaacacaaaaaaaaggtcataaattaactgatagtgaagatgaatttcctgaaattacagaggaaatggagaaagaaataaagaatgtatttcgtaatgggaatcaggatgaagttctcagtgaagcatttcgcctgaccattacacgcaaagatattcaaactctaaaccatctgaattggctcaatgatgagatcatcaatttctacatgaatatgctgatggagcgaagtaaagagaagggcttgccaagtgtgcatgcatttaatacctttttcttcactaaattaaaaacggctggttatcaggcagtgaaacgttggacaaagaaagtagatgtattttctgttgacattcttttggtgcccattcacctgggagtacactggtgtctagctgttgtggactttagaaagaagaatattacctattacgactccatgggtgggataaacaatgaagcctgcagaatactcttgcaatacctaaagcaagaaagcattgacaagaaaaggaaagagtttgacaccaatggctggcagcttttcagcaagaaaagccag

SEQ ID NO: 89202 - DNA, 1156 bp, Homo sapiens
gcaggaaccgcccgccgcgcccccgagagctctcggcgccgcgcagtcgccgctgggcaccccgagaccatggggaagctcgtggcgctggtcctgctgggggtcggcctgtccttagtcggggagatgttcctggcgtttagagaaagggtgaatgcctctcgagaagtggagccagtagaacctgaaaactgccaccttattgaggaacttgaaagtggctctgaagatattgatatacttcctagtgggctggcttttatctccagtggattaaaatatccaggcatgccaaactttgcgccagatgaaccaggaaaaatcttcttgatggatctgaatgaacaaaacccaagggcacaagcactagaaatcagtggtggatttgacaaagaattatttaatccacatgggatcagtattttcatcgacaaagacaatactgtgtatctttatgttgtgaatcatccccacatgaagtccactgtggagatatttaaatttgaggaacaacaacgttctctggtatacctgaaaactataaaacatgaacttctcaaaagtgtgaatgacattgtggttcttggaccagaacagttctatgccaccagagaccactattttaccaactccctcctgtcattttttgagatgatcttggatcttcgctggacttatgttcttttctacagcccaagggaggttaaagtggtggccaaaggattttgtagtgccaatgggatcacagtctcagcagaccagaagtatgtctatgtagctgatgtagcagctaagaacattcacataatggaaaaacatgataactgggatttaactcaactgaaggtgatacagttgggcaccttagtggataacctgactgtcgatcctgccacaggagacattttggcaggatgccatcctaatcctatgaagctactgaactataaccctgaggaccctccaggatcagaagtacttcgcatccagaatgttttgtctgagaagcccagggtgagcaccgtgtatgccaacaatggctctgtgcttcagggcacctctgtggcttctgtgtaccatgggaaaattctcataggcaccgtatttcacaaaactctgtactgtgagctctagactctagatagtaaaaaaaaaa

SEQ ID NO: 89203 - DNA, 1189 bp, Homo sapiens
gcaaccacgattacgctaagcttggcacgaggcgagtgcaagtccaaacggagctgagctggcccgggtcaggcggcagctggacgaggccaagaggaagatccggcagtgggaggagtcctggcagcaggtgaagcaggtctgcgatgcctggcagcgagaggcgcaggaggccaaggagcgtgcccgtgtggccgatagcgaccggcagctggcgctgcagaagaaggaggaggtggaggcacaggtgaagcagctgcaggaggagctggagggcctgggcgtagcctccacactgccggggctgcggggctgtggggacatcggcaccattcccctgccgaagctgcactcgctgcagagtcagctgcgcctggacctggaggcggtggacggcgtgagtcctgctctgggcagggtgatcttccagctccgcgccaagcagtgtgtggcctgccgggagcgggcccacggtgctgtcctgcggccctgtcagcaccacatcctctgtgagccgtgtgcggccaccgcacctgagtgcccctactgcaagggccagcccctgcagtggtgacctcagcggggacagccacctcctgctgggcaccctggctccagcgctcctcctgaccacggacatgtcgtcactcgcttctggtgccaccgacgtgaggaccgaggctgggagcccttcctgttacacgttatcatgaggctgggagccccgcctgcgcttggcctgacagcctttcctgtcacacgttgtcacctatctagtcctaccgacggtttcaaggtattttcctcaaaaaccttaaatgcaaacccacagaacccgcctgcctgtccctgaggggcctggtgcctccgggatccacgcggcgctgtgatcacagcagtttgtggtcctgacactactgtgactaggccactgggagctggggtctttcaaagcactttgtaaaccgaggaatttagttagaggttataaattgctctaagctgctttctgtttttttttaatatgcgataatatgaagctttatatgtgtactgtgaacttaaatatttcatatcagtttattgtcaattcatagtatgctaaatatattagatttcatattctgaaactagtacttatgaaatgagtgtttatctagtagtaagacctaggatttttacattttcc

SEQ ID NO: 89204 - DNA, 407 bp, Homo sapiens
gtttttgtttctcaggctttcttatattgagcatgtgttcctttctgtctttgtggcattaagtttcattatgtgtgtccccaagccttttcctggaatctcaacagaggatgggttttagctctgttggaagttacattccattaagtgtgctcaaagatctgctttactacacactctctcctgcccaattcttaggccagccccttttcctctccctactcttgtctaattagtcctctccttcaaaaggcagccctttcatgggattctgctccccgaagtagtgggccctgacttaagggccagcccatctttgtccatggccatacttatcagggatgtgactatttagctctttaaccaggagtctgtcctttctagagaccttccagcatactattaat

SEQ ID NO: 89205 - DNA, 730 bp, Homo sapiens
ctctgctctcgcgcctctaggggctcaagcactgctccgggagcgctgaattttgaggaagagggcagaacttcagtaaggagacctgtctgggcaacggtttcaggacacgcggtggggaaagcgactagcctccggcggggcagggcgggctgtccttacctgcagaaccaccggccacgatctgccgagaagcctcgcgcactaagctgacttcaggcttggcggacatcttcgccaggcgggaggacaagggagtgggctgagatgcgtcaacgagctcgcagcctgcacagcctactgatccagagagccccggctgggctggtcctcaagcgcgttggctccctgtggagcagcaatccggcgactgctggaaagcgagggttcgaggcgcagattcgtcgcgcgatctccggcgcgtcggaacctgttcgcagcgctctcgcagaggcgccctcggctccgaaaatgtctctggaaagaagacccgcggatgggtttgggttggctcaccgcagcggctcaggctttgtctcctagattggcgcccacgaccttctctatcaggagcctccggtagtttgtcaaactagacggttgcctctgataactcaagtgaagtgacccaggcctggagcgccaagtacaaagcggggacgacacttgcacctcccggcaagccagagcacagtgaggttcaaaagaagggacaagtgaataaattcct

SEQ ID NO: 89206 - DNA, 350 bp, Homo sapiens
  misc_feature (1)...(350): n = a,t,c or g
ctttttcagccagcttcttctggatagtttctaacggggtcccttctgtcttccggtgacagtcatctacaatttccattttacgatgaccatgctcaagtgcatgtccatgggccatgtctgacagcaatatgacctctcaagacactctactctctctctgtgagatcttaacggtagttttccatatgtcctatacatcctttataacctcagacccttccatcttaatttgtgttctacctgcctttcatattagaggcaaggctcaactgtttggagcttcttggctatttgctggagtttcggggggtgcactgaaagctgctgatgcactcttcattggtgan

SEQ ID NO: 89207 - DNA, 1353 bp, Homo sapiens
cggcacgaggaagctctttccactacggctgtattgcactggtgagtccgggcccatggatgagaaattgatgcgaggatcaatacaagcttaatttgaattaataaaaggaaatattttctccctttgaacttatctccgtaaagccattgtgcctcctcttgggggtcacgtgttcacaatcaatggcctttgaggagctcttgagtcaagttggaggccttgggagatttcagatgcttcatctggtttttattcttccctctctcatgttattaatccctcatatactgctagagaactttgctgcagccattcctggtcatcgttgctgggtccacatgctggacaataatactggatctggtaatgaaactggaatcctcagtgaagatgccctcttgagaatctctatcccactagactcaaatctgaggccagagaagtgtcgtcgctttgtccatccccagtggcagcttcttcacctgaatgggactatccacagcacaagtgaggcagacacagaaccctgtgtggatggctgggtatatgatcaaagctacttcccttcgaccattgtgactaagtgggacctggtatgtgattatcagtcactgaaatcagtggttcaattcctacttctgactggaatgctggtgggaggcatcataggtggccatgtctcagacaggtttgggcgaagatttattctcagatggggtttgctccagcttgccattactgacacctgcgctgccttcgctcccaccttccctgtttactgtgtactacgcttcttggcaggtttttcttccatgatcattatatcaaataattctttgcccattactgagtggataaggcccaactctaaagccctggtagtaatattgtcatctggtgcccttaatattggacagataatcctgggaggcttggcttatgtcttccgagactggcaaaccctgcacgtggtggcgtctgtacctttctttgtcttctttcttctttcaaggtggctggtggaatctgctcggtggttgataatcaccaataaactagatgagggcttaaaggcacttagaaaagttgcacgcacaaatggaataaagaatgctgaagaaaccctgaacatagaggttgtaagatccaccatgcaggaggagctggatgcagcacagaccaaaactactgtgtgtgacttgttccgcaaccccagtatgcgtaaaaggatctgtatcctggtatttttgagaaaaaaaaatctcaaggaaaaggcataaaaatgattgctacacaaaagtgaccaaattttaagaagccttcatgagctgattggtggggaaattcaga

SEQ ID NO: 89208 - DNA, 473 bp, Homo sapiens
cggtacgaggataaattcaaaaggcccattggatcttgggagtgttcagtatgctgtgtttctaataatgcagaagacaataagtgtgtgtcctgtatgtctgagaaaccaggaagttcagtacctacttcaagtagcagcactgtacctgtctctctgccttctggaggctctctaggattggaaaagttcaagaaacccgagggaatctgggactgtgaattgtgcctagtgcagaataaggcagactctaccaaatgtttggcatgtgaaagtgcaaagccaggcacaaaatctgggtttaaaggctttgacacatcttcctcatcttcgaactcagcagcctcctcatccttcaaatttggtgtctcatcatcctcttctgggccttctcagactttaacaagcactggaaattttaaatttggagatcagggaggattcaaaataggtgtgtcatctgattctgggtc

SEQ ID NO: 89209 - DNA, 2630 bp, Homo sapiens
tttcgtgccacagctggtttagggccccgaccactggggccccttgtcaggaggagacagcctcccggcccggggaggacaagtcgctgccacctttggctgccgacgtgattccctgggacggtccgtttcctgccgtcagctgccggccgagttgggtctccgtggttcaggccggctcccccttcctggtctcccttctcccgctgggccggtttatcgggaggagattgtcttccagggctagcaattggacttttgatgatgtttgacccagcggcaggaatagcaggcaacgtgatttcaaagctgggctcagcctctgtttcttctctcgtgtaatcgcaaaacccattttggagcaggaattccaatcatgtctgtgatggtggtgagaaagaaggtgacacggaaatgggagaaactcccaggcaggaacaccttttgctgtgatggccgcgtcatgatggcccggcaaaagggcattttctacctgacccttttcctcatcctggggacatgtacactcttcttcgcctttgagtgccgctacctggctgttcagctgtctcctgccatccctgtatttgctgccatgctcttccttttctccatggctacactgttgaggaccagcttcagtgaccctggagtgattcctcgggcgctaccagatgaagcagctttcatagaaatggagatagaagctaccaatggtgcggtgccccagggccagcgaccaccgcctcgtatcaagaatttccagataaacaaccagattgtgaaactgaaatactgttacacatgcaagatcttccggcctccccgggcctcccattgcagcatctgtgacaactgtgtggagcgcttcgaccatcactgcccctgggtggggaattgtgttggaaagaggaactaccgctacttctacctcttcatcctttctctctccctcctcacaatctatgtcttcgccttcaacatcgtctatgtggccctcaaatctttgaaaattggcttcttggagacattgaaagaaactcctggaactgttctagaagtcctcatttgcttctttacactctggtccgtcgtgggactgactggatttcatactttcctcgtggctctcaaccagacaaccaatgaagacatcaaaggatcatggacagggaagaatcgcgtccagaatccctacagccatggcaatattgtgaagaactgctgtgaagtgctgtgtggccccttgccccccagtgtgctggatcgaaggggtattttgccactggaggaaagtggaagtcgacctcccagtactcaagagaccagtagcagcctcttgccacagagcccagcccccacagaacacctgaactcaaatgagatgccggaggacagcagcactcccgaagagatgccacctccagagcccccagagccaccacaggaggcagctgaagctgagaagtagcctatctatggaagagacttttgtttgtgtttaattagggctatgagagatttcaggtgagaagttaaacctgagacagagagcaagtaagctgtcccttttaactgtttttctttggtctttagtcacccagttgcacactggcattttcttgctgcaagcttttttaaatttctgaactcaaggcagtggcagaagatgtcagtcacctctgataactggaaaaatgggtctcttgggccctggcactggttctccatggcctcagccacagggtccccttggaccccctctcttccctccagatcccagccctcctgcttggggtcactggtctcattctggggctaaaagtttttgagactggctcaaatcctcccaagctgctgcacgtgctgagtccagaggcagtcacagagaccctctggccaggggatcctaactgggttcttggggtcttcaggactgaagaggagggagagtggggtcagaagattctcctggccaccaagtgccagcattgcccacaaatccttttaggaatgggacaggtaccttccacttgttgtatttattagtgtagcttctcctttgtctcccatccactctgacacctaagccccactcttttcccattagatatatgtaagtagttgtagtagagataataattgacatttctcgtagactacccagaaacttttttaatacctgtgccattctcaataagaatttatgagatgccagcggcatagcccttcacactctctgtctcatctctcctcctttctcattagccccttttaatttgtttttccttttgactcctgctcccattaggagcaggaatggcagtaataaaagtctgcactttggtcatttcttttcctcagaggaagcctgagtgctcacttaaacactatcccctcagactccctgtgtgaggcctgcagaggccctgaatgcacaaatgggaaaccaaggcacagagaggctctcctctcctctcctctcccccgatgtaccctcaaaaaaaaaaaaatgctaaccagttcttccattaagcctcggctgagtgagggaaagcccagcactgctgccctctcgggtaactcaccctaaggcctcggcccacctctggctatggtaaccacactgg

SEQ ID NO: 89210 - DNA, 369 bp, Homo sapiens
cctgtgtggcaacctcatgcttgtggaggtgattccaaaagagccgctcagcttcagcgtcttccactacaagaatcccaagctgcagcacacagtccaggtagcagccgggccctggcctctccgcaaggcccctttgtgtaatgatgagtgctgtgtaccatgtggctttttgagagcgttctggccacatggtcatttcccatctcatcagagggtcctgttggtggtggaatcaagttgtctgactgtctacatctcgtcttggcaggccaaatcccagcaagacaaacgcctctgggttctgcacctaaagagactgattctggagaaccatgcagccaagattccagctaaggtaggacactg

SEQ ID NO: 89211 - DNA, 384 bp, Homo sapiens
caattatacagatcaataggatacattacatacctacggcttcagaaatttgcaggtaaggctgggattcagatttgaacctcccaacatcatcatccatgtgtttccattatacaatgtagcttcccagattgttacaatatatgagatgtatgtttgtaaagtatatttttacaaactactgttatttgctgaattattttagcttgtttggatcgaaacccccacaaaccccacccagaaggtgattgacattgaaggctgtgcacatattgtccataagcatggagacattattttggtcgtggataacacttttatgtcaccatatttccaggtaaatgaaaataattttttttggcacaattagtagaccacatatat

SEQ ID NO: 89212 - DNA, 368 bp, Homo sapiens
agcaggtgtgacagagcagtgaggacctcattcaggcctctcaggcaggagacactgcagagccaaggtgtgaaatctcttttctcttttcttcccctctctttcccgcctccactcctccccaattaaaaatctttccattaggtgggaaagacgggctcctatttacagttcctcaggatcctcttccgcatgctcatcaggctcctggaggtggacgtgtatgatgaggaggagatcaacaccggtgagtgctgagcccagggagtgggcagaggggcaagagacaaagacattgaattgcaaatcccgggaacttgcttttggcttctgggatttctacagtacctaacctgcagagttattgg

SEQ ID NO: 89213 - DNA, 358 bp, Homo sapiens
atgcaggcttgtggtaccatcaagctctatgagaattggatctggcttttaatgattttattttgtaaaaaacagtaacaaactaaaagctgctcaaacctaaccattccaagattgtgatgacggcagataaattggctcataaggttttgtggattctcaagactccaccgcccaacataaataggatattttaactttcgcaccaataccaaccaggaagggggaaaaaagtatatagactccctgggaaatagaacgccccttataaaatggcagaaatccatcaatttaaaacacatgttttgtgaacctaccttgccaggttattgactcagattggataaacatatttatt

SEQ ID NO: 89214 - DNA, 841 bp, Homo sapiens
tataactaaagggtccatttcttttaaattgatctcagacacacagaagtatatcttaactaaaactttcttcccgaaaagaagcatttttaaaaggtaccaagggctgttattcttagaatgatttgatgaaatcaaagacaaaaatagtttaggcttttgattagatttcaatatgccactcttactggggagctttctcttgtttgggcatgacaggatttttgccatgagaaaccttctagagcttccgccccctcagttctcactctccgtcacttacccttcaaaagactctgaatagcaattacaatacagttaagctttctttgggggaccctcatatagtgggcacactgaatatgtggatttaatattagaggcttgactatttgaatgtgattgcaaaagtcagtgaggactctgttattactacgaatttgtaggttggtatttagcttatcaagtgatgaagctagtgagtgagcctgtttaccaccaagtacccacgtcttcctttggctctgttgtcctctgcttgtttcatcttgtgacttaaaacacacacaccttatccaactgtttatgctaatgatgaaagagaagtcaaagtaaataagcttaataaaataatagtttgggcctgcgcagtggctcacccctgtgatcccagcactttgggaggccgaggtgggcagatcacctgaggttgggaattcgaaaccagcctgaccaacgtggagaaaccccgtctctactaaaaatacaaaattaactgggcgtggtggcgcatgccagtagtcccagctgctcggggggctgaggcaggagaattgcttga

SEQ ID NO: 89215 - DNA, 342 bp, Homo sapiens
gcacagctaataaatcctcacaacattttgtcatccaaaatcccccccaactcttttttgttccaggaaaaggtttatggcaaagagccatcctccctcatagagataggtcagattggctgtccactttctgatgactcctatcacacttgcatggaggcctcccttgttcacctgtgacaaggccaaatatagacctttcttctttggcttgaacctgctcaaaggccagagacagaccctccacctctcttttgtttgcctcacgaatgattatctgagattagaactacctgtacccttgaatatagctagacatagagataaacattttcttttcgg

SEQ ID NO: 89216 - DNA, 1559 bp, Homo sapiens
tgtcgtcttgcccactccgcgcgcggggctagcgcgggttttatcgacgggagccctcaagggacatggcaactgcagcggcgccggcgggcggcgcccgaaatggagctggcccggaatggggagggttcgaagaaaacatccagtggaagaacaaagccctaaaccctgggatgagcagaggacttaatggatggaacagaaaagtcctgcactctaggagccattgtcttcacagggcggaggctcagctgtgattgacatggagaacatggatgatacctcaggctctagcttcgaggatatgggtgagctgcatcagcgcctgcgcgaggaagaagtagacgctgatgcagctgatgcagctgctgctgaagaggaggatggagagttcctgggcatgaagggctttaagggacagctgagccggcaggtggcagatcagatgtggcaggctgggaaaagacaagcctccagggccttcagcttgtacgccaacatcgacatcctcagaccctactttgatgtggagcctgctcaggtgcgaagcaggctcctggagtccatgatccctatcaagatggtcaacttcccccagaaaattgcaggtgaactctatggacctctcatgctggtcttcactctggttgctatcctactccatgggatgaagacgtctgacactattatccgggagggcaccctgatgggcacagccattggcacctgcttcggctactggctgggagtctcatccttcatttacttccttgcctacctgtgcaacgcccagatcaccatgctgcagatgttggcactgctgggctatggcctctttgggcattgcattgtcctgttcatcacctataatatccacctccacgccctcttctacctcttctggctgttggtgggtggactgtccacactgcgcatggtagcagtgttggtgtctcggaccgtgggccccacacagcggctgctcctctgtggcaccctggctgccctacacatgctcttcctgctctatctgcattttgcctaccacaaagtggtagaggggatcctggacacactggagggccccaacatcccgcccatccagagggtccccagagacatccctgccatgctccctgctgctcggcttcccaccaccgtcctcaacgccacagccaaagctgttgcggtgaccctgcagtcacactgaccccacctgaaattcttggccagtcctctttcccgcagctgcagagaggaggaagactattaaaggacagtcctgatgacatgtttcgtagatggggtttgcagctgccactgagctgtagctgcgtaagtacctccttgatgcctgtcggcacttctgaaaggcacaaggccaagaactcctggccaggactgcaaggctctgcagccaatgcagaaaatgggtcagctcctttgagaacccctccccacctaccccttccttcctctttatctctcccacattgtcttgctaaatatagacttggtaattaaaatgttgattgaagtctggaactgcaaaaaaaaaa

SEQ ID NO: 89217 - DNA, 357 bp, Homo sapiens
agcacatattcagatgcaactacagcacgaattacaacagcaagccgcattctttcagcctcagtttctaaacccagcctttttggctcattttcctatgaccccagaagcactgctgcagtttcagcagcctcagtttctctttccattttatatacctgggacggagttcagcttggggccagatttgggcttgccaggctctgccacatttgggatgcctggcatgacaggaatggctggctccttgcttgaagacctaaagcagcagattcaaacccaacatcacggtgggcaaactcaactccagatactacagcaacaagcacaacaataccaagccacacagccccagct

SEQ ID NO: 89218 - DNA, 375 bp, Homo sapiens
  misc_feature (1)...(375): n = a,t,c or g
tcattagttgggataatctcatgtgcccacccagctatgagtggaatgaggggagtgtttatggccatgaccacccccagggcatggagcaggaggtcggtgcaggatgagggctgggggcctgctagtcatgtgcttcctccttccactcccagtttccaggaaggccacccccagtgccctggttgtcctctcctgcatccggagatgtttggcttcaaagaagaaggggtgagggaggccggtccatgcccaagcatggtgcaatctcttggcatcccttccctctcctgatttcagagaagntgatgacgcctgagatgttttcagaaatcctctgtgacgatctggatttgaacccgctgacgtttgtgc

SEQ ID NO: 89219 - DNA, 2886 bp, Homo sapiens; identical to SEQ ID NO: 63970

SEQ ID NO: 89220 - DNA, 677 bp, Homo sapiens
ccgctctcacataggagtgttattcagtgggaagttttgctctctgcatcgcaccgcagcccctcagccatgaactcagcaaacactgtcccattttgcccccagtaacaagcacaggggcaccatcacaggctagtacccagtgtgaactaagtcttgggaacttactggaattgttggaagatatgcccctttttagtaatgcacatggctgtaaatattaggtacaatttgatttcagactcaattcattatgtgttttggctcagctgtggcctgcatatggtgttgctgatatagaaatgaaaatgctggtgagccacagaaagaaaaatcctgtgttttctgaaagcttcaaacacctttggccttgttccttaatcacctgggaggaagagaacctacaaaaactggaaacgcagtggccagcaaccagcccttgagaggcttgctgagctgtgagggtctggaggaggaagaagctctacattgtttctgcagcccccgtgcaaaacaatgttgaattccagcgtgatattgaaatgaatgtattttattttaatgttaaaacttaaattttttattaagccctttgttcaccaatggaaacaacgaaatgaccaattatttaaaaattttagattttataaccttgctgccctctaagaaaaaaaaaa

SEQ ID NO: 89221 - DNA, 423 bp, Homo sapiens
gttacttgagtatattgcatccaggtagggagcacagttaggtagcgagcacatccaggtagtgagcacccaatagtcagtttttcaacccttgcccatatctatcccaaggaaaagaagtaggtagatactctgccctctgacttttcctcagttccactgccaggccatcaggaatgcgatccacctcctagtcacactgctgacccagtgttgtggctattcagatcagacaggtacctcttcatctgcaggaacgttggtgttccaagtagagagagagtgtgactctaccccacatgcaagcctgaacctggagggcactcttcctgtggggatgcagtcaccctgacgtgttccagaaagactgtctaaaggtgcacccacatgaagctcccatgggagaagccccagctctgtctg

SEQ ID NO: 89222 - DNA, 1830 bp, Homo sapiens
gattcttttgagtctattttacgccttatctttgaaattcaccactcgggtgagaaaggtgacattgtagtctttctggcctgtgaacaagatattgagaaagtctgtgaaactgtctatcaaggatctaacctaaacccagatcttggagaactggtggttgttcctttgtatccaaaagagaaatgttcattgttcaagccactcgatgaaacagaaaaaagatgccaagtttatcaaagaagagtggtgttaactactagctctggagagtttttgatctggagcaactcagtcagatttgttatcgatgtgggtgtggaaagaagaaaggtgtacaacccgagaataagagcaaactcgctcgtcatgcagcccatcagccagagccaggcagagatacgcaagcagattcttggctcatcttcttcaggaaaatttttctgcctgtacactgaagaatttgcctccaaagacatgacgccactgaagccagcagaaatgcaggaagccaacctaacaagcatggtgctttttatgaagaggatagacattgcgggcctaggccactgtgacttcatgaacagaccagcaccagaaagtttgatgcaggcattggaagacttagattatctggcagcactggataatgatggaaatctttctgaatttggaatcatcatgtcagagtttcctcttgatccacaactctcgaagtctatcttagcgtcctgtgaatttgactgtgtagatgaagtgctaacaatcgcagccatggtaacagctccaaattgcttttcacatgtgccacatggagctgaagaggctgccttgacttgttggaagacatttttacatcccgaaggagatcactttaccctcatcagcatttacaaggcttaccaagacacaactctgaattctagcagtgagtactgtgtggaaaagtggtgtcgtgattacttcctcaactgttcagcactcagaatggcagatgttattcgagctgaactcttagaaattatcaagcgaatcgagcttccctatgcagaacctgcttttggctccaaggaaaacactctaaacataaagaaagctcttctgtccggttactttatgcagattgctcgggatgttgatggatcaggtaactacttaatgctgacacataagcaggttgctcagctgcatcccctgtctggttactcaatcaccaagaagatgccagagtgggtcctcttccataaattcagcatttctgagaacaactacatcaggattacctcagaaatctctcctgaactatttatgcagctggtaccacaatactatttcagtaatctgcctcctagtgaaagtaaggacattctacagcaagtagtggatcacctatcccctgtgtcaacaatgaataaggaacagcaaatgtgtgagacgtgccctgaaactgaacagagatgcactctccagtgactccccagcaaacacaaggtgcagcagggtcccaaaggtagctggatggctgaactgctggatatgggagatacatgacgcgaagacggatttcacatccacaggacggtcttgaagaaaataacactgtgtatattattttaaaataaaaaatagaagtttttattgagttctttaaattactactccatgcttttcttcttcttggaaaagtttttaaatcaaccactcataatttgaccaaaattttaaaaaactggtattttgtaaatgtgtcagagacacatgggacagaaccctactttttgtagaggaacttaatctgaataaagtctgagtttttcagtaaaaaaaaaa

SEQ ID NO: 89223 - DNA, 708 bp, Homo sapiens
cacagagatgatgaatgatttgaacgttggtggtgatcagaaagattgcccctaagaatccagctttctggtgacatctagattgagcacttcttgatacaggccaaccgcagcattgcagagggttctgatgcctccaacctgctttgccctcagatgacgctgttcttggcttatgtgtttcaaagattcccttccagccaacaggcatggctaaggcacaattggacattgattagctttgtttctagcaatctttggcttttgaaatcaatgtgactgaggtgttttcaacttcagatggagcacagagactgtgagctgtaggtgggccacagaatggaaagatgagaaacttcaagctgtggcaaaccttggagaacagtgagtctcctgagcgaggggcaggcttggccacatggaatctccaccaagctggccttgcttgggacccaggcttctgaccttcctgcaggtcatttcctctcatcattggagggaaaaaacatcacgtctcggagccactttggaaacaggtttattttagttttcgaccaataataaaatatcctgtagagaatccctttttcaaaaagggtggttgccctcaaggagggtggaagccaaactgggagggccggggaaagaatccccaccgagggaaatgtgtggtaattacccgccccccccgccggggaataacccacc

SEQ ID NO: 89224 - DNA, 400 bp, Homo sapiens
gataacctaggatttgttgatttgtacataatgcattttaaaactttgtactgatttatacactagttcttgctgtttgtttcttcctaggtgttcttattgatgctatgagaaaaggctattggattattttagatgaattaaatttggcccctactgatgtgttagaggcgctgaataggctgttggatgataaccgtgaattgctagtaacagaaacacaggaagttgttaaagcacaccctcggtttatgctttttgccacccaaaatcccccaggactttatggaggcagaaaggtcctttctagagccttcaggaatcggtttgtggaattgcactttgatgagttacctagctccgagttggaaacaatcttgcacaagcggtgtagtttgcc

SEQ ID NO: 89225 - DNA, 2009 bp, Homo sapiens
tttcgtggaccgggtgcggtggtggctgcggcggcggcggcggtagcagcatggattggggcactgagctgtgggatcagttcgaggtgctcgagcgccacacgcagtgggggctggacctgttggacagatatgtaaagttcgtgaaagaacgcaccgaagtggaacaggcttacgccaaacaactgcggagcctggtgaaaaaatatctgcccaagagacctgccaaggatgatcctgagtccaaattcagccagcaacagtccttcgtacagattctccaggaggtgaatgactttgcaggccagcgggagctggtggctgagaacctcagtgtccgtgtatgtcttgagctgaccaagtactcacaagagatgaaacaggagaggaagatgcacttccaagaagggcggcgggcccagcagcagctggaaaatggctttaaacagctggagaatagtaagcgtaaatttgagcgggactgccgggaggcagagaaggcagcccagactgctgaacggctagaccaggatatcaacgccaccaaggctgatgtggagaaggccaagcagcaagcccaccttcggagtcacatggccgaagaaagcaaaaacgaatatgcggctcaactgcagcgcttcaaccgagaccaagcccacttctatttttcacagatgccccagatattcgataagctccaagacatggatgaacgcagggccacccgcctgggtgccgggtatgggctcctgtcggaggccgagctggaggtggtgcccataatagccaagtgcttggagggcatgaaggtggctgcaaatgctgtggatcccaagaacgactcccacgtccttatagagctgcacaagtcaggttttgcccgcccgggcgacgtggaattcgaggacttcagccagcccatgaaccgtgcaccctccgacagcagtctgggcaccccctcggatggacggcctgaactccgaggcccgggtcgcagccgcaccaagcgctggccttttggcaagaagaacaagacagtggtgaccgaggattttagccacttgcccccagagcagcagcgaaaacggcttcaacagcagttggaagaacgcagtcgtgaacttcagaaggaggttgaccagagggaagccctaaagaaaatgaaggatgtctatgagaagacacctcagatgggggaccccgccagcttggagccccagatcgctgaaaccctgagcaacattgaacggctgaaattggaagtgcagaagtatgaggcgtggctggcagaagctgaaagtcgagtccttagcaaccggggagacagcctgagccggcacgcccggcctcccgacccccccgctagcgccccgccagacagcagcagcaacagcgcatcacaggacaccaaggagagctctgaagagcctccctcagaagagagccaggacacccccatttacacggagtttgatgaggatttcgaggaggaacccacatcccccataggtcactgtgtggccatctaccactttgaagggtccagcgagggcactatctctatggccgagggtgaagacctcagtcttatggaagaagacaaaggggacggctggacccgggtcaggcggaaagagggaggcgagggctacgtgcccacctcctacctccgagtcacgctcaattgaaccctgcccagagacgggaagaggggggctgtcggctgctgcttctgggcccacggggagcccccagggacctatgcactttatttctgaccccgtggctttcggcttgagacctgtgttaaccttgcttgccccctccacccccaacccagtcctacctgtcacaaccggacggacccgctgtgccttctaaccatcgtttccaccattgatgtacatactcatgttttacatcttttctttctggccgctcggctccgggccatttttgttttatacaaaaatgggaaaaaaaaaaaaaagaaattatataaagttcct

SEQ ID NO: 89226 - DNA, 506 bp, Homo sapiens
  misc_feature (1)...(506): n = a,t,c or g
ggaggcagtgctaagactgtcatgatcacatgtgtcagcccctcctcctcgaattttgatgagtccttaaattctctcaaatatgccaacagagcacggaacattagaaacaaacccactgtaaacttcagccccgagtcagaccgtatagatgaaatggaatttgagattaaattgcttcgagaagctttgcaaagccagcaggctggtgtcagccaaactacccagatcaatcgagaagggagtcctgatacaaataggattcattctcttgaggagcaagtagctcagcttcaaggagaatgtctgngttaccagtgttgtgtagaagaagcctttaccttcctggttgacctaaaagatactgtcagactaaacgaanagcagcaacacaaactgcaggagtggttaacatgatccaagaggcaggaaggctgtcctcactcatttcgagaatcgaagcactgcagtctgaagaagacacagcatgtacagtcttcagctga

SEQ ID NO: 89227 - DNA, 628 bp, Homo sapiens
attctgtgaggaatggaacctgcgaatgtgagactgaatagtgttctagcttagactacactgatgaaataatgaagactatgacagtcatgcaagctgtgaaaattaataatgctttatttggtcagagcgtctttcctccagtcttgtgtatagtatgtcagcttccttgctggattttgttctaaatgtgcctcacaattgcatcagagatttaaagtaaacattagacattattttgaatcactgagaaaataatcaccctctcaccacccacatttcagttcagtaaagtattatataaagcgtaaagtctttttccaaaggtaatggacaacactgagtgtcattgctctgtctgtggaatcctggtttctcacacttttaagaccctgatatttggtggtgaacacacaggttccataactcaaagagctgaggaagctatcagtactgaattatcgtatgtatatttattcatagaaattaaactatagaccaggcgtgttggctcatgcctgtaatcccagcactttgggagtccgagacaggcagatcacttgagctcaggagttcaagaccagcctggccaatatgataaaaccctgtccctactaaaaatacaaaa

SEQ ID NO: 89228 - DNA, 410 bp, Homo sapiens
aaaatgggtggattttcaataaaatgcagcttccacaaaagttttgttatggtattctggtctgagatgcattttcatttttcctttctcttttgctaacatacattgtaatattgccctcataaatagaacctgcggagacatagctgcaggactgcttacactcatggacagattctattgatgtttacaatattaagatgtatgacaccataagggccggagtttcacataaaaggcagctgccacaacagattagatatggtcacttggtgtgagatgcacatacacctttactttcgctttttattagcaatattggcatttttccgtaataggacatacccaggtgattagactagatgacctaagaacgattgatagtgcgtattaaatgaagcttcagagag

SEQ ID NO: 89229 - DNA, 433 bp, Homo sapiens
gccgtaattcctggggcgacccacgcgtccgcccacgcgtccgctggaagcctccaagatgaaggctgctgagatccaggccaaagtcaggattgcagagcagacggagaaggacatcgacctgacgcgcatggagtacatacccgtggccatccgcacccagatcctcttcttctgtgtgtccgacctggccaacgtggaccccatgtaccagtactcccttgagtggtttctcaacatcttcctctcgggcatcgccaactcagagagagcaggtagcaccggcatgccagggctcctaccctgcacagatatgacccatgtggacacatttccactgtggggcacacacaaactcacaactgtgttcactggcgtacactctcctcttagactcacaatacataagaatgcacacagcacgcctaccctc

SEQ ID NO: 89230 - DNA, 407 bp, Homo sapiens
cccacgcgtccggtttgttttatagtacccatctacttatgtttgccttccttacactataaagtccttgaggacagaaactagatcactttcatatttgaatccctaataattagcattgtctctagttcttagcatcgtgcatgacattcttgggtactcagtaaacatgggtagagtgcaggaatggttacttgcttattaggaatctcaaattcattgtttttaagacctacaaacaaggggtggaatggattctgggccccagattggaggcatcacttacaatcaaaacttgggcaagctctttaattttccatgcttcatttgcttcatatgacaaggggataatgattacacctacttcaagatgattctgttagctgctattacatctacaacagtcg

SEQ ID NO: 89231 - DNA, 1318 bp, Homo sapiens
tttgccctcctgccgattcggcacgaggaaaacctggagctcatcctgacgcagtcggtggagaatgttggagtccggggtgacctggtctcagtgaagaaatctttaggccggaatcgactccttcctcagggactggctgtatatgcatcccctgaaaacaagaagctgtttgaagaggagaaattgctgagacaagaaggaaaattagagaagatcctgacctggcctgcaacttcagcctttctcaaaatcggggcacggtcatcgtggagcgctggtggaaggtaccgctggccggggagggccggaagccgcgcctgcaccggcgacatcgcgtctataagctggtggaggacacgaagcatcggcccaaagaaaacctggagctcatcctgacgcagtcggtggagaatgttggagtccggggtgacctggtctcagtgaagaaatctttaggccggaatcgactccttcctcagggactggctgtatatgcatcccctgaaaacaagaagctgtttgaagaggagaaattgctgagacaagaaggaaaattagagaagatccagaccaaggcaggtgaggcgacagtgaaatttctaaaaagctgtcgcctggaggtagggatgaagaacaatgtcaaatgggagctgaaccctgaaatagttgcccgccacttctttaagaatcttggtgttgtggttgccccacatacattaaagttaccagcagagcctatcacacggtggggcgagtattggtgtgaggtgacggtaaatgggcttgatactgtgagagtgcctatgtctgtcgtgaactttgagaagcccaagaccaaaagatataagtactggttagcccagcaagctgccaaggctatggcccccaccagcccccagatctaaatctactctccctccaaggcagcaaagcagaatcgggagcagtggagcagaaatgtgcaagcaccctgatctcactcccagctctgaccaaatacagaattttagagaacatctgaagacatcagactgcactgcgtatacatgttgaattcttcatttttgccatctttaactgtcatcactggggcagggaagtcctgttccagaagtaccaggctgtagatttgataagctagatgcagtagaccgaaaccatccaaaacctgtttagcttcttcctccattggagtttattgggacaaacaggagagccagccattgtctccagtacttgcctcattctcatcatccaaactgaacatttgtatcccaagcagaaataaagagaatatgttctttttaaaaaaaaa

SEQ ID NO: 89232 - DNA, 523 bp, Homo sapiens
acgcgtccggtttgaacagaatcttcaagttgctgctcagataattgaagatttgaaaacaaaggtactagttttatgtcttcagcagatgaattctttcctaagcaggtatgtctttctgccagtgtgctaatgtacacattgaatgtttttaaaaattagaagcaaaaattttttgatcctactatgcctgttactaagaagaaattaagccggtagattccccacgtgtcactcctgtgttcttcaaaagcaaagggagggagcggagcttctggatcatcttccccttgagtggaccacacgcccccttgggctcccagagccgatgtgttgtgacgtccttagcgatgcgccggatgacaccaactctgttggagtcaggctcctcctgttgcctgttctgaacttccttggggtgggggtggcgactccagccgcagtgcctacttcgtagtggggagggcgtcctcggccgagccggccctcctcagaagggctccaggcagccatgacctggcct

SEQ ID NO: 89233 - DNA, 414 bp, Homo sapiens
cgcagtcggaagcctgagaaggagccccggagaagcggcagggccaccaaccacgacagctgcgatagctgcaaggaaggtggagatctcctgtgctgcgaccactgcccggctgccttccacctccagtgctgtaaccctccactgagtgaagaaatgttgcctcctggagagaggatgtgtcaccggtgcactgttcgccgaaaggtaataatgctgctttctgaagactgtccagaaagcctgatccagagcactgatatgctagagctaagacggcctagccctgaaggcattcttgtcccttcttcttgtctcttccagccctggaatcaccccactcttcccatggtgactgtttggaatccagtagggcctataaatccaaacatgtgctgctgaaatgggcagaag

SEQ ID NO: 89234 - DNA, 394 bp, Homo sapiens
ctactacgcactgcaccactggcccttccccgacctcctgtgccagacgacgggcgccatcttccagatgaacatgtacggcagctgcatcttcctgatgctcatcaacgtggaccgctacgccgccatcgtgcacccgctgcgactgcgccacctgcggcggccccgcgtggcgcggctgctctgcctgggcgtgtgggcgctcatcctggtgtttgccgtgcccgccgcccgcgtgcacaggccctcgcgttgccgctaccgggacctcgaggtgcgcctatgcttcgagagcttcagcgacgagctgtggaaaggcaggctgctgcccctcgtgctgctggccgaggcgctgggcttcctgctgcccctggcggcggtggtctactcgtcg

SEQ ID NO: 89235 - DNA, 2825 bp, Homo sapiens
ctcggcgcgcgcttggggcgaggctcggcgggcgcggacgcgcagcatggcggtggaggacgaggggctccgggtcttccagagcgtgaagatcaagatcggtgaagccaaaaaccttccctcttacccggggccgagcaagatgagggattgctactgcacggtgaacctggaccaggaggaggttttcaggaccaaaattgtggaaaagtcactctgcccgttttacggagaagacttttactgtgaaattcctcggagctttcgtcacctgtccttctacattttcgatagagacgttttccggagggattccatcatagggaaggtggccatccagaaggaggacttgcagaagtaccacaacagggacacctggttccagctgcagcacgtggacgctgactcggaagtgcagggcaaagtgcacctggagctgcggctgagcgaggtcatcacagacactggggtcgtctgccacaagctcgccacacgcatcgtcgagtgccagggcctccccatcgtgaatgggcaatgtgacccctacgccaccgtgacgctggcaggacccttcagatcagaagcaaagaagacgaaagtgaagaggaagaccaacaatccccagttcgatgaagtgttttattttgaggtgacccggccctgtagctacagcaagaagtcccactttgactttgaggaggaagacgtggacaagctcgaaatcagagttgacctctggaatgccagtaacctgaagtttggagatgaattcctgggagaactaaggatcccgttgaaagtcctgcggcagtccagctcctacgaggcgtggtacttcctccagccccgggacaatggtagcaagagcctaaagccagacgacctgggctccctgcggctgaacgtggtatacacggaagaccacgtgttttcttctgactattacagccctctgcgggacctgctgttgaagtctgcggatgtggagcccgtgtcagcgtctgcggcccacatcctgggcgaggtttgccgggagaagcaggaggcggccgtcccgctggtgcggctcttcctacactatggcagggtggtgccattcatcagtgccatcgccagcgcggaggtgaagcggacccaggaccccaacaccatcttccgaggaaactcactggcgtccaagtgcatcgacgagaccatgaagctggcggggatgctttttttgcatgtcaccctgaagcccgccatcgaggagatatgccagagccacaaaccctgtgaaatcgaccctgtgaagttgaaagacggagaaaaccttgaaaacaacatggagaacctacggcagtatgtggaccgcgtcttccacgccatcactgagtctggggtgagctgcccgaccgtcatgtgtgacatcttcttctccctccgggaggcggcggccaagcgcttccaggatgacccggacgtcaggtacactgcagtgagcagcttcatcttcctgaggttctttgcgcccgccattctctcccccaacctcttccagctcacgccgcaccacacggacccccagacgtccaggacgctgacattgatctccaagaccgttcagaccctcggcagcctgtccaagtccaaatctgcgagttttaaggagtcctacatggctacattttatgaattcttcaatgagcagaaatatgctgatgcggtgaagaacttcttggatctgatttcgtcctcggggagaagagaccccaagagtgttgagcagcccatcgtgcttaaagaagggttcatgatcaagagggcccaaggacggaagcgctttgggatgaagaattttaagaagagatggtttcgcttgaccaaccatgaatttacctaccacaaaagcaaaggggaccagcctctctacagcattcccatcgagaacatcctggcagtggagaagctggaggaggagtctttcaaaatgaaaaacatgttccaggtcatccagccagagcgtgcgctgtacatccaggccaacaactgcgtggaggccaaggactggatcgacattctcaccaaagtgagccagtgcaaccagaagcgcctcaccgtctaccacccgtccgcctacctgagcggccactggctgtgctgtagggcgccatccgactcggctccgggctgctcgccctgcactggcggcctcccagccaacatccagctggacattgatggggaccgtgagacggagcgtatctactccctcttcaacttgtacatgagcaagctggagaagatgcaggaggcctgtgggagcaaatctgtgtatgacggcccggagcaggaggagtattcgacgttcgtcattgacgacccccaggagacctacaagacgctaaagcaagtcatcgctggggttggggctttggagcaggagcacgcccagtataagagggacaagttcaagaagacgaaatatggaagccaggagcaccccatcggagacaagagcttccagaactacatccggcagcagtccgagacctccactcattccatttaaagtctgcgggacgcgcccagtggcgccagcaagctgcccatgcaaagccgcagcctttgggagggagaagagaaggaagagcgcacagccggcaaagtgagatgcacgccgtcccggcccatagacaagtggcgctggggtttccctctcccagaaccgctgccaccaccgccacgccctccgcagaaagcccacctggccctgtggaacgtgtcgtcatttgattctgtgctttttgctccttgtttgtggggatctggggatcagctgaagg

SEQ ID NO: 89236 - DNA, 402 bp, Homo sapiens
tctaacagttctgttatccatttaaaaccagaggaagaaaattacagagaagagggagatcctagaacaagagcatcagatccacaatctccaccccaagtatctcgtcacaaatcacactatcgtaatcgagaacactttgctactatacggacagcatcactggttacgaggcaaatgcaagaacatgagcaggactctgagcttagagaacaaatgtctggctataagcgaatgaggcgacaacatcaaaagcaactgatgactctggaaaacaagctaaaggctgagatggatgaacatcgcctcagattagacaaagatcttgaaactcagcgtaacaattttgctgcagaaatggagaaacttatcaagaaacaccaggctgccatggagaaagag

SEQ ID NO: 89237 - DNA, 425 bp, Homo sapiens
tgcccacctacgaccaagaggacagggaggatgaggaagagaaggcagactatgtcacagctgctggaaagattatctataatcttagaaacaccttgaagtatgccaagaaaaacgtccgtgcattttggaaactcagagccaacccacgcttggccaatgctaccaagcgtcttctgaccactggccaagtctcctcccggagccgcgtgcaggtgcaaaaggcctttgcgggaacaacactggcgatgaccaaaaatgctcgcgtgctgggaggtgtgatgtccgccttctcccttggctatgacttggccactctctcaaaggaatggaagcacctgaaggaaggagcaaggacaaagtttgcggaagagttgagagccaaggccttggagctggagaggaaactcacagaactcacccag

SEQ ID NO: 89238 - DNA, 1795 bp, Homo sapiens
ggctcgggctcggctccgggacgctgctctccgtgtccgagtacaagaagaagtaccgggagcacgtgctgcagctgcacgctcgggtgaaggagaggaacgcccgctccgtgaagatcaccaagcgcttcaccaagctgctcatcgcgcccgagagcgccgccccggaggaggcgctggggcccgcggaagagcctgagccggggcgcgcgcggcgctcggacacgcacactttcaaccgcctcttccgccgcgacgaggagggccggcggccgctgaccgtggtgctgcagggcccggcgggcatcggcaagaccatggcggccaaaaagatcctgtacgactgggcggcgggcaagctgtaccagggccaggtggacttcgccttcttcatgccctgcggcgagctgctggagaggccgggcacgcgcagcctggctgacctgatcctggaccagtgccccgaccgcggcgcgccggtgccgcagatgctggcccagccgcagcggctgctcttcatcctggacggcgcggacgagctgccggcgctggggggccccgaggccgcgccctgcacagaccccttcgaggcggcgagcggcgcgcgggtgctaggcgggctgctgagcaaggcgctgctgcccacggccctcctgctggtgaccacgcgcgccgccgcccccgggaggctgcagggccgcctgtgttccccgcagtgcgccgaggtgcgcggcttctccgacaaggacaagaagaagtatttctacaagttcttccgggatgagaggagggccgagcgcgcctaccgcttcgtgaaggagaacgagacgctgttcgcgctgtgcttcgtgcccttcgtgtgctggatcgtgtgcaccgtgctgcgccagcagctggagctcggtcgggacctgtcgcgcacgtccaagaccaccacgtcagtgtacctgcttttcatcaccagcgttctgagctcggctccggtagccgacgggccccggttgcagggcgacctgcgcaatctgtgccgcctggcccgcgagggcgtcctcggacgcagggcgcagtttgccgagaaggaactggagcaactggagcttcgtggctccaaagtgcagacgctgtttctcagcaaaaaggagctgccgggcgtgctggagacagaggtcacctaccagttcatcgaccagagcttccaggagttcctcgcggcactgtcctacctgctggaggacggcggggtgcccaggaccgcggctggcggcgttgggacactcctgcgtggggacgcccagccgcacagccacttggtgctcaccacgcgcttcctcttcggactgctgagcgcggagcggatgcgcgacatcgagcgccacttcggctgcatggtttcagagcgtgtgaagcaggaggccctgcggtgggtgcagggacagggacagggctgccccggagtggcaccagaggtgaccgagggggccaaagggctcgaggacaccgaagagccagaggaggaggaggagggagaggagcccaactacccactggagttgctgtactgcctgtacgagacgcaggaggacgcgtttgtgcgccaagccctgtgccggttcccggagctggcgctgcagcgagtgcgcttctgccgcatggacgtggctgttctgagctactgcgtgaggtgctgccctgctggacaggcactgcggctgatcagctgcagattggttgctgcgcaggagaagaagaagaagagcctggggaagcggctccaggccagcctgggtggcggcag

SEQ ID NO: 89239 - DNA, 436 bp, Homo sapiens
tcgcctcttagtcagggcgccccacgcgtccggcaaaacccacaggccaaggaatgggaagatttatgttgacacttgtttgtcaagggtcaataatgatgtctgcccgggacctcatcatgaacaacctcacagagcttcagcctggcctcttccaccacctgcgcttcttggaggagctgcgtctctctgggaaccatctctcacacatcccaggacaagcattctctggtctctacagcctgaaaatcctgatgctgcacaacaatcagctgggaggaatccccgcacaggcgctgtgggagctgccgagcctgcagtcgctgcgcctagatgccaacctcatatccctggtcccggagaggagctttgaggggctgtcctccctccgacacctctggctggacgacaatgcactcacggagatccctagcag

SEQ ID NO: 89240 - DNA, 1593 bp, Homo sapiens; identical to SEQ ID NO: 59727
  misc_feature (1)...(1593): n = a,t,c or g

SEQ ID NO: 89241 - DNA, 387 bp, Homo sapiens
agcctctctgacgaggagtatgcccagatgcagcacttagctcggcttgcagaaaacctcatcagcaaacttaatgacctgagcaagatccaccagcatgtgtctgtcctcatgggttctgtgaatgccagcgctaacatcctgaataatatattttacggccaagacagtggcaatgagatgggtgcagcttcctgtattcccattgaaactctaagcagaaatgatgccgtagatgttacatttagtcttaaaggtctctacgatgacaccacagctttcctggatgaaaagctgctgagaagtgctgaggatgagactgcactacaaagcgccctggatgccatgaataaagagttcaaaaagctatctgagattgactggatg

SEQ ID NO: 89242 - DNA, 714 bp, Homo sapiens
ctaggagcctcctaatgcagtcttctgcacagtcctggggactgactgactgaatcacacctctggggctgggggctgctgacatgtgtgcctttccttggctgcttcttctcctgctgctccaggagggcagccaaaggagactctggagatggtgtggatccgaggaagtggttgcggtccttcaggagtccatcagcctccccctggaaataccaccagatgaagaggttgagaacatcatctggtcctctcacaaaagtcttgccactgtggtgccagggaaagagggacatccagctaccatcatggtgaccaatccacactaccagggccaaatcctaactatgcttctgagaagccttcaacagccttctgcctcctggccaagggattgctcatcttcttgctcttggtaattctggccatgggactctgggtcatccgagtccagaaaagacacaaaatgccaaggatgaagaaactcatgagaaacagaatgaaattgaggaaggcagcaaagcctgtctccagccctgcctgactgctccttgggaaccccagtcctgagcttggtttcttcccagcacccagagaatccttcctcagctctcttctttccaggggaaggaggtgctcaggggtgggtatccagagagccatacttctgagggaagactggctggcaataaagtcaaattaagtgaccacaaa

SEQ ID NO: 89243 - DNA, 415 bp, Homo sapiens
cccacgcgtccggcgtctcatcaaggagcaccggagccagcttgagagggagcaggagcttctggccatcggcaagaccaagacgtgtgagagccccgtgagtcccattaagatggagttgctgtttgaccccgatgatgagcattctgagcctgtgcacaccgtggtgttccagggggcggcagggattgggaaaacaatcctggccaggaagatgatgttggactgggcgtcggggacactctaccaagacaggtttgactatctgttctatatccactgtcgggaggtgagccttgtgacacagaggagcctgggggacctgatcatgagctgctgccccgacccaaacccacccatccacaagatcgtgagaaaaccctccagaatcctcttcctcatggacggcttcgat

SEQ ID NO: 89244 - DNA, 520 bp, Homo sapiens
cacttccgctcggggactgaggttgctgcagtttttccgcgatagtttggggcagttccgcgcgttgcaggcccttctgaatttcctggacctacgcattggatcctcaaagaactggtgatcgaattaggggaaaaggggcctcgtcggagagtagaggtttggaggggcaagggccgctgtttgcgttctcgtccgtggcaccttcttgggcttgggtctgtcctcgcttcccgggggcattggtacttggttgggtcgcgtctcacctggtttcagggtttccggggctctgagctcgcccactccgccccctgcaccccacgcgcgtggccacttcttcgcgatataacgttggggtgttaatctccttgggtttcccgttactgttctttaaaatggggactttagggccatcctaatggaatcgttttgggaactggaagaggtaacacaaatgagagccttaaagcagtccctgtcacttggtgactggtggtctcttgttaatttcccacgg

SEQ ID NO: 89245 - DNA, 1919 bp, Homo sapiens
aaatagttggacataaataagagaaaaacatacttctactattaagagggaatcatagggtctatattttttcttgtgtaagaatccgttttagttccatagtttagcaaaagatgcttactagattggtatatcttgtccagcaaccatttttgtgcccatgttttctcattcccttatagggatcggggaagaataccaattgccatattacaacatggtaccgagtgatccgtcatacgaagatatgcgtgaggttgtgtgtgtcaaacgtttgcggccaattgtgtctaatcggtggaacagtgatgaatgtctacgagcagttttgaagctaatgtcagaatgctgggcccacaatccagcctccagactcacagcattgagaattaagaagacgcttgccaagatggttgaatcccaagatgtaaaaatctgatggttaaaccatcggaggagaaactctagactgcaagaactgtttttacccatggcatgggtggaattagagtggaataaggatgttaacttggttctcagactctttcttcactacgtgttcacaggctgctaatattaaacctttcagtactcttattaggatacaagctgggaacttctaaacacttcattctttatatatggacagctttattttaaatgtggtttttgatgcctttttttaagtgggtttttatgaactgcatcaagacttcaatcctgattagtgtctccagtcaagctctgggtactgaattgcctgtttcataaaacggtgctttctgttgaaagccttaagaagataaatgagcgcagcagagatggagaaatagactttgccttttacctgagacattcagttcgtttgtattctacctttgtaaaacagcctatagatgatgatgtgtttgggatactgcttattttatgatagtttgtcctgtgtccttagtgatgtgtgtgtgtctccatgcacatgcacgccgggattcctctgctgccatttgaattagaagaaaataatttatatgcatgcacaggaagatattggtggccggtggttttgtgctttaaaaatgcaatatctgaccaagattcgccaatctcatacaagccatttactttgcaagtgagatagcttccccaccagctttattttttaacatgaaagctgatgccaaggccaaaagaagtttaaagcatctgtaaatttggactgttttccttcaaccaccattttttttgtggttattatttttgtcacggaaagcatcctctccaaagttggagcttctattgccatgaaccatgcttacaaagaaagcacttcttattgaagtgaattcctgcatttgatagcaatgtaagtgcctataaccatgttctatattctttattctcagtaacttttaaaagggaagttatttatattttgtgtataatgtgctttatttgcaaatcacccactcctttacaaccatactttatatatgtacatacattcatactgtagaaaccagctcatgtgtacctcatatcccatccttaagagaagaaatgttataaagtagaactaaatataaattttcagaattaatgcattcaaagtaatatatcaaatccaggactttgttaacttcaggtaaaaacttcattagggtaatatcatctcaattttttcaaaatgaaaggattctctaattagaaatttatatgtcagagctgttataaatttatccacctgtcaaatatgttctggacagctaaatcatttgagatttttggttttttgatttctattccctaacttgtgaagacaatgaaaaatcaggcagaaatatttagtatctagtcagtatctgtagctacactgtataactgttcttcaataaaatggttcatattttaaaaaaaaaaaa

SEQ ID NO: 89246 - DNA, 551 bp, Homo sapiens
gccccgttcttgagttaccgggccgacccacgcgtccgggtggggcggcggcctgcagccagcaagatgtaccactgcagcgagtgcctgcgcttcttccagcagcgcaagagcctgctgctgcaccagcgcctgcacaccggcaatggccagggctggcccgcctgcccctactgcggcaaggccttccgccggccctcggacctcttccggcaccagcgcatccacaccggtgagcggccctaccagtgcccccagtgtggccggaccttcaaccgcaaccaccacctggccgtgcacatgcagacccacgcccgaggccaggtgggcccacacttccctgccgcccccgcccgccacgggagcctgcccctgccctggcccagccggaaggaggagggctgacctggcaggagcccacagaggacccctggcggggtctctcccctgtgcctgacgcaggttcttccttttcctgggatggagagaggtttgttgtttttacccattcaaatgggaagctagctgcccttctggtgacattgtgtgtg

SEQ ID NO: 89247 - DNA, 621 bp, Homo sapiens
cggtctggatttaccgggccgacgatttcgtgtagtatcctgggagctgcgggctactgggcctgcgctgccgggctttgggttctgggcctctgccgctctctggccctaagtgctgagctgccgggaacggcagcttctgacgctgggccattggacgctgcggaaccaggcttcttcactttgagtttccgccgcgaagcgccagtccgggccgaggagggagcctttactacttctccctggtttcattcatgttctgaggagggtgtgagaaggaaccatggatcccacagccttggtggaagccattgtggaagaagtggcctgtcccatctgtatgaccttcctgagggagcccatgagcattgactgtggccacagcttctgccacagctgtctctctggactctgggagatcccaggagaatcccagaactggggttacacctgtcccctctgtcgagctcctgtccagccaaggaacctgcggcctaattggcagctggccaatgttgtagaaaaagtccgtctgctaaggctacatccaggaatggggctgaagggtgacctgtgtgagcgccatggggaaaagctgaagatgttctgcaaagaggatgc

SEQ ID NO: 89248 - DNA, 561 bp, Homo sapiens
cattagaccagcgaggtggaattcgcacgcggctatacaatcagccggtggacacagctggcaggggccagctctatgggggcctcaccgactgcatggtgaagatctggcggcaggagggccccctggcactctacaagggcctgggccccgcctacctgcgcctgggcccccacaccatcctcagcatgctcttctgggacgagcttcggaaactggctgggcgggcccagcacaagggcacctagacgacggccctcacccccacgtcctgacacggccggcacttggccggaagtgagagcctgctccaggacaactggctgtcccggggcgggccatgggcccaggccctgccagaggtcccgggagagtgtggacagctctggtccatccagccccttggcccacccaggtccagagcatccacttcaagttaccacccattctgtcttccagacagttctcttccttctctgtactgcggactgggtcaccacatcccagagccttgctcagatatagcaactgctgcgggcgtgcacatggcataggcccagc

SEQ ID NO: 89249 - DNA, 506 bp, Homo sapiens
atggacatactttgttccacgctcctgctactgactgtcccgtcctgggtcttatcccaggtcaccttgagggagtctggtcctgcgctggtgaaacccacacagaccctcacactgacctgcaccttctcgggggtctcactcagcactactcgaatgcgtgtgagctggatccgtcagcccccagggaaggccctggagtggcttgcacgcattgattgggatgatgataaattctacaccacatctctgaagaccaggctcaccatctccaaggacacctccaaaaaccaggtggtccttgcactgaccaacgtggaccctgtggacacagccacgtattactgtgcacggataggggtctccggaggtaactccgatgcttttgatatctggggccaagggacattggtcaccgtctcttcagcctccaccaagggcccatcggtcttccccctggcactctcctccaagagcacctctgggggcacagcggccctgggctg

SEQ ID NO: 89250 - DNA, 2052 bp, Homo sapiens
tttcgtgggaccagaagccatcgtacatattgtcaacaaggctgatatcgccatggtgatctgtgacacaccccaaaaggcattggtgctgatagggaatgtagagaaaggcttcaccccgagcctgaaggtgatcatccttatggacccctttgatgatgacctgaagcaaagaggggagaagagtggaattgagatcttatccctatatgatgctgagaacctaggcaaagagcacttcagaaaacctgtgcctcctagcccagaagacctgagcgtcatctgcttcaccagtgggaccacaggtgaccccaaaggagccatgataacccatcaaaatattgtttcaaatgctgctgcctttctcaaatgtgtggagcatgcttatgagcccactcctgatgatgtggccatatcctacctccctctggctcatatgtttgagaggattgtacaggctgttgtgtacagctgtggagccagagttggattcttccaaggggatattcggttgctggctgacgacatgaagactttgaagcccacattgtttcccgcggtgcctcgactccttaacaggatctacgataaggtacaaaatgaggccaagacacccttgaagaagttcttgttgaagctggctgtttccagtaaattcaaagagcttcaaaagggtatcatcaggcatgatagtttctgggacaagctcatctttgcaaagatccaggacagcctgggcggaagggttcgtgtaattgtcactggagctgcccccatgtccacttcagtcatgacattcttccgggcagcaatgggatgtcaggtgtatgaagcttatggtcaaacagaatgcacaggtggctgtacatttacattacctggggactggacatcaggtcacgttggggtgcccctggcttgcaattacgtgaagctggaagatgtggctgacatgaactactttacagtgaataatgaaggagaggtctgcatcaagggtacaaacgtgttcaaaggatacctgaaggaccctgagaagacacaggaagccctggacagtgatggctggcttcacacaggagacattggtcgctggctcccgaatggaactctgaagatcatcgaccgtaaaaagaacattttcaagctggcccaaggagaatacattgcaccagagaagatagaaaatatctacaacaggagtcaaccagtgttacaaatttttgtacacggggagagcttacggtcatccttagtaggagtggtggttcctgacacagatgtacttccctcatttgcagccaagcttggggtgaagggctcctttgaggaactgtgccaaaaccaagttgtaagggaagccattttagaagacttgcagaaaattgggaaagaaagtggccttaaaacttttgaacaggtcaaagccatttttcttcatccagagccattttccattgaaaatgggctcttgacaccaacattgaaagcaaagcgaggagagctttccaaatactttcggacccaaattgacagcctgtatgagcacatccaggattaggataaggtacttaagtacctgccggcccactgtgcactgcttgtgagaaaatggattaaaaactattcttacatttgttttgcctttcctcctatttttttttaacctgttaaactctaaagccatagcttttgttttatattgagacatataatgtgtaaacttagttcccaaataaatcaatcctgtctttcccatcttcgatgttgctaatattaaggcttcagggctacttttatcaacatgcctgtcttcaagatcccagtttatgttctgtgtccttcctcatgatttccaaccttaatactattagtaaccacaagttcaagggtcaaagggaccctctgtgccttcttctttgttttgtgataaacataacttgccaacagtctctatgcttatttacatcttctactgttcaaactaagagatttttaaattctgaaaaactgcttacaattcatgttttctagccactccacaaaccactt

SEQ ID NO: 89251 - DNA, 650 bp, Homo sapiens
tcccgggtcgacgatttcgtccagccgcattggaggaacgggctatggaaaaattgagagaaaaagttccatttcagaatagaggaaaaggaacattatcatctattatcccgaataactctgatacaagaaaagcaactgaaactacttctctgagtagcaagcctgaatatgtaaatcctgactttagatggagtaaagatccttcctccaaaagtggaaatctgttggaaaccagtgaggtaggttggacatcaaaccctgaggaattggacccgatcaggctggctctcctgggcaagtcaggtctgagctgtcaggtggggtcagccacatcacaccctgtgtcctgccaggagcctatagatgaagatcaaagaataagtcctaaagataagtcaactgctggccgtgagttcagtggccaggtttctcatcagaccacctctgaaaaccagtgtactcctattcccagcagcacagttcacagctctgtggctgacatgcagaacatgcctgctgctgtgcacgcactcttgacacaaccctctctcagcgctgctccttttgctcagcggtatttgggaacactcccttcaactggaagcaccaccttgcctcagtgccatgctggcaatgccacagtctgg

SEQ ID NO: 89252 - DNA, 1672 bp, Homo sapiens
ggtgtctgtcaaactccagcaattgctgacattgtaatcctggtcgatggttcatggagtattggaagattcaacttcagactggttcggcatttcttggaaaacctggttacagcattcgatgtgggctcagagaagacacgaattggggtgaaaaacgcggatgtgaatgagctgcaggagatcgcctctgaaccagacagcactcatgtgtacaatgttgccgaattcgatctgatgcacacagttgtggagagtctgaccaggactctctgctctagagtggaagaacaggacagagaaattaaagcctcagcccatgccatcactgggccgcctacggagttgattacttctgaagtcactgccagaagctttatggttaactggactcatgccccaggaaatgtggaaaaatacagagttgtgtattatcctaccaggggtggaaaaccagacgaggtggtggtagatggaactgtatcttccacagtgttgaaaaacttgatgtctttaactgaatatcagatagcagtctttgcaatctatgcccacactgctagtgaaggcctacggggaactgaaactacacttgctttaccgatggcttctgaccttctactgtacgacgtgactgagaacagcatgcgagtcaaatgggatgcagtgcctggggcctcaggttacctgatcctttatgctcctctaacagagggcctggctggggatgaaaaagagatgaaaattggagagacccacacagatattgaattgagtgggttgttgcccaatacagaatacacagtcacagtttatgccatgtttggagaagaggccagtgatcctgttacgggacaagaaacaacattggctttaagtccaccaagaaacctgagaatctccaatgttggctctaacagtgctcgattaacctgggacccaacttcaagacagatcaatggttatcgaattgtatataacaatgcagatgggactgaaatcaatgaggttcagattttgcttaaactgtggagcaatggtttcagtttagatgatggagaattgagaccttacaatgaaccaacaaatgctcaatttctggagtctgttaagagaggccttacacctgaaatagtcagtacaccttcctctccagaagaggaggataaatcaatacttaatgcagttgttcttattgatgattcagtgccaacaacaaaaattcaaatcaggttagcagatgggagtcgtttgatacaaagattcaatagtacacacaggatcctggatgtccggaactttattgtacagtctcgtcctgaatttgcggctcttgactttattcttgtgacttcatttccgaataaagagctaacagatgaaagcctgacactgctagaagcagatattcttaacactgtgttactccagcaactaaaataatattgttcctgtccatgcagtagcatgtgggaatagatgatgtgccgtattaataaggacaatacttcagcattaaaaacagccaaattatttttattatttttacagataaattttggttttattgttattctgtcttccaatctgaatatagacaaatttggattaggaatagaccttgagataagtatgtttgagtttttagttgaaggactggcttatgttgata

SEQ ID NO: 89253 - DNA, 1574 bp, Homo sapiens
gtccggaattaccgggtcgacgatttcgtcgcggcgcggcctgcgctgctgtctttgaggctgtagcacaagcatgagctcgggccccctccctgtgcaccggagacccagccaggtccagccggtctgtccatggtgccccaccagcagcatcgtgctgggcagtgccgcctgcagagtcatggagccttagttactgagcaggtgcacgtggggggcttggatggccccactgcattaccatgccagctatcacacaccccgtgccagaggactgcatgtgacacggcttgattacgtggcactcgctgctgcaaagcaaagtcagatgtcatcatggaaactcaagcaccagtctttttctctgaattggaatatagctgtaagaatgtggtatgattctgttcctaaatgtgaattgattattatgttgaaacaggtaaaaaccccaaaattttcttgtcacgtgttcctgtgtctctttcgaagtgtgtcaccttaggtcactgtgtggacacagcaagggtggaggacgctaacttggcctttgcagtgatggtggggtgggacaggtgttctggggcacgaggggcccctgagaatcccctgcctgggtgtgtttcttctgattctgtccctcacgtctctgttttctcccttttctgtgctccagagcagccatcagcagggaccctttctacgaaatgctcgcagcacggaaaaagaaggtctcctccacgaagcgacactgagcgtgcagccaagggcgttggtctgcggggggccttggagctcctgctcttctcccgcacctccatggatgcactgctgccgagcagagcgtcctctgccaggccccgccctggattcctagagactagcttcagcttttgctattttttttaagtgggagaagggtgggcagttatcactggggaagagaggaccggccacctgtccagcatgggctccagagccttcctctctcacagggcagagctcttgtcggcagggcagcctcctggccagtttctctgctcagtgttctggtagcagagctcagagccaactgtttacctcttggttgtccccgtgaagaagccttcaaaccctgcaccataaatacatgtgtccatatattattatatgttaagagaaaaaggtggaaaggaagagaagccacatactataaagatctatttttttttttaaaaaaaaaacgtagggctgttcaggggcattctgccctggctgcgctggggagcttttccctggaaaaaagcacctggggctggggccaaggggcatcaccctgggcacgcggcagggcctggcctgcctctcctgtgctgggggagctcgctgcctggggcttgtctgggcgaaatggacaggtgaggtcgaggacccaaagggcaaaggcccagtggagcctcaaacggcacagtcagagtcgggggcctgccctggccggggtcgcagtcggaagcaacgtgcagtccggcatctcccgcggatgcttttccatcccaagtgcctgcggagcgccaaggagaggagagagctgactggac

SEQ ID NO: 89254 - DNA, 419 bp, Homo sapiens
actgcgctgcaggaattcgagacgagcctacattatatcgtcctgctcgatgaggggcctcgtacccaaggctgactatctactttataaggacactttgacggcccgcaagggccagaggaacatatgtactttgcttggcggttaccgacatacctgtctcgtaacctgtctggaactagctttctacttctagtagttaaagtcggtcacttgcagatgttttccattggtgactattgatttagacgtgctgagagagtgagcaaatgaactgttctgagtgtttcctaggatacttagcaggtctgtgtagatttatctcacacctgacaaccgactttcatattaggaaattgagagagattgttgtgagtagataagatcatagtttaggggaaaatttaaggttgaatgta

SEQ ID NO: 89255 - DNA, 435 bp, Homo sapiens
cttgaacaattcggcacgagcaagaatcaagagagacagctatgctgagagctttacatgccaccttgaatttaacctccaccaccgtccgtccgctgagacaggagctcttacagataaggcaactaaaatgtaaacaggacctgttccccacccaaggtcacccaacaagggagggtggagcatcgggcagccaaaatgcaaaatggctgtgcaatttaccacctataatagcctgtccttttatctctgcagtcactgtccaaatgatttgaactcaaagctcagtgccaggggacattgagcagaattttcaaaacgtacatatattgaggaactgaacaccccctggctggttgggaaccccaaagcctttttgtgcattgagcgaaagggatctattgaagtcaactcttctttaatcattttttggga

SEQ ID NO: 89256 - DNA, 2249 bp, Homo sapiens
ttccgttgaggctgaccctgatggaggaagtgctcctgctgggcctcaaggaccgcgagggttacacatcattttggaatgactgtatatcatctggattacgtggctgtatgttaattgaattaccattgagaggaaggttacaactagaggcttgtggaatgagacgtaaaagtctattaacaagaaaggtaatctgtaagtcagatgctccaacaggggatgttcttcttgatgaagctctgaagcatgttaaggaaactcagcctccagaaacggtccagaactggattgaattacttagtggtgagacatggaatccattaaaattgcattatcagttaagaaatgtacgggaacgattagctaaaaacctggtggaaaagggtgtattgacaacagagaaacagaacttcctactttttgacatgacaacacatcccctcaccaataacaacattaagcagcgcctcatcaagaaagtacaggaagccgttcttgacaaatgggtgaatgaccctcaccgcatggacaggcgcttgctggccctcatttacctggctcatgcctcggacgtcctggagaatgcttttgctcctcttctggacgagcagtatgatttggctaccaagagagtgcggcagcttctcgacttagaccctgaagtggaatgtctgaaggccaacaccaatgaggttctgtgggcggtggtggcggcgttcaccaagtaactctgctcggggtgaaccattctcctttctctcaagtaaaccagtagtttttcttctgttgacttctggttttctgtaatttgtactttcccacactataattggcttctgttttacaaaatggtgggtggctttttcttttttgtacgtgtacaggattctgctggtacgagaggccttcctctttctgtttttaaaaaaagttttactgccatattggcattccattccctgttgccatcctcactgttacctgttttgggtttctggtctactttgactttcaaagtacctccagcctcctcatacgcacagcttttggatgacctcagcttgagtttctccatatgtgcatgtacatctagcattctgcctacagttcagacagaagtcacaaaaaggccttcaactcaccaaaggtaaatatctgtatctattaggacattttttacatagacttcagttgagatgtatacttagcaaaattatttttaaattgaaacagcacagtaaatacttaatataaaatgtcccttggattttgcttcccatgtaaatctattgtattattacacttgttataattttaactataaaggtccaattgtttcacagagccagtttgggatgggctgcattccatttatgctgtatatagtttgaattatatataaattaccccttcttctggccacccctgctcccatcttagtattttgcaagatctaatcagttgtacacctggtgcccctcgcttgcttcaatcatggttatttgatggcaaaatcgacctcttgtcgctgaaggagagagaaaagatgtgtgtctgattggtcctgggattttttgagctgtgccatttatggtactctttgcctatgcatcccctttttagattttttttaaattttatcttactgtttttataatttctattgggaagaggcttgtgaccagtaccaatcttgagtttctttttctgtccacaagtaaattaatatctgctctgaaatgtcatttatctactcacacattcttggggaaaaaaatcaaatgtcagtcctagcagatgttgcatgtaaattggtagcaagtaatgattacaacccagaggattaagaattttgtaacagaaagctctatgttttaattttttatatacaattaggataattagcattgtcagactataaacctttgctttttaaagtttatttttactatttctttatcactttattgtatcatcaccattggtttcataatgtaaatactatatgttgaacaaattaaatgtcaaaattttttattaccatagtccatgttaatagtggggctttccagggtgtttggggattttttttgttgttgttaacattcattgcaaaagtactagatggtgtataactctagagttgaattttaagggattccctatatcacttgtcatactatctttttatctgaagtaataaataaacaattgatcttgaaagtgcctgaatcagaaaaaaaaaa

SEQ ID NO: 89257 - DNA, 1170 bp, Homo sapiens
  misc_feature (1)...(1170): n = a,t,c or g
ttttttttttttaacatctttacattttaatgaaaaagtagataatctatttgaaaagtacaaactcaattgcaatttcaagaaaaaaatatgtatttatataccataaataagcaaaattggactctgaagccctaatacttcaaaagcattcatcctattccataaaaacctagtattattcagcaacagtactactactgatttaaaaatagaaagcaagtctatcttcacatgtagttctttgtctttaatttgtacaactcaccaaggttattttcattcttagcacccggggttcaccagggtgtgatccaaagcaaaccagcataggtttttaacagaaaatctttgccaggaacttcatgacctgtattttcctcacctaggaagaagctgtccccactcgcatgattttgaacagtgtgttgatgttattgcttcgaattgcatcccgacaagcagtgatcacctggttctttggttttccaacccgcagacgacctgctctttgaattgcttgatttactgctttgaggtttcccaacagctctgtgtgattgttacagcgaattttatatccatttagcaagtctctattaaggtcatagagttccatataacgactcttcattgttttcatgtccctcatcagacgagcatcctcagctccgaccagcaaacttcggatcaaattagaatgatcagccatatcagcactgagcttctgatgcactgaatgatattcatccacctggagaccatgaacactcaggaatgaaaaaggcctcacaaacttcttgaacccagacaaatgaaaagacactatttaccagatacagagacccccttctttcccctgttcgcttataccaattaagctacttcccgttatttcatctctgtctcaacaagttaactcatctgtgctgcctccaatttcaacacgacactccatgtgaatcttccccatgctttagcaccaggagcccccacaacacacatattaatattttagggatttgcagtgggaatattgtatactttggggccaatcagaatcatctttattttgctcttttatcttgaatttgggtttttggaaagacccaaactgaattccaccgcgctggactagggtctacgatnncctnnncncctgaaagaact

SEQ ID NO: 89258 - DNA, 3426 bp, Homo sapiens
caaaaaggctattacctgtggggaaaaggaaaagcaagatctcattaagagccttgccatgttgaaggacggcttccgcactgacagggggtctcactcagacctgtggtccagcagcagctctctggagagttcgagtttcccgctaccgaaacagtacctggatgtgagctcccagacagacatctcgggaagcttcggcatcaacagcaacaatcagttggcagagaaggtcagattgcgccttcgatatgaagaggctaagagaaggatcgccaacctgaagatccagctggccaagcttgacagtgaggcctggcctggggtgctggactcagagagggaccggctgatccttatcaacgagaaggaggagctgctgaaggagatgcgcttcatcagcccccgcaagtggacccagggggaggtggagcagctggagatggcccggaagcggctggaaaaggacctgcaggcagcccgggacacccagagcaaggcgctgacggagaggttaaagttaaacagtaagaggaaccagcttgtgagagaactggaggaagccacccggcaggtggcaactctgcactcccagctgaaaagtctctcaagcagcatgcagtccctgtcctcaggcagcagccccggatccctcacgtccagccggggctccctggttgcatccagcctggactcctccacttcagccagcttcactgacctctactatgacccctttgagcagctggactcagagctgcagagcaaggtggagttcctgctcctggagggggccaccggcttccggccctcaggctgcatcaccaccatccacgaggatgaggtggccaagacccagaaggcagagggaggtggccgcctgcaggctctgcgttccctgtctggcaccccaaagtccatgacctccctatccccacgttcctctctctcctccccctccccaccctgttcccctctcatggctgaccccctcctggctggtgatgccttcctcaactccttggagtttgaagacccggagctgagtgccactctttgtgaactgagccttggtaacagcgcccaggaaagataccggctggaggaaccaggaacggagggcaagcagctgggccaagctgtgaatacggcccaggggtgtggcctgaaagtggcctgtgtctcagccgccgtatcggacgagtcagtggctggagacagtggtgtgtacgaggcttccgtgcagagactgggtgcttcagaagctgctgcatttgacagtgacgaatcggaagcagtgggtgcgacccgaattcagattgccctgaagtatgatgagaagaataagcaatttgcaatattaatcatccagctgagtaacctttctgctctgttgcagcaacaagaccagaaagtgaatatccgcgtggctgtccttccttgctctgaaagcacaacctgcctgttccggacccggcctctggacgcctcagacactctagtgttcaatgaggtgttctgggtatccatgtcctatccagcccttcaccagaagaccttaagagtcgatgtctgtaccaccgacaggagccatctggaagagtgcctgggaggcgcccagatcagcctggcggaggtctgccggtctggggagaggtcgactcgctggtacaaccttctcagctacaaatacttgaagaagcagagcagggagctcaagccagtgggagttatggcccctgcctcagggcctgccagcacggacgctgtgtctgctctgttggaacagacagcagtggagctggagaagaggcaggagggcaggagcagcacacagacactggaagacagctggaggtatgaggagaccagtgagaatgaggcagtagccgaggaagaggaggaggaggtggaggaggaggagggagaagaggatgttttcaccgagaaagcctcacctgatatggatgggtacccagcattaaaggtggacaaagagaccaacacggagaccccggccccatcccccacagtggtgcgacctaaggaccggagagtgggcaccccgtcccaggggccatttcttcgagggagcaccatcatccgctctaagaccttctccccaggaccccagagccagtacgtgtgccggctgaatcggagtgatagtgacagctccactctgtccaaaaagccaccttttgttcgaaactccctggagcgacgcagcgtccggatgaagcggccgtccccacccccacagccttcctcggtcaagtcgctgcgctccgagcgtctgatccgtacctcgctggacctggagttagacctgcaggcgacaagaacctggcacagccaattgacccaggagatctcggtgctgaaggagctcaaggagcagctggaacaagccaagagccacggggagaaggagctgccacagtggttgcgtgaggacgagcgtttccgcctgctgctgaggatgctggagaagcggatggaccgagcggagcacatgggtgagcttcagacagacaagatgatgagggcagctgccaaggatgtgcacaggctccgaggccagagctgtaaggaacccccagaagttcagtctttcagggagaagatggcatttttcacccggcctcggatgaatatcccagctctctctgcagatgacgtctaatcgccagaaaagtatttcctttgttccactgaccaggctgtgaacattgactgtggctaaagttatttatgtggtgttatatgaaggtactgagtcacaagtcctctagtgctcttgttggtttgaagatgaaccgactttttagtttgggtcctactgttgttattaaaaacagaacaaaaacaaaacacacacacacacaaaaacagaaacaaaaaaaaccagcattaaaataataagattgtatagtttgtatatttaggagtgtatttttgggaaagaaaatttaaatgaactaaagcagtattgagttgctgctcttcttaaaatcgtttagattttttttggtttgtacagctccaccttttagaggtcttactgcaataagaagtaatgcctgggggacggtaatcctaataggacgtcccgcacttgtcacagtacagctaatttttcctagttaacatattttgtacaatattaaaaaaatgcacagaaaccattgggggggattcagaggtgcatccacggatcttcttgagctgtgacgtgtttttatgtggctgcccaacgtggagcgggcagtgtgataggctgggtgggctaagcagcctagtctatgtgggtgacaggccacgctggtctcagatgcccagtgaagccactaacatgagtgaggggagggctgtggggaactccattcagttttatctccatcaataaagtggcctttcaaaaag

SEQ ID NO: 89259 - DNA, 436 bp, Homo sapiens
gacccgctctgaggaattcggcacgagggacccccgcccccggccgcctcccgcggacgccagggctgcctgctggtacctgcgcggacgaaaaccactattgctctgttgtatgatgaagagtccgaaaatgcctatgacatccggctgaagctgacgaaagaggtgctgacaattcacaaacaagatgttgtctgtgtgggtggaagccaccagggcaggaatcgcagaactgttacactccgcagacagccagttggcggcttgggcctgagtataaagggaggttctgagcacaacgtccctgtcgtcatatcaaaaatattcgaagaccaagcagctgaccagacagggatgttgttcgtaggagatgctgttctccaggttaatggcatacatgtagaaaatgcaactcatgaagaagtggtgcatctgc

SEQ ID NO: 89260 - DNA, 1309 bp, Homo sapiens
tcctgcgtattcggacgagctgctgggtaccaggctcagacccaggcacctttgatggctccccgtggctactggaccgcttcttggcccagctgggcgattacatgtccttccactttgagcactatcaggacaacatcagccgtgtctgcgagatcctcaggcgcctaacaggccgagcccaggcctgggcagccccctaccttgatggggacctgcccctgcctgacgattacgagctcttctgccaggatctcaaggaagttgttcaagacccgaacagttttgctgagtaccatgctgtggttacctgtcccctgcccctggcctccagccagctgccagtggcccctcagctgcctgtggtgaggcaatacttagctaggttcttagagggcctggcactcgacatgggtactgcccccaggtctttaccagccgccatggccacccctgctgtgtctgggtccaactctgtatctagaagtgctctgttcgagcagcagctgaccaaggagagcacccctgggcccaaggagcccccagtcctgcccagttctacatgtagctccaagcctggtcctgtggaaccagcctcttcccagccagaggaggcagcccccacacctgtccctagactgtcggagtcagctaatcctcctgcccagagaccagacccagctcatccaggaggtccaaaaccccagaaaacagaggaggaggttttggagacagagggagaccaggaggtgtccttaggtaccccacaggaggtggtggaggccccggagaccccaggagagccaccactttctcctgggttctgaacacagcccaggtgggaacaatgctgcccctcatgatgaagtggcctgtgtggcttgagcgccccatagtccccagtcagagcagagtggtgtccccagatgacttcagaccccatagctgggcaagatgcgcttgttttggactctgcgctgagcagaaccagctcccccaactccagcagagcttgacctccgccctgtgccctttccctgctgctggctctctgctgcatccctgcccgtcttctgggagtgccgtctcacccaggcctgctcccacgagggggtcgttttgtagatcaactctcagcagatagttgcatcatctttgtcacctccacccccataaaacaccccccttggtgtcttccacactggctgggactgaactgggtctgccacgtctgccctgttgggacctcgttcctgtatggggtttatgagtctgtcaccctagccccaccctctcagctccctgtatt

SEQ ID NO: 89261 - DNA, 2507 bp, Homo sapiens
gtccacatcccattaggttttccaagctctgtgtcagctttaataatcaggaatacaaccagttctgtgtaatagaagaagcatccaaagcaaatgaagttttagaaaatctgactcaaggaaagatgtgcctagttcctggcaaaacaagaaaactgttatttaagtttgttgcaaaaactgaagatgtgggaaagaaaattgagattacttcagtggatcttgctctgggcaatgagacgggaagatgtgtggttttaaattggcagggaggaggaggagatgctgcttcctcccaagaagccttacaggcagctcggtctttcaaaaggcgacctaagctacctgacaatgaagttcactggggcagcattataattcaggcaagcacaatgatcatatccagagtcccaaacatttctgtacatctgctacatgaaccccctgcactgactaatgaaatgtattgtttggttgtgactgttcagtcccatgaaaagacccaaatcagagatgtgaagctcaccgctggcttaaaaccaggacaggatgccaatttaactcagaagactcacgtgactcttcatggaacagaactgtgtgatgaatcctacccggctttactcactgacattcctgttggagacttacatccaggggaacagctggaaaaaatgttgtatgttcgctgtggaacagtgggttccagaatgtttcttgtatatgtttcttacctgataaatacaaccgttgaagaaaaagaaattgtttgcaagtgtcacaaggatgaaactgtaacaattgaaacagtctttccatttgatgttgcggttaaatttgtttctaccaagtttgagcacctggaaagggtttatgctgacatcccctttctgttgatgacggacctcttaagtgcctcaccctgggccctcactattgtttccagtgagctccaccttgctccatccatgaccacagtggaccagctcgagtctcaagtggacaatgttatcttacagactggagagagtgctagtgaatgcttttgtcttcaatgcccatctcttggaaatattgaaggtggagtagcaaccgggcattatattatctcttggaaaaggacctcagcaatggagaatatccccatcatcacaactgtcatcactctgccgcacgtgattgtggagaatatccctctccatgtgaatgcagatctgccgtcatttgggcgtgtcagagagtcgttacctgtcaagtatcacctacagaataagaccgacttagttcaagatgtagaaatttctgtggagcccagtgatgccttcatgttctcaggtctcaaacagattcgattacgtatcctccctggcacggagcaggaaatgctatataatttctatcctctgatggctggataccagcagctgccatctctcaacatcaacttgcttagatttcctaacttcacaaatcagctgctcaggcgttttatacctaccagtatttttgtcaagccacagggtcgactcatggatgatacctctattgctgctgcatgatgttcaagaccggcccttggctgttgttacagagatgttgggcagagctatgcaggtgtttcattgtgaactctagctttgatcatggtaaaaagttaaccttttctattttttaatggatgttataccaactattcagaggaactcatacttcaaaaatattaggaaaatctgtcttatagtttctctaataaatatctgaaatctcagtacgacatgaaagaatgtcagaccattgttattgttgaaagtcatttgatgaatggtaaattctatgaaaagtaagtgatttgcatgtataatatcaggaaaattaagcatcccaagtgtgactggacaaagagagcagatgcaccagtgcctgtgccataaagttccgaatcccccatgtgtctctttcagagctggccagaccggaaataaatcattctcataaattcagtgtgtactcagaacacatacacaacaacatagggagttgtatgactgatacggaaaacttccagaaagttttaatcaaagcagtttaattaaggtatcaaaaatatctttgcttactatcaagaagtgtcaaataggttcagcttgctgccaaaatatggatcatttatgaagcaggttcatattttagaggtgttaataaaatcctcatcggaaaagatccaaagtgcaaggatttgattataaacataatttcctagactgaaagtttttggaaaagatgcagggtctgagtcaggccttctggttatattgtgcagtttcaaaagaactatttaaaactcttgaaaactcatgtaaataaaaatcatagggtgaaaattgtatttgttaaaataccttaataatttaaaatgacctgatttcctggaaaattttattattcaaaaggtggaggcattgtaaaaaggaaatagtgatgtaaataaacatgttctctttcaagta

SEQ ID NO: 89262 - DNA, 1189 bp, Homo sapiens
  misc_feature (1)...(1189): n = a,t,c or g
tcatataagaaaaggnaaataatatcaattttcagtactattatttagcactagagcccctccagttagaaaaacaattcttttaaatgtctttatgatttgaggtttcaataataactcatgaataggtgaaagtttgctatttatttagtcttagaaaaacactgaaagaaaaaggcaggaaatgtagtacgcagtgtggaagaatggagctggccacatgtagttttagcagctgcagaggaaactggctgagtctaaggttacatatttctgctcagtaagggtatccatggtgataactctcatgatgacggtagtcatcctggtaaccatcctggtatccttggtggtaactatggtaaccatagcctgcatactcatcttctgggcagcgcatccccagtgactgctgaatcgccatttcctgtctccgaagttgcatcgaatcaattaaatcgtacacaatcaccatggaccacattggggaaggataccaggatttgacatttccgtcttttccgactagaagcatggagaagtactccgggctcacttgaaaatagttacgaatgtctttcaccaaatgggctggtacgtcttctcgctcaacaacagagctcccattaattgggaacagttctaacactcccccaacttcctctccaacgcctaaaagcttcagaatggttatgtggcgcagaccaaaattgcacgcctgaccactgagggcagagagctgctgtgaataggcccagtcttcatcgttaggagcagagatcaccagcaacctcctcctccaccggaacctggataggaagttctccagggactgctttttgtcctctttgcaaacaatgccctccttcttctgcttctccatatctttgattcgggactggaaagtatcgatcagatcaaacacagacttcattgttattggtacctcatagtattgcttgactctcagatccacatctgttagcaccatgaagaagtcattgtaggtcattccgtactctttcctcagctcgctgatgagacgctggtctaccaagtcttcatcatccaccactcgcatgggcttctcattatctagctgaaagtggtcgattttcatggtgctgttgttgacagggccgaagatggtgatcacagagattttcctggtagccatcttgcagaaact

SEQ ID NO: 89263 - DNA, 1397 bp, Homo sapiens
  misc_feature (1)...(1397): n = a,t,c or g
tttttttttttgaacactcccacgcgcactttattaagtacggaaggacaggtcacaacaggggtggaggtggcggggaaggcccagcccccacccaccatcactggcacacaataaataaataagtaaatagccaagtgggcacgggagagaggtggtactgaaaacactgaccgcacagggggacacgaaagccccccttcgagctgtggccatcaacgctgtacgggtaccatgaccaggaaagggtggggcttggccacagaagccccagagcatcacaagtctttgtaaaggagaggtgtctttaggacgtggaccactcttatttactgactgaaacctggacccctagctggtcccgtgagaccccagatttattcaaggggggccactgttttctcagggttttgggattgtttcttatttgagggatnctaaaagacccantgggtcactatcacttggggtcctgatggggtccacccagggacctaggacatgcgagggtcatcgtcacttaggcttccgattggtccactcgggctccaggacgtgaaagggtcactattacttaggaacctaaactggtaccccacaggacccaacattgatgagtcactatcacttagcctttggattggtccacccaggacaataagggttgtggttccctagacctctggttgacaaggacccaagggccaggacctgaggggcagagagagctctagaagccccagggaagggggagaagactaagtactcagggatagagggaatcttcagcaggcaccagggcccagatttcaaggaggggaggtgacagggaagaaataaggccacctggctgggtcaggccaagatgaatccataggggaccagcttctggggcagcaaagagtgcccagccactgctgggagggggttgcaagggccctcaaaccttccccgggtcccagccccaccccggtgcagaactggaccaaggagccggttgtgcttaacatggctcgtgacccatcgcctccacctacgggatcagggagtggggaggggtgggcctgtggctgcaggtgcagtgggctcagtcctccaacccctctgtcaagtctgcgatgctctccacatagtaatggggcacgaggtcgtgctggccggccgctaggtaggcctgggcctcttctaggcgggagactcctgtgagcgtgagcacagtggtcatgccgcagcggtggccaaagaggatgtcggtctccaggcggtcacccaccataagcgtgcgtgcggggtcgatgctgaagttctccgtgatgcactcgaacatgtaggggctgggcttgcccaccaccagggcctggcgtcccgaggctggaattccaccacactggacgagg

SEQ ID NO: 89264 - DNA, 1280 bp, Homo sapiens; identical to SEQ ID NO: 64569

SEQ ID NO: 89265 - DNA, 6597 bp, Homo sapiens
aagagggacgtggtctttctcatcgatgggtcccaaagtgccgggcctgagttccagtacgttcgcaccctcatagagaggctggttgactacctggacgtgggctttgacaccacccgggtggctgtcatccagttcagcgatgaccccaaggtggagttcctgctgaacgcccattccagcaaggatgaagtgcagaacgcggtgcagcggctgaggcccaagggagggcggcagatcaacgtgggcaatgccctggagtacgtgtccaggaacatcttcaagaggcccctggggagccgcattgaagagggcgtcccgcagttcctggtcctcatctcgtctggaaagtctgacgatgaggtggacgacccggcggtggagctcaagcagtttggcgtggcccctttcacgatcgccaggaacgcagaccaggaggagctggtgaagatctcgctgagccccgaatatgtgttctcggtgagcaccttccgggagctgcccagcctggagcagaaactgctgacgcccatcacgaccctgacctcagagcagatccagaagctcttagccagcactcgctatccacctccagcagttgagagtgatgctgcagacattgtctttctgatcgacagctctgagggagttaggccagatggctttgcacatattcgagattttgttagcaggattgttcgaagactcaacatcggccccagtaaagtgagagttggggtcgtgcagttcagcaatgatgtcttcccagaattctatctgaaaacctacagatcccaggccccggtgctggacgccatacggcgcctgaggctcagaggggggtccccactgaacactggcaaggctctcgaatttgtggcaagaaacctctttgttaagtctgcggggagtcgcatagaagacggggtgccccaacacctggtcctggtcctgggtggaaaatcccaggacgatgtgtccaggttcgcccaggtgatccgttcctcgggcattgtgagtttaggggtaggagaccggaacatcgacagaacagagctgcagaccatcaccaatgaccccagactggtcttcacagtgcgagagttcagagagcttcccaacatagaagaaagaatcatgaactcgtttggaccctccgcagccactcctgcacctccaggggtggacacccctcctccttcacggccagagaagaagaaagcagacattgtgttcctgttggatggttccatcaacttcaggagggacagtttccaggaagtgcttcgttttgtgtctgaaatagtggacacagtttatgaagatggcgactccatccaagtggggcttgtccagtacaactctgaccccactgacgaattcttcctgaaggacttctctaccaagaggcagattattgacgccatcaacaaagtggtctacaaagggggaagacacgccaacactaaggtgggccttgagcacctgcgggtaaaccactttgtgcctgaggcaggcagccgcctggaccagcgggtccctcagattgcctttgtgatcacgggaggaaagtcggtggaagatgcacaggatgtgagcctggccctcacccagaggggggtcaaagtgtttgctgttggagtgaggaatatcgactcggaggaggttggaaagatagcgtccaacagcgccacagcgttccgcgtgggcaacgtccaggagctgtccgaactgagcgagcaagttttggaaactttgcatgatgcgatgcatgaaaccctttgccctggtgtaactgatgctgccaaagcttgtaatctggatgtgattctggggtttgatggttctagagaccagaatgtttttgtggcccagaagggcttcgagtccaaggtggacgccatcttgaacagaatcagccagatgcacagggtcagctgcagcggtggccgctcgcccaccgtgcgtgtgtcagtggtggccaacacgccctcgggcccggtggaggcctttgactttgacgagtaccagccagagatgctcgagaagttccggaacatgcgcagccagcacccctacgtcctcacggaggacaccctgaaggtctacctgaacaagttcagacagtcctcgccggacagcgtgaaggtggtcattcattttactgatggagcagacggagatctggctgatttacacagagcatctgagaacctccgccaagaaggagtccgtgccttgatcctggtgggccttgaacgagtggtcaacttggagcggctaatgcatctggagtttgggcgagggtttatgtatgacaggcccctgaggcttaacttgctggacttggattatgaactagcggagcagcttgacaacattgccgagaaagcttgctgtggggttccctgcaagtgctctgggcagaggggagaccgcgggcccatcggcagcatcgggccaaagggtattcctggagaagacggctaccgaggctatcctggtgatgagggtggacccggtgagcgtggtccgcctggtgtgaacggcactcaaggtttccagggctgcccgggccagagaggagtaaagggctctcggggattcccaggagagaagggcgaagtaggagaaattggactggatggtctggatggtgaagatggagacaaaggattgcctggttcttctggagagaaagggaatcctggaagaaggggtgataaaggacctcgaggagagaaaggagaaagaggagatgttgggattcgaggggacccgggtaacccaggacaagacagccaggagagaggacccaaaggagaaaccggtgacctcggccccatgggtgtcccagggagagatggagtacctggaggacctggagaaactgggaagaatggtggctttggccgaaggggaccccccggagctaagggcaacaagggcggtcctggccagccgggctttgagggagagcaggggaccagaggtgcacagggcccagctggtcctgctggtcctccagggctgataggagaacaaggcatttctggacctaggggaagcggaggtgcccgtggcgctcctggagaacgaggcagaaccggtccactgggaagaaagggtgagcccggagagccaggaccaaaaggaggaatcgggaacccgggccctcgtggggagacgggagatgacgggagagacggagttggcagtgaaggacgcagaggcaaaaaaggagaaagaggatttcctggatacccaggaccaaagggtaacccaggtgaacctgggctaaatggaacaacaggacccaaaggcatcagaggccgaaggggaaattcgggacctccagggatagttggacagaaggggagacctggctacccaggaccagctggtccaaggggcaacaggggcgactccatcgatcaatgtgccctcatccaaagcatcaaagataaatgcccttgctgttacgggcccctggagtgccccgtcttcccaacagaactagcctttgctttagacacctctgagggagtcaaccaagacactttcggccggatgcgagatgtggtcttgagtattgtgaatgtcctgaccattgctgagagcaactgcccgacgggggcccgggtggctgtggtcacctacaacaacgaggtgaccacggagatccggtttgctgactccaagaggaagtcggtcctcctggacaagattaagaaccttcaggtggctctgacatccaaacagcagagtctggagactgccatgtcgtttgtggccaggaacacatttaagcgtgtgaggaacggattcctaatgaggaaagtggctgttttcttcagcaacacacccacaagagcatccccacagctcagagaggctgtgctcaaactctcagatgcggggatcacccccttgttccttacaaggcaggaagaccggcagctcatcaacgctttgcagatcaataacacagcagtggggcatgcgcttgtcctgcctgcagggagagacctcacagacttcctggagaatgtcctcacgtgtcatgtttgcttggacatctgcaacatcgacccatcctgtggatttggcagttggaggccttccttcagggacaggagagcggcagggagtgatgtggacatcgacatggctttcatcttagacagcgctgagaccaccaccctgttccagttcaatgagatgaagaagtacatagcgtacctggtcagacaactggacatgagcccagatcccaaggcctcccagcacttcgccagagtggcagttgtgcagcacgcgccctctgagtccgtggacaatgccagcatgccacctgtgaaggtggaattctccctgactgactatggctccaaggagaagctggtggacttcctcagcaggggaatgacacagttgcagggaaccagggccttaggcagtgccattgaatacaccatagagaatgtctttgaaagtgccccaaacccacgggacctgaaaattgtggtcctgatgctgacgggcgaggtgccggagcagcagctggaggaggcccagagagtcatcctgcaggccaaatgcaagggctacttcttcgtggtcctgggcattggcaggaaggtgaacatcaaggaggtatacaccttcgccagtgagccaaacgacgtcttcttcaaattagtggacaagtccaccgagctcaacgaggagcctttgatgcgcttcgggaggctgttgccgtccttcgtcagcagtgaaaatgctttttacttgtccccagatatcaggaaacagtgtgattggttccaaggggaccaacccacaaagaaccttgtgaagtttggtcacaaacaagtaaatgttccgaataacgttacttcaagtcctacatccaacccagtgacgacaacgaagccggtgactacgacgaagccggtgaccaccacaacaaagcctgtaaccaccacaacaaagcctgtgactattataaatcagccatctgtgaagccagccgctgcaaagccggcccctgcgaaacctgtggctgccaagcctgtggccacaaagacggccactgttagacccccagtggcggtgaagccagcaacagcagcgaagcctgtagcagcaaagccagcagctgtaagaccccccgctgctgctgcaaaaccagtggcgaccaagcctgaggtccctaggccacaggcagccaaaccagctgccaccaagccagccaccactaagcccgtggttaagatgctccgtgaagtccaggtgtttgagataacagagaacagcgccaaactccactgggagaggcctgagccccccggtccttatttttatgacctcaccgtcacctcagcccatgatcagtccctggttctgaagcagaacctcacggtcacggaccgcgtcattggaggcctgctcgctgggcagacataccatgtggctgtggtctgctacctgaggtctcaggtcagagccacctaccacggaagtttcagtacaaagaaatctcagcccccacctccacagccagcaaggtcagcttctagttcaaccatcaatctaatggtgagcacagaaccattggctctcactgaaacagatatatgcaagttgccgaaagacgaaggaacttgcagggatttcatattaaaatggtactatgatccaaacaccaaaagctgtgcaagattctggtatggaggttgtggtggaaacgaaaacaaatttggatcacagaaagaatgtgaaaaggtttgcgctcctgtgctcgccaaacccggagtcatcagtgtgatgggaacctaagcgtgggtggccaacatcatatacctcttgaagaagaaggagtcagccatcgccaacttgtctctgtagaagctccgggtgtagattcccttgcactgtatcatttcatgctttgatttacactcgaactcgggagggaacatcctgctgcatgacctatcagtatggtgctaatgtgtctgtggaccctcgctctctgtctccagcagttctctcgaatactttgaatgttgtgtaacagttagccactgctggtgtttatgtgaacattcctatcaatccaaattccctctggagtttcatgttatgcctgttgcaggcaaatgtaaagtctagaaaataatgcaaatgtcacggctactctatatacttttgcttggttcattttttttcccttttagttaagcatgactttagatgggaagcctgtgtatcgtggagaaacaagagaccaactttttcattccctgcccccaatttcccagactagatttcaagctaattttctttttctgaagcctctaacaaatgatctagttcagaaggaagcaaaatcccttaatctatgtgcaccgttgggaccaatgccttaattaaagaatttaaaaaagttgtaatagagaatatttttggcattcctctcaatgttgtgtgttttttttttttgtgtgctggagggaggggatttaattttaattttaaaatgtttaggaaatttatacaaagaaactttttaataaagtatattgaaagttt

SEQ ID NO: 89266 - DNA, 721 bp, Homo sapiens
  misc_feature (1)...(721): n = a,t,c or g
accgccgcccccaccccctcctctccgtgctctgtcctcatcctctcaagctgcaactcatcagaacttaggcttccgggctccagtgaaagatgaccagccacgtcctctagtgtgcgaatcacctgctgagcgaccacgtgactccttggaaagtttttcatgtccaggatctatggatgaagtgttggcctccttaaggcatggcagagctcctctccggaaggtggaagtgccggcggtgcgccctcccccggcctcaatcaatgagcacattctggctgccataaggcaaggggtcaaactgaagaaagttcaccctgatcttggcccaaaccccagcagcaaaccaaccagcaacagacgcaccagtgaccttgagaggagcatcaaggctgcgctccagagaatcaagagggtgtctgctgactctgaggaggacagtgatgagcaggaccctggccagtgggatggttaggctcaagtttgacaaaggcacctgccacagtaggcttgaataaagtgggtgagtcttagacctatcgaaaagcatactaacagggtgctgatagatgggccacataacaccccggaagatcagcagggccttgtgtaggctgctgcagcannnnnnnnnnnnnnnnnnnnggaaagggagtctcattttgtcccccaggcgggggggcaggggcgccatttgggttaaccgaaggctccgttt

SEQ ID NO: 89267 - DNA, 711 bp, Homo sapiens
agcgtggtggaattcacccagagcccatgctgtctccccaggagggcactgctcagccgccctctctttctgcaggccagaagcacttgtgtgtcaccagcctcctgatctgccagggtctgctctgggtgggcactgaccagggtgtcatcgtcctgctgcccgtgcctcggctggaaggcatccccaagatcacaggtgaggctttgggagctggtgttggcaggaccagggggtcagctgcaggtggccagtggggcttggcggggagggtgtattacgccctcattggtatagggatggggttccagtctccagcttcctctcatctcaggtggcatggtggccagtagaactgaatcgtcctggccccagtctcccacctttctgagtgtcagtttcctaatctggcagatggacacaagagtggcttggggcctggctgagacacctgcctaatggcaggggctccactggccctttctgcttcttcccatagcagtttcaagatgtccaggctccagagaaagaaataactgagtgcttctggggccaggcccggcctgctcgtggggtccatgtgcaaatgaatgtgttcacatagatcagaggaaggtctgctctgatctgcactactgggcccaggacaacaagggcaggatcagagaagacccccacacttggatgcctggagctccgggtccccctctg

SEQ ID NO: 89268 - DNA, 824 bp, Homo sapiens; identical to SEQ ID NO: 63711

SEQ ID NO: 89269 - DNA, 1917 bp, Homo sapiens
ggacttcggcacgaggtcacactgcgggtgctcctcaaagacgcgctgctggagcctggcgccggggtgctgtccatctactacctggggaagaagttcctgggcgacctgcagccagacggaaggatcatgtggcaggagaccgggcagaccttcaactcacccagcgcctgggccacccactgcaagaagctggtgaaccctgccaagaagtcgggctgtggctgggcctctgtcaagtacaaaggccagaaactggacaagtacaaggccacctggctccggctgcaccagctgcacacgcctgccacggctgctgatgagagcccagccagtgaaggggaggaggaggagttgctgatggaagaggaggaggaggacgttctggcgggggtctcagcagaggacaagagtcggagaccactggggaagagcccttcagagcctgcccacccggaggccacaaccccagggaagcgggtggacagcaagatccgggttccggtccgctactgcatgctgggcagccgcgacttggccaggaacccccacaccctggtggaagtaacatcctttgcagccatcaacaagttccagccgttcaacgtggctgtttctagcaacgtgctgttcctgctggacttccacagtcacctgacacggagtgaggtcgtgggttacctggggggccgctgggacgtcaacagccagatgctgacggtgctcagagccttcccttgtcggagccggctcggggacgcaaagactgcagctgccatcgaagaggagatctaccagagcctgttcctgcggggcctgtccctggtgggctggtaccacagccacccgcacagcccggcgctgccatctctgcaggacatcgacgcacagatggactaccagctgcggctgcagggctccagcaatggcttccagccctgcctcgccctgctctgctccccttactattctggcaacccaggccccgagtccaagatctcgcctttctgggtgatgcctcctcccgagcaaaggcccagtgactatggcatccccatggatgtggagatggcctacgtccaggacagcttcctgaccaatgacatccttcacgagatgatgctgctggtggagttctacaagggttcccctgacctcgtgaggctccaggaaccctggagccaggagcacacctacctcgacaagcttaagatctccttggccagcaggacgcccaaggaccagagcctgtgtcacgtcctggaacaggtgtgcggcgtcctcaagcaggggagctgagccttccagggcagggtgggctccagttgtcttgagggtccggatgggctcaagttctggagggggtcaatgaagttctgcttgacctcgatgtccagggagtccttcacctctgccaggcgcttcatggactcgccggcatccagcagtgcatcactgaagttggactcgttgcccagctccttctggtggcggatcaggcactcgctcaggagcccctccgactgcgggtagccggggttcttcacctggccctggatctttcacactgtgttgagcatggtcagcttagcctgtgaggctgggttgggctccaggtacttgatggtccttgccagcatttccatcaccgccttgctgatgacatctccatctctttgaagtcattgtccagcttggtcccctcagaccctccgaccttctcactgaccagctggcttgccttgtagaactgctttttcagccctgcaaccaacaggctgcctcccgccgcagaacctcccgcccagaccgcgccagcgacaggcttctaggtgcgcgaccctctgcacacctcaggggccccaccacgtgcttgccatctttgtgcctgccccggctccgcctcgaactgcgaac

SEQ ID NO: 89270 - DNA, 451 bp, Homo sapiens
ggaattcccttcttgccttcaggcttcttctccttagtatccggcttctcaactttttcacctgccatcttgttttatgggaaagagctgaacttaatttttttgataactcacgttcaccaccatgataacattctcaggggttactgagataaatagctgtatatctataaaacaattcactgaataattaactagtacctactgagtgacttctgtgtgccaggcatttggattggataccaggtatatgataatgaacaaaaccagatggaatttctatctttgtgatataaagtctagttgtgaaaaaaaaatgacaccacctaaatgatcacacaaatgtataattttaaaccttgatcaagtgctatgaagataatttttattgttaagaatattactttggaattagatcacggttcaatcccaaattgaccaattggtagtg

SEQ ID NO: 89271 - DNA, 801 bp, Homo sapiens
  misc_feature (1)...(801): n = a,t,c or g
gtagcttggcacgaggtggacacaagcaacggggtcctattgcccttttacgatcccgactccagcatcgtctacctgtgtggcaagggcgacagcagcattcggtactttgagattaccgacgagccgcctttcgtgcactacctgaacacgttcagcagcaaagagccgcagcggggcatgggtttcatgcccaaaaggggactggatgtcagcaagtgtgagatcgcccggttctacaagctacacgaaagaaagtgtgaacctatcatcatgactgtgccccgcaagtcagacctcttccaggacgatctgtacccggatacgccaggcccggagccggccctagaagcggacgaatggctatccggccaggacgccgaacccgtgctcatttcgctgagggacggctatgtgccccccaagcaccgcgagctccgggtcacgaagcgcaacatcctggacgtgcgcccgccctccggcccccgccgcagccagtcggccagcgacgcccccttgtcgcagcacaccctggagacgctgctggaagagatcaaggccctccgcgagcgggtgcaggcccaggagcagcgcatcacggctctggagaacatgctgtgcgagctggtggacggcacggactagccccgcgcgccaggcaggcggagcggggcgggtnnntntntntttnnncttttntgnttttttttttttnntttccgtntcttntttttgtnntgtgtnntgngggggtggtggtgtgggggctntgtcttttggtggagaacctatcgtttggcg

SEQ ID NO: 89272 - DNA, 2016 bp, Homo sapiens
gcggccgcggacctagccaacagcaacgccggcgccgccgtgggcaggaaggccgggccgcgcagcccgcccagcgcccccgcgccagcgccgccgccgcccgcgcccgcgccgcccacactcggcaacaaccaccaggagagccccggctggcggtgctgccgccccacgctgcgcgagaggaacgcgctcatgttcaacaacgagctcatggccgacgtgcacttcgtcgtggggcccccgggggcgaccaggacggtgcccgcccacaagtacgtcttggctgtcggcagctccgtcttctatgccatgttctacggagacctggcggaagtcaaatctgaaattcacattccagacgtggagcccgcagcctttctgatcctcttaaagtacatgtacagtgatgagatcgatctggaagccgacacggtgctggccactctgtacgctgctaagaagtacatcgtcccagcattggcaaaagcctgtgtcaactttctggagacaagtttggaagccaagaacgcctgcgtcctgctgtcccagagccggctgtttgaggagcccgagctgacgcagcgctgctgggaggtcattgacgcacaggccgagatggccctacggtccgaaggcttctgtgagatagaccggcagacgctggagatcattgtcactcgggaggccctcaacaccaaagaggcggtggtcttcgaggccgtcctgaactgggccgaggcggagtgcaagaggcaggggctgccaatcaccccacgaaacaagaggcatgttctggggcgagccctctatctggtccgaattccaaccatgaccctagaggagtttgccaacggcgctgcccagtcagacatcctgactctggaggagacccacagcatcttcctgtggtacacggccaccaacaagccccgcctggactttcccctgaccaagaggaagggcctcgccccgcagaggtgccaccgattccagtcttctgcctaccgcagcaaccagtggcggtaccgcgggcgctgcgacagcatccagtttgcagtggacagaagggtatttattgcagggctgggcctgtatggctccagctctgggaaggctgagtacagcgtgaagattgagctcaagcggctcggggtggttctggctcagaacttgaccaagttcatgtcagacggatccagtaacaccttcccggtctggtttgaacacccggtccaggttgaacaagacaccttctacacggccagtgccgtcctggacggcagcgaactcagctactttgggcaggaggggatgacggaagtgcagtgtggaaaggtggccttccagttccagtgctcctcggacagcaccaacgggactggggtccagggtgggcagatccctgagctcattttctatgcctgaggtgcccggggaggctgcagcaggtcagcgagtgagtggaggggaagtcaagatgctaactgcttcttgacaccatgaaaggctgctcttaactttgtctctctttgacatgtagtcagctgaagcttgactgtgtagagacattttccacacagccagaacccagggattggagtcttaggcatctctggtacagtggggtgcacgtctcaggtggaggaagatttacggctcaagacaggccccagatcccctcccagtggcacccatgccacctgctttgaggggttggatcttcctgctaccctcttggattctaagtggttccaagcttaacttgagaccttcccttcaaatctaaaattggcaaaaagtcacttaaaatagtggacttctgtaataaaggttgcctaaaataacaaaaaaaaaaaaaagggggggcccgtttaaaagaaccaaatttaactaccgggggctggcaaggaaaaattttttttttggggccccaaaaataaattccggggccggggttttaaaacgggggggggggaaaaacccggggggtacccaaattaattcgcttggagcaaa

SEQ ID NO: 89273 - DNA, 3821 bp, Homo sapiens; identical to SEQ ID NO: 63708

SEQ ID NO: 89274 - DNA, 419 bp, Homo sapiens
cccacacgacgttcctggtgcagcactggctcggcgcggaagaaatgccgcgacggtacgcggactacctccgcagcgacgggttcaccgtgatgaacaccatttcgacgatcggcgcgttcattttgggcgcttcggtgctgccgttcatctggaacgtggtgaagagctaccgctacggcgagaaggtcaacgtgaacgacccgtggggcttcggcaattccctggaatgggccacgtcgagcccgccgccgcggcacaatttcaccgaactgccgcggatccgctccgaacggcccgctttcgaactgcactatcccgacatggtcgagcggatgcgggaggagcagcacatccattggggcaagcgcgcgaaggcggaatcggacgcctgatccctcgtgccaagctaggagtaa

SEQ ID NO: 89275 - DNA, 1293 bp, Homo sapiens; identical to SEQ ID NO: 63734
  misc_feature (1)...(1293): n = a,t,c or g

SEQ ID NO: 89276 - DNA, 426 bp, Homo sapiens
gggtgattggctcgctgatacgggcgggttgggttatgacggcggtgcgttggtttttggcgcggctctggcgatcgttgcggggctgtactactggacgagcatgtcgcgcgtggcgctgttctggttggccttcatactgacccgaccgctgggtgccacggtgggcgatttcctcgataagccggtggccgaagggggattggacttgagtcgcccagtggcgtcagctgtgctggcagccatcatcatcgtgctgcttatcgtgctaccgcagcgcccgggacagcaccccggccacgacgatccgagtccgccccccgatgacgccacttcgaccgtaggccggcgatcggcagccagttgatgtgcgtcagcaaggccaatctgcgacgatccggaggctatccgtggtgcccaccatcc

SEQ ID NO: 89277 - DNA, 434 bp, Homo sapiens
tcggaggaacgtcttgaccatcattacgcctagcctggcacgaggggcaacgctgatcgagtgtggagaatacggactttcccgactgtatcagcggaccatagaagggatgacgatggagctattgcagggggcgaccattccggtcctttatgcccattgagtacccccaacgccaggatcgtgcctcggcagcggcgaaaggcagattggggagcacgcagtcggactcctggcgcttcgcgctgttctgccttggaatctacatagggtgctggctgcttgccgcagtcaaaccctaccaccggcgcgactggttgctggagaatctgctggcattcatcgccattccctacgttgtcttccaacagtggaagcgcccgttccggcccgcaaccaatgtctcgcttctgctttttctgtgcctgcatgcc

SEQ ID NO: 89278 - DNA, 2518 bp, Homo sapiens
agcggttttacacactatgcaatctatgatttcattgtcaagggcagctgcttctgcaatgttcacgctgatcaatgcatacctgttcatggcttcagacctgtcaaggccccaggaacattccacatggtccatgggaagtgtatgtgtaagcacaacacagcaggcagccactgccagcactgtgccccgttatacaatgaccggccatgggaggcagctgatggcaaaacgggggctcccaacgagtgcagaacctgcaagtgtaatgggcatgctgatacctgtcacttcgacgttaatgtgtgggaggcatcagggaatcgtagtggtggtgtctgtgatgactgtcagcacaacacagaaggacagtattgccagaggtgcaagccaggcttctatcgtgacctgcggagacccttctcagctccagatgcttgcaaaccgtgttcctgccatccagtaggatcagctgtccttcctgccaactcagtgaccttctgcgaccccagcaatggtgactgcccttgcaagcctggggtggcagggcgacgttgtgacaggtgcatggtgggatactggggcttcggagactatggctgtcgaccatgtgactgtgcggggagctgtgaccctatcaccggagactgcatcagcagccacacagacatagactggtatcatgaagttcctgacttccgtcccgtgcacaataagagcgaaccaccctgggagtgggaggatgcgcaggggttttctgcacttctacactcaggtaaatgcgaatgtaaggaacagacattaggaaatgccaaggcattctgtggaatgaaatattcatatgtgctaaaaataaagattttatcagctcatgataaaggtactcatgttgaggtcaatgtgaagattaaaaaggtcttaaaatctaccaaactgaagattttccgaggaaagcgaacattatatccagaatcatggacggacagaggatgcacttgtccaatcctcaatcctggtttggaataccttgtagcaggacatgaggatataagaacaggcaaactaattgtgaatatgaaaagctttgtccagcactggaaaccttctcttggaagaaaagtcatggatattttaaaaagagagtgcaagtagcattaagatggatagcacataatggcacttgtctatgtacaaaacacaaactttagagcaagaagacctcagacaggaaactggaattttttaaagtgccaaaacatatagaaatgtttgaatgcatgggtcttatctaatttatctcttctggacccatgtttaaatacagttttatttcatgaagagaaatgaaaacccctacactgatatctgttttctatgggactgattctgaaattcttaactattaagaatattttaatagcagcatgacatttagcagtaatccattaagggcagtacctctaacaaggacgccttccagcttcagcgatgttacttacgtttgatgctacttaaagtaatgaatgacgttttaaggaatccctaaccctactatcagaaaaggtgtttgtttaaagagccttctcttgtgtgttacgcatgaactttggtctgtaggtgttaaatggaacctctccatgtgtatatagtatttccttgtataaagcactttactacctaccacttgtgttgtgaacgtttggtgactgctgttgaaagaaggaaaagggtgtgtgagaaagcctactgaagcagcagcactgccactacatgtggacaaaagtgaccatataaaagaagttgtgctatttaactctgaatacttggagaaactaggtgaagatgcaaccagaaaggagaatatgtatgcgtgaagtctcagctttgagctggaggctagattccaagatgacagccatgatgaaactttttaaaaaactaaaccagaagagactttaaaataagagaaagaaatcataaatgtagacatatgcttggctaaaggggaaatggactttaaattttaaagagctcatttgcaatgcacttgtatacacttcaaaaattattgtagacacagaatttgttatatttttgtgcttagtatttaaacctgaacattgaaacagttttcctccttgtctttcttaacagtaatagtcattatatttacctgttttttaacacaatgtatgtgatagtcaaaaaatcacagtttttcattattattcatcttctgtacccacgcataaccactatacatagtttcttttgtacttgaatatacaaaacatgaacacagtgccatatgaataatttcacatacagaacctttttttctctgaagtcctgtggacttgcaaatatatatatatattgctttgttaatttgtttttatatttcatatatgtaataaaggaatatgatctgatttttgtctcatttcttaactctttcagtgatgctaaagattatcttctcataatgagggaacttaaatctaattcattaatataa

SEQ ID NO: 89279 - DNA, 381 bp, Homo sapiens
tgtgagcgatgagacgaagcatgaagttgagggcgtgaccgagttgctggttccgttcttcctcgtcgggatcggcatgcagatggatctcagcgtgtttgccgatcagacgacgatgctgatctgtggcatcatcctgctggcggccgtggccgcgaaactgatcggatgcgggctgggggcggcgcgattagggatgagcgacgcgctgaaggtgggcgtgggcatggtgccgcgcggtgaagtgggcatggtggtggcgcagatcgggctgagtatcggggtgatcccgaagaatgtgtacgctgtggtggtgtttatgtcggtggcgacgacgatgattgcgccggtgatgttaagcggcctcccagctcgtccgaa

SEQ ID NO: 89280 - DNA, 642 bp, Homo sapiens; identical to SEQ ID NO: 63951

SEQ ID NO: 89281 - DNA, 708 bp, Homo sapiens
  misc_feature (1)...(708): n = a,t,c or g
tggagaggcagatgcagcctcaggaccagctggtgctgcagtttgctcaggaagctggagaacagaagagaagggcagcgtggcagcagtggagcggggcagcagggattttgctgcacactctggagagggactacctggttcaaactccaccccactgctcacgggctctgggataccggattcgagattacggtgagccctttcaggaagcaatgtggttggacctggttaaggaaaggctgattacggaaatgtacacggtggcatggtttgtgcgagacatgcgcctgatgtttcgcaaccataaaacattttacaaggtaaagagcatttcctgcttcctttttgcgtcttttctactttcccctaatttctgggacagcagaattttgcaagtattacactcagtttcagcctggggagagctcaaacaagacaaggattacagaaaaaaaaccacctcggcattcctggaggcaaggagtgagtggcaaaaagaacagcaagcaggacaggggagggatctctggaacagaagctgaaaaaaaccatgctctgttcccagatcggcagctcgctcccaacgagagcagtaaatggcatccagcctctttgttcaaactggaaggaaaggcagtttatgcctacattgttcttcctgcctcagaaatatgaaaataaataagtaaacaacatanaatcaat

SEQ ID NO: 89282 - DNA, 1145 bp, Homo sapiens
catgacggcggcggcgacggctaccgtgctcaaggagggcgtgctggagaagcgcagcggcgggctgctgcagctgtggaagcggaagcgctgcgtcctcaccgaacgcgggctgcagctcttcgaggccaagggcacgggcggccggcccaaggagctcagcttcgcccgcatcaaggccgtggagtgcgtggagagcaccgggcgccacatctacttcacgctggtgaccgaagggggcggcgagatcgacttccgctgccccctggaagatcccggctggaacgcccagatcaccctaggcctggtcaagttcaagaaccagcaggccatccagacagtgcgggcccggcagagcctcgggaccgggaccctcgtgtcctaaaccaccgggcgcaccatctttccttcatgctacccaccacctcagtgctgaggacaaggcagcttcgttgttccctctggcttgtgggggcacggctgtgctccatgtggcaaggtggaaggcatggacgtgtggaggaggcgctggagctgaaggaatggacgagccctgggaggagggcagaaggctacgcagggctgaggatgaagatgcagcccctggatggtcccagactctcaggacatgcccagctcaggggcttcgagccacaggcctggcctcatatggcatgagggggatctggcataggagccccctccctgctgtggtcctgccctctgtcctgcagactgctcttagccccctggctttgtgccaggcctggaggagggcagtcccccatggggtgccgagccaacgcctcaggaatcaggaggccagcctggtaccaaaaggagtacccagggcctggtacccaggcccactccagaatggcctctggactcaccttgagaagggggagctgctgggcctaaagcccactccctgggggtctcctgctgcttaggtccttttggggacccccacccatccaggccctttctttgcacacttcttcccccacctttacgcatcttccgccccactgcggtgttcggcctgaaggtggtgggggtgagggggggtttggccattagcatttcatgtctttccccaaatgaagatgctcctgcaaagggcagtaaccacacaaaaaaaa

SEQ ID NO: 89283 - DNA, 403 bp, Homo sapiens
cctacatctccgaaagcaagctcttctagaagttggtgagcagaatgctttttgtttagaagtgtggctataaatgtctttgtagttgatgcactctcatctagtaagtaactattatttttgggctctctagaaaggtaattattatctgatataatagtttagtctgtgatgcttcttttaacatatttgtaagttttaaccaaatggttaaagaaatttgctttttaacccttaaacctcacatatccacaagtctctaaattccataggatgctatggatttctagttgcctagttcatgtcttttacttagaaaacgtcagaaaacccaaacttctcgtgacttcaaaaagtgtaattgtacctgaaacttcttttccttcagatttcttatttatgg

SEQ ID NO: 89284 - DNA, 411 bp, Homo sapiens
cggacgcgtgggcctctcttctcctttccagctatcctcaaccagtgtccctttgttgcagtttcacatgttgggatcagcgtgccccttgggttccttatgggctggacaggtcagcatggtgctgtctggcctctgctaggtgacacagattctggctttctggccctgactttgttcttgattcagagattgtctgcaccaggttttacaaattatctcaacccactagtgtatcatgaaatcagcacagtggtacatttgaaaataaaagaaggaaacagagtggatcacagtaagggaaaggtgtggagctatatatacagcatatagccttcatgaaaaggacttatatttcttacagcaggttccagtgcagtcaaaaatgtttgaactgttgaatgtttaaac

SEQ ID NO: 89285 - DNA, 827 bp, Homo sapiens
  misc_feature (1)...(827): n = a,t,c or g
tccgggtcgtcccacgcgtccgacggatcagggttccaggaactcaggatctgcagtgaggaccagacaccactgattgcaggaatgtgttccctccccatggcaagatactacataattaaatatgcagaccagaaggctctatacacaagagacggccagctgctggtgggagatcctgttgcagacaactgctgtgcagagaagatctgcacacttcctaacagaggcttggaccgcaccaaggtccccattttcctggggatccagggagggagccgctgcctggcatgtgtggagacagaagaggggccttccctacagctggaggatgtgaacattgaggaactgtacaaaggtggtgaagaggccacacgcttcaccttcttccagagcagctcaggctccgccttcaggcttgaggctgctgcctggcctggctggttcctgtgtggcccggcagagccccagcagccagtacagctcaccaaggagagtgagccctcagcccgtaccaagttttactttgaacagagctggtagggagacaggaaactgcgttttagccttgtgcccccaaaccaagctcatcctgctcagggtctannnnnnnnnnnnnnnnnnnnnnnnnnnnnnnnnnnnnnnnnnnnnnnnnnnnnnnnnnnnnnnnnnnnnnnnnnnnnnnnnnnnnnnnnnnnnnnnnnnnnnnnnnnnnnnnnnnnnnnnnnnnnnnnnnnnnnnnnnnnnnnnnnnnnnnnnnnnnnnnnnnnnnnaaggaggcaggaagggagagtcagagagagaatggaagataccatgcttctaat

SEQ ID NO: 89286 - DNA, 639 bp, Homo sapiens
  misc_feature (1)...(639): n = a,t,c or g
gaaaaagtagctgttctctgtaaagaaaactatctacttccagaagcaaaagaaattgtatgtaaagatggacgatggcaatcattaccacgctgtgttgagtctactgcatattgtgggccccctccatctattaacaatggagataccacctcattcccattatcagtatatcctccagggtcaacagtgacgtaccgttgccagtccttctataaactccagggctctgtaactgtaacatgcagaaataaacagtggtcagaaccaccaagatgcctagatccatgtgtggtatctgaagaaaacatgaacaaaaataacatacagttaaaatggagaaacgatggaaaactctatgcaaaaacaggggatgctgttgaattccagtgtaaattcccacataaagcgatgatatcatcaccaccatttcgagcaatctgtcaggaagggaaatttgaatatcctatatgtgaatgaagcaagcataattttcctgaatatattcttcaaacatccatctatgctaaaagtagccattatgtagccaattctgtagntacttcttttattctttcaggcgttgtttaactcagttttatttagaactctggatttttagagctttaaaaatttgta

SEQ ID NO: 89287 - DNA, 399 bp, Homo sapiens
agagcctagatccttgaagtatttgaaggtgtttgggtcggcattcagctaaactttaacagggactatgtggactgtttattctcctgccattcctagcattacttgagccactcgagtggcactaaagtggtacttggtaaataggagccagattcttagtcttttaacccttgaaccagccctgcctacagacttaagtggggggaaaaggatcaggaagagaggtcatatgagagaggatcctgcatctctccacttgggttcttcagttcacttggccctttgtgaaagtgtagatgatagagacagagcaggaaccatcttgggaatttcctttacgcttttcttttaacaagcctctgggtagggagggggctggtggggcaggaaggcctt

SEQ ID NO: 89288 - DNA, 440 bp, Homo sapiens
tctttatccttcaggcagttctacaactctcctctcaggaggcccgctacaaagcatttgggacatgtgtctctcacataggtgccatcttagccttctacacaccttcagtcatctcttcagtcatgcaccgtgtggcccgctgtgctgcgccacacgtccacattctcctcgccaatttctatctgctcttcccacccatggtcaatcccatcatctacggcgttaagaccaagcagatccgtgacagtcttgggagtattcccgagaaaggatgtgtgaatagagagtgaggaataagtggaaaaagagtggggcacagtgaatgctgtagtgggccagggctgtgctgagagtagatgggtcctagactccacgtttagttcttttcttgtattatgaaaagaataaatgatgtcctgaagctcagaaaaaaaaaa

SEQ ID NO: 89289 - DNA, 1188 bp, Homo sapiens
cggcacgagcccagctgtagcaatggcgtcgcgtccaccaagagcaaacagaaccacagtaaataccctgcacccagctcctcatcctcgtcctcctcctcctcctcgtcctcttccccatcctccgtcaattactccgagtccaactcaacagactccaccaagtcccagcaccacagcagtaccagtaaccaggagaccagcgacagtgagatggagatggaggcagagcactaccccaacggtgtgctaggaagcatgtccacacgcattgttaatggtgcctacaagcatgaggacctgcagacggatgagtccagcatggatgacaggcatcctcggcggcagctctgcgggggcaaccaggctgccacagaaaggatcattctgtttggccgcgagttgcaggcattgagtgagcagttgggccgggagtacggcaagaatttggcccacacagagatgctgcaggatgccttcagcctgctggcatactcagacccctggagctgcccagttggccagcagcttgaccccatccagagggaacctgtgtgtgctgccctcaacagcgccattttagagtcccagaacctgccaaagcagccccctctgatgctcgccctgggccaggcatctgagtgtctccggctcatggcccgagcaggcctgggttcttgctcctttgccagagttgatgactacttgcactagctgactgtgctggctggctctggctggccctccactggccccagggctgggagctgccctgccctccataggcaactggtgcagggactgggaaaccatagacagagtccactcctcctgcctggcctttccccctctccctttccttccttccttcctttctctgcccaccaccccgctcagtctctctctctctccccttcacgtgcagcggcctgtaacacagtattggctggttactctcatgtagcgccttctattttgaaaggggggttttgttttgaggaggggttggggtttttaaatttttttctcctgactgagccaccagtatttatctctggagagtttgtgctgagctggtttctgctaatttagtgatgaagcctatccaagttggtgatagcttattattttcataagtaaaaaacaaatgagattatatatatatatataaaaatatatatattaaaa

SEQ ID NO: 89290 - DNA, 359 bp, Homo sapiens
cattaagtgtgcatatactatcttgggcatttgcatagcacttagggagttaacaagttggtgtttatcttggcagaccaccttcaggcagctacctttattgtgggtgtgtgacctcatgtaacttgagtgggattttccatgtcattagtagttcctagggagtagagagtaaatctctttttggaagaggttgtattctcctgaatccaaaatacctttctgtatgttttgttgtcttttaagaatatttctcagacgttatataagtaatttcattttttctgagtcccttctttggaaaaggagttcttgccaaatgaaagggacacagtgtttggtttttcagttcattatga

SEQ ID NO: 89291 - DNA, 6806 bp, Homo sapiens
cagctccgaggggagtcggaccggagcaaacagccacccccggcttcgtcccccacgaagaggaagggcaggagccgtgccctcgaggccgtgcccgccccgcccgccagcggcccccgggctcccgccaaggagtccccacccaagagggtgcccgatcccagcccagtcaccaagggcactgcggccgagagcggggaggaggcggcgcgggccatcccccgcgagctcccggtcaagagcagctcgctgctgccggagatcaagcccgagcacaagaggggcccgctccccaaccacttcaacggccgggcagagggaggtcgaagcagagagctgggcagagcggccggagcgcctggagcttctgacgccgacggcttgaagcccaggaaccatttcggcgtgggcaggtcgacagtgaccactaaagtgaccctccctgccaagcccaaacatgtggaactaaatcttaaaacccctaagaatcttgacagtttgggaaatgagcacaatccatttagccagccagttcacaaaggcaacactgccaccaaaatctccttatttgaaaacaaacggacaaacagtagcccaagacacactgacattcgaggcccaaggaatactcctgcctctagtaaaacgtttgttgggagggcaaagctgaatttagccaaaaaagccaaagaaatggagcaacctgaaaagaaagtaatgccaaacagtccccagaatggtgtgctggttaaggaaactgctatagaaaccaaagttaccgtctcggaagaagagattctgccagcaaccagaggaatgaatggagactcttctgagaatcaagctcttggtcctcagcctaaccaagatgataaagcagatgtacaaacagatgctggctgcctttcagaaccagtggcttctgctctgattcctgtcaaggatcataagctcttagagaaggaggactcagaggctgcagacagcaaaagccttgtacttgaaaatgtaaccgatacagcacaagacatccccaccactgtggataccaaagatttacctccaacggccatgccaaagccacagcatacattttctgactcacagtcccctgctgagtcatctcctgggccttctctttcactgtctgcacccgctcctggggatgttcccaaagacacatgtgttcaatcacccataagcagtttcccatgcactgatctaaaagtgtcagaaaaccataaaggatgtgttttgcctgtgtctcgtcagaacaatgagaaaatgccacttttagaacttggaggagaaacaacccctcctttgtccacagagcgtagtccagaagctgtgggaagtgagtgtccatccagagtcctcgtccaggtcaggtccttcgtgctccccgtggagagcacccaggatgtgagctcccaggtcatcccagagagctctgaagttagagaagtgcagttgccaacttgtcacagtaatgaacctgaagtggtttccgttgcaagttgtgctcccccacaagaggaagtactgggcaatgaacactctcattgcacagcagagctcgcggcaaaatctggcccacaagtcataccgccagcatcagagaaaactctgcctattcaggctcaaagtcagggcagcagaacacccctgatggctgaatccagtcccaccaactctcccagcagcggaaatcacttagccactcctcaaaggccagatcagactgttacaaatggccaggatagccctgccagccttttgaacatttctgctggtagtgatgatagtgtatttgattcttcttctgatatggaaaaattcactgaaattataaaacagatggatagcgcagtttgtatgcccatgaaaagaaagaaggccaggatgccaaactctcctgctcctcactttgccatgcctcctattcacgaagaccatttagaaaaggtgtttgatcccaaagtgtttacctttggtttggggaagaagaaggaaagtcagccagaaatgtcaccggctttacatttgatgcagaaccttgacacaaaatccaaactgagacccaaacgtgcatctgctgaacagagcgtcctcttcaagtccctgcacaccaacactaatgggaacagtgagcctctggtgatgccggaaatcaatgacaaagagaacagggacgtcacaaatggtggcattaagagatcgagactagaaaaaagtgcacttttctcaagcttgttatcttctttaccacaagacaaaatcttttctccttctgtgacatcagtcaacactatgaccacggctttcagtacttctcagaacggttccctatctcagtcttcagtgtcacagcccacgactgagggtgccccgccctgtggtttgaacaaagaacagtcaaatcttctgcccgacaactccttaaaggtcttcaatttcaactcgtcaagtacatcacactccagtttgaaaagtccaagccacatggaaaaatacccgcaaaaagagaaaaccaaagaagatctggattcacgaagcaacctacacttgccagaaactaaattttctgaattgtcaaaactgaagaatgatgatatggaaaaggctaatcatattgaaagtgttattaaatcaaacttgccaaactgtgcaaacagtgacaccgacttcatgggtcttttcaaatcaagccggtatgacccaagcatttctttttctggaatgtcattatcagacacaatgacacttagaggaagtgtccaaaataaactcaatccccgacctggaaaggtagtgatatatagtgaacccgacgtctctgagaagtgcattgaagttttcagtgacattcaggattgcagttcttggagcctctctccagtgatactcataaaagttgttagaggatgttggattttgtatgagcaaccaaattttgaagggcactccatccccttagaagaaggagaattggaactctctggtctctggggtatagaagacattttggaaaggcacgaagaagcagagtctgataagccagtggtgattggttccatcagacatgtggttcaggattacagagttagtcacattgacttatttactgaaccagaagggttaggaatcctaagttcctactttgatgatactgaagaaatgcagggatttggtgtaatgcagaagacttgttccatgaaagtacattggggcacgtggctgatttatgaagaacctggatttcagggtgttcctttcatcctggaacctggtgaataccctgacttgtccttctgggatacagaagcagcgtacattggatccatgcggcctctgaaaatgggtggccgtaaagttgaattccctacagatccaaaggtagttgtttatgaaaagcctttctttgaaggaaaatgtgtggaactagaaacaggaatgtgtagttttgtcatggagggaggtgaaacagaagaggcgactggagacgatcatttgccgtttacgtcagtggggtctatgaaagttctaagaggcatttgggttgcatatgagaagcctggatttaccggtcatcagtatttgctagaagaaggagaatacagggactggaaagcctggggaggttacaatggagagcttcagtctttacgacctatattaggtgatttttcaaatgctcacatgataatgtacagtgaaaaaaactttggatccaaaggttccagtattgatgtattgggaattgttgctaatttaaaggagactggatatggagtgaagacacagtctattaatgtactgagtggagtatgggtagcctatgaaaatcctgacttcacaggagaacagtatatactggataaaggattttataccagttttgaggactggggaggcaaaaattataagatctcttctgttcaacctatatgtttggattcttacactggcccaaggagacgaaatcagattcacttgttttcagaaccacagtttcaaggtcacagtcaaagttttgaagaaacaacaagtcaaattgatgattcattttctaccaagtcttgcagagtttcaggaggcagctgggttgtatatgatggagaaaatttcactggtaatcaatacgtgttggaagaaggccattatccttgtctgtctgcaatgggatgcccgcctggagcaactttcaagtctcttcgttttatagatgttgaattttctgaaccaacaattattctctttgaaagagaagacttcaaaggaaaaaagattgaacttaatgcagaaactgtcaatctccgatccctgggattcaacacacaaatacgctctgttcaggttattggtggcatatgggttacttatgaatatggcagttacagagggcgacagttcctattgtcacctgcagaagtacctaattggtatgaattcagtggctgtcgccaaataggttctctacgaccttttgttcagaagcgaatttatttcagacttcgaaacaaagcaacagggttattcatgtcaaccaatggaaacttagaggatctgaagcttctgaggatacaggtcatggaggatgtcggggccgatgatcagatttggatctatcaagaaggatgtatcaaatgcaggatagcagaagactgctgcctgacgattgtgggcagcctggtaacatctggctccaagctaggcctggccctggaccagaatgctgacagccagttctggagcttgaagtccgatggcaggatttacagcaagttgaagccaaatttagttttagacattaaagggggcacacagtatgatcaaaatcacattatcctcaacactgtcagcaaagagaagtttacacaagtgtgggaagccatggtcctatatacctgaacaaagaaggaagaagaatcttctggaggtccttccagccaccttatttcttaaaaaggacaatgctgatggaagaccagactggaaagtggatcgactcctccttcattgattctaaattcaaccttaaatcatgctgccatgactcagagaacttactcatcgtttcaaaagactatcatagctttaaaccaataatttgtcctcctttcatttcttgcctttcatttttggtagctgcttaaacaggttgcctaattagcagcttttgggtgattttgtaaaatgttatatcaagatttcaagactgtgtacattttaaattatttccaaagatagtgacaggagagaactggaacaaatttaccaactttgtggacctacaaagcccttacactttaaagggtaagacaaaggcttaagtttgaaaggtagagaactgtttagcatctgagaagaaatactttattaggcctgtaattttggttcttggccttaaacactttctggaacctttaaatatgctgcatagcacaatgggaaagccttaggtattcacacatttaaggaactctaaacaaaatactattttcctttagttcatattaaaaattaatacattttaaaaatttaatgtcaaagtctggtaacatttgttagtaggatttgagttattattttttgagacaggatctcaggctggagtgcagtggcacaatcacggctcactgcagcctctacctccccaggctcaggtgatcctcccacctcagcctcccaagtagctgggactataggcacacatcaccaagcccaggccaaactttgtttttttttgtagagatggggtttcatcacgttgcccaggctgatctcgaacctctgggctcaagcaattcactcgcctcggcctcccaaaatgctgggattacaggcctgagccactgcgcccagccaggatttgaattattttaactcatccatgggctgccctagaatgtcacaaatgagggttgtttaatgcctttcttatagctgctactggaacactattatgacctaatttatgagccatccttactcatctacaagtgctgaagcaatgttacatacttttttgctaaactcagattttttagcctaatttcttgtcctcctatccacctgcatccacacatggcctgcatggggctgccttccctgcagtgttctgcagccatgcttcagggtatagctgttggtggacagcctcaggtcttgggggcactatagccactaaacgaggtgtgaaaggctcaagaggatgaccagcaattaattatccccagaaagtgaaggaaaagagacctttagggatgttgctggtcaagtcttgatttgaccggagtcaaatcaatcttcaagcaatcttggaatcctcaactgcagtaagcatttcaaaatgcaaacaaactgcttaacaactgacaagacaccagcccatatgctgctcttccaacagtgggttctagctttgaacaaaagtgctaaacatttccttgaatatattcttcctctttttgtcctcatcactcaatactggtgctcttgtcacaggtagaacagcttgtttcttttccatctattcaagtgtgtttctaattctaaaatgctgatcttctctggagtctatggtaggcaattatggtcactggaatagtttgtcttgttttaaaatattattggtgcatgtacaacagcatccaacatatctgtcttgttcctagatatatagctctgattttaggccttttgtgcataccattacaatatggtggggtaagacattctacagtagcctgtgctgaactgatctcttaaataaacttgcttctggttaactaaaaaaaaaa

SEQ ID NO: 89292 - DNA, 382 bp, Homo sapiens
ttcaccagtaagtgaatggtatatggcagtgtttttttccagtaaatgaagtatatggcagaaaataagaatgccacatacttctttattcatgtaaagtttataccagtaagattcttaggaaacttaagaatcttaagtttctttaattcttaagtcatcatgtaaattagtttatttttgactactttaaaagcatcttctaggatacaaggccgcgcatatgtgaaaaaaccatgcctctataggtttcttttatgaatattcatcatgaatattcatcagaacatttgacctcacctgactgatgaaaaatccagcagcagtaggagagatggctccagctatgtgtgcaaagacttgcaatagtcctttgagaaaa

SEQ ID NO: 89293 - DNA, 384 bp, Homo sapiens
cggcacgagtcaaaagctactccaccaactgggcttttctgatgaacaaatccttacagtgaagacttctggcagtgggaccccatctgggagttcagcagattcttcaaccagctccagcagcagcagcaggggggtttttagttcttcatatgccatggagcaggagaaatccctccctggtgtagtgatggctctcgtatgtaacgtatttgacatgctttatcagctcgccaatctggaagagccaaggataactctacgagtacggaagcttctgctcttgatacccactgatccagccattcaggaagcccttgatcaacttgattctttaggaagaaagaaaacattgctgtctgaatcaagttctcagtcctcaaa

SEQ ID NO: 89294 - DNA, 838 bp, Homo sapiens
ctgagccttccactggtgtgactgagccgctaacgcctcatcagccaaaccaccagccctccttcctcacctctcctcaagaccttgcctcttctccaatggaagaagatgagcagcattctgaagcagatgagcctccatcagacgaacccctatctgatgacccctgtcacctgctgaggagaaattgccccacattgatgagtattggtcagacagtgagcacatctttttggatgcaaatattggtggggtggccatcgcacctgctcacggctcggttttgattgagtgtgcccggcgagagctgcacgctaccactcctgttgagcaccccaaccgtaatcatccaacccgcctctcccttgtcttttaccagcacaaaaacctaaataagccccaacatggttttgaactaaacaagattaagtttgaggctaaagaagctaagaataagaaaatgaaggcctcagagcaaaaagaccaggcagctaatgaaggtccagaacagtcctctgaagtaaatgaattgaaccaaattccttctcataaagcattaacattaacccatgacaatgttgtcaccgtgtccccttatgctctcacacacgttgcggggccctataaccattgggtctgaaggcttttctccccctcttaatgcctttgctagtgcagtgtattttttcaaggtgctgttaaaagaaagtcatgttgtcgtttactatcttcatctcacccatttcaagtctgaggtaaaaaaataataatgataacaaaacggggtgggtattcttaactgtgactatatttgtactgaagtctgatacagaattag

SEQ ID NO: 89295 - DNA, 1754 bp, Homo sapiens
ttttttttttttaaaatcaattattttatttctaccatcaggtaatgaaaaggactaggatccatctataccatcagatgatttttggatgaagcaattctgaaccgggtaatagaactgcttgggaaagcccaactttttctggaaacaaaagattaacatttgtcccttcataatctcagtgaatacaatatacgataaattccaaggaattcaaatttaactagcattcattaggttgatgaaactaactctataaattacatttgatttaggctgtacaaaaaccattaagatgaacacaaacaagaaatagtatatgccaggggggtctacctttttacttcacaatagacccaccagggaaagtaatactttatactccttaaaaacagaggccagttaccaatttggccggaaaccacaaaactgaaataaactggccatatataaaaccggggggaaatttggctatatattttaatatcccaatgaagaatctgaaaaacactctctatgaagaacatacgggaatcccactcttcaacagaaaagcctgcccattaatgacactccaagaagtgtcatgatatatgcggattcactttcaagtcttcagcaaactaaaaatagagttatgagacttaaacagataatagacagtgaaagcaaatatgacaaaacaaattattatatgataaacaaccccgttaacaaaggaaggtagatggaaagtatgtggttattctttgcattttttcagcttttctctatgttgaaaactcttatgatacaaaatttggaaatgaacatacattctaagcttaaaagtataactgaaattagtctcttttccccttaaatattaaacatatttcagtaataattatattttatttgaggattttcaataaactataaaaccaatcaatagagttgagatagacatagaattacctttgaatataacagaagctcctgaatatgaacaagaagggcttcttttgaagaaagaagagcccgcttcctgggctcagaatttcttgtttcagcagcctgaatttattccactggaatccatcaaagtatcaaaaccacgcagattcaattagagtcagtcaactcacagtaagcaaagttagttcttggcttttccttttttaacaggaagttgacctgtagcttccaaatacttattaatgacgtcttcttgtgtggatggtaaacatggctgatacctgctatactccattgtgtattctccctttccctctgtgcatgacctaagttcagtggaataaccaaacatatcatttagagggacatctgcatacagtgtaaaatagtcctcaactccatcttgcccagtgattaccccatggcgtcggttaattcctgcaattacttgtccctgaaattcatttggagctacaacttccacagccataataggttcaagaatacataatgttgcatttgccaaggcttgtttaagagcaccttctcctgctcggatgaaagagatttcattagaatcaaccatgtggtgtgctccatcttgcaggacaaaccggagcccagagagcttgtgaccagaaagagggcccttctcgcaggcatctaaaaaccccttttctacagcaggcacaaactgctttggaatatttgatccgaatgtttcatctgaaaattccaatttagtgtagtcctctgggtccagaggctccagcacccctattacttttccatactgg

SEQ ID NO: 89296 - DNA, 2487 bp, Homo sapiens
tatgcagtgtgctggaattctattaagccttctattcgaataaatataaacttcatttcaggataaaatatatagggaatggcaaaactatgaaattatttaacttgcttaaaagattaaaactgaactcaactttaattctaggccctgggccggcccttcaaagcattggaaagtcgtgaaattgatgtgttgctctctcttttccagctgaactgtcccaagcaataaacagtggtacattgttatcaaaaccgtccccacccttaccacctaagagaggcatcccatcaacctcagtacccaccttggagtctgctgctgccatcaccacaaaaacaccaagtgatgaaagagagaagagcacgtgttctatgggctcggaactactaccaatgatctcacctcgctctccgtcccccccactgcctactcatatacctccagagcctccacgcacccctccattccctgctaagacttttcaagttgtgccagaaattgagtttccaccatccttagatctacaccaggagattccccagcaggaagatcagaaaaaggaagtccccaagaggatactggaccagaactttggggagccccatataccctctaggctgcctccactcccactgcatattcgaatccagcaggccctcaccagcccacttcccatgactcctattctggagggttctcacagagctcattcgttgctttttgaaaacagtgacagcttttctgaggacagcagtacgctgggtcggaccaggtctcttcccatcactattgaaatgctaaaagttccagacgatgaagaagaagaggagcaaacctgtccatccacattcagtgaagaaatgacacctacctcagtcattcctaaattaccacagtgtctacgggaggaagaagagaaggagagcgactctgattcagaaggtcccattcagtaccgagatgaagaagatgaagatgaaagctatcagagtgctctcgccaacaaagtgaagaggaaagacacactggcaatgaagttgaaccacagacccagtgaaccagagttgaacctgaattcttggccttgtaaaagcaaggaggagtggaatgaaatacggcaccagattggaaacacactgatccggcgactgagtcaaagaccaacaccagaagaactagaacaacgcaatatattgcaacctaaaaatgaagctgatcgtcaggcagaaaaacgagaaattaaacgtcggctcactagaaagctcagtcaaaggccaactgtcgctgaactccttgccaggaagattctgaggtttaatgaatatgtagaggtaacagatgctcaagattatgaccggcgagccgacaaaccttggaccaaactgacccctgctgacaaggctgccataagaaaagaattaaatgaatttaaaagctccgagatggaggttcatgaagagagcaaacattttacacgctaccatcgtccatgatgccaaaggttgagagaggaatcaacatggctgctttgctgcttccttctccaaagtgacatatggagggaactttagcacttcccagcacagccagaattgcatcctctgggatcttctgaggtggacagcactttgaatgtagcatttcactggaacagagtcttatgtgctgcaccgggggcaaaacaacactttgtcagtgcttttgaacctttcaatattgtagcatgcttgaggagtttttcccttactggccaccaaagttctgaaccacttgcaggttccaggttttactggctgcaccacaccccttcccctagatgactgcctgtgcagagacacagtttgcaccattagccttacctgccctgccctgattgtgagacccaaatgtgtaggctctaaattccagccatcaaatccaattcctgggtggggaaaaccttctggagacccccaaccttctgataaaagagtctctacctccaaggaaagccttcttaccacactggcatatcagatgaaagcattgcactgtacctctcgtaacacagcaatacagtcctcttgaggcactcaagcctgagaggaagctcaggatctgacatgttcttccttttcctcacaagtcatcatgattttttattttaaaataatctggaagtaatgggaacttagtttttcctgaactccaaccagaatccaaattggttagatgaggccaggcgcggtggctcacgcctgtaatcccagcactttgggaggccgaggtgggtggatcacctgaggtcaggagttcaagaccagcctggccaacatggtgaaaccccatctctactaaaaatacaaaaattagccaggtgtggtggcgcctggttgaggcatgagaatcgcttgaacccaggaggtggaggttgcagtgagccaagatcatgcctactgcactccagcctgggcaacaaagtgggactctgtcttaaaaaaaaaa

SEQ ID NO: 89297 - DNA, 382 bp, Homo sapiens
gcatattttatactttaaagggaagtttggcagcaccccacaaaagaggatgcccccactgtctgtttcagccacaggatgtaaaagtacctgttgcctgaaccctcatctatgctgcgtggctgctgaacttggccatccacaggtagactttggtagcttggtgacatccttaatttgaagcatcctatcatgagtgtgatcaaactgctttctgaaaggctgtttcctggctttggagcccagtgggtctcttgtggcacagagccagagccctgctttggaactgcccatgtggaggtggccatcttccctcttgactgtttgcattgagcggctccacccccaggtggcccagaaaccttgtgcagcttgggtgggg

SEQ ID NO: 89298 - DNA, 5286 bp, Homo sapiens
ggctggcggcggtagctgtcgcccgcttggttgcgtgaccgcggggtccgcgtccgctccctccacccttcgcccttcgcccttcgcctcgtcccggcctccgcggcccagcaacggccgtcatggtgccgtcggcgctccctgcgcggccccgctgagcctcggtgcggcggcgagcgcggtcgagatcgccatgcctacccgagtatgctgctgctgttccgctttgcgtcctcgctacaaacgcctggtggacaacatattccctgaagatccaaaagatggccttgtgaaaactgatatggagaaattgacattttatgcagtatctgctccagagaaactggatcgaattggttcttacctggcagaaaggttgagcagggatgttgtcagacatcgttctgggtatgttttgattgctatggaggcactggaccaacttctcatggcttgccattctcaaagcattaagccatttgtagaaagctttcttcatatggtggcaaagctgctggaatcgggggaaccaaagcttcaagttcttggaacaaattcttttgtcaaatttgcaaatattgaagaagacacaccatcctatcacagacgttatgacttttttgtgtctcgattcagtgccatgtgccattcctgtcatagtgatccagaaatacgaacagagatacgaattgctggaattagaggtattcaaggtgtggttcgcaaaacagtcaacgatgaacttcgggccaccatttgggaacctcagcatatggataagattgttccatccctcctgtttaacatgcaaaagatagaagaagttgacagtcgcataggccctccttcttctccttctgcaactgacaaagaagagaatcctgctgtgctggctgaaaactgtttcagagaactgctgggtcgagcaacttttgggaatatgaataatgctgttagaccagtttttgcgcatttagatcatcacaaactgtgggatcccaatgaatttgcagttcactgctttaaaattataatgtattccattcaggctcagtattctcaccatgtgatccaggagattctaggacaccttgatgctcgtaaaaaagatgctccccgggttcgagcaggtattattcaggttctgttagaggctgttgccattgctgctaaaggttccataggtccgacagtgctggaagtcttcaatacccttttgaaacatctgcgtctcagcgttgaattcgaagcaaatgatttacaggggggatctgtaggcagtgtcaacttaaatacaagttccaaagacaatgatgagaagattgtgcagaatgctatcatccaaacaataggattttttggaagtaacctaccagattatcagaggtcagaaatcatgatgttcattatggggaaagtacctgtctttggaacatctacccatactttggatatcagtcaactaggggatttgggaaccaggagaattcagataatgttgctgagatctttgcttatggtgacctctggatataaagcgaagacgattgttactgcactgccagggtctttcctggatcctttgttatcaccatctctcatggaggactacgaactgagacagttggtcttggaagtaatgcataatctcatggatcgtcatgacaatagggcaaagcttcgagggatcagaataataccggatgtagctgacctaaagataaaaagagaaaaaatttgcagacaagacacaagtttcatgaaaaagaatgggcaacagctgtatcggcacatatatttgggttgtaaagaggaagacaacgttcagaaaaactatgaactactttatacttctcttgctcttataactattgaactggctaatgaagaagtagttattgatctcattcgactggccattgctttacaggacagtgcaattatcaatgaggataatttgccaatgttccatcgttgtggaatcatggcactggttgcagcatacctcaactttgtaagtcagatgatagctgtccctgcattttgccagcatgttagcaaggttattgaaattcgaactatggaagccccttattttctaccagagcatatcttcagagataagtgcatgcttccaaaatctttagagaagcatgaaaaagatttgtactttctgaccaacaagattgcagagtcgctaggtggaagtggatatagtgttgagagattgtcagttccgtatgtaccacaagtaacagatgaagatcgactttctagaagaaaaagcattgtggacaccgtatccattcaggtggatattttatccaacaatgttccttctgatgatgtggttagtaacactgaagaaatcacttttgaagcattgaagaaagcaattgataccagtggaatggaagaacaggaaaaggaaaagaggcgtcttgtgatagagaaatttcagaaagcaccttttgaagaaatagcagcacagtgtgaatccaaagcaaatttgcttcatgatagacttgcccaaatattggaactcaccatacgtcctcctcccagtccatcaggaacactgaccattacttctgggcatgcccaataccaatctgtcccagtctatgagatgaagtttccagatctgtgtgtgtactgatcggcgcatgaagacctcagcatatgatttgtaaagcctaaaaattaaggccaagctgagctttcagggtttacttaatgtgtattaacatacttcttgaaaataatgatggaacatatctttaaccaaatgtttggcataccatattagaagttttggagctatatataatttcgagtactttcaaagatagatttatgccatgttaatttgctttgaggttcctgttgcctttttaagttgaacatgttttggtttcactttattccactgttaagtagtatgttttaaacttttcacaaatgtaatgttttttaaaaagtaagccttcagaggattgaaactgtataaattgtttatctcttaaacatctacacagccgcttagatgtagaatttttgttgttgttttctgcaaaggcagatacatttaaatatattcctagtcctggggctgcaaaactgttcggtggctttttgtccccatgctttagataagctgggataggcaccttgctattcagttactataataatatgtgataggcattcctcatcttcttcacaataataggacatctgttgaatagcattcctcgaatataaccctaaaaacgccatactttaaattgtctggttcttgtaatattgtgtttcctgccaagagtttgaccattctgcttgagaagtgtagagcttactcttggagtaccaaactgtgcaatatttttacatcataagatgtattagtttacaggctgtgctttgaaattatagtagtattttgctgtggctccattaattaaatgagatatatatttagtgcagaaaaaagacatttaaaacagctattagttcacctgtgaagagtctgtacattttgatttctattaagagcacatttatttacatttgtatattattttaaatcctcatagtcaaaaaattctccagatggacttttaatttgtaagatttgaactgtgacttgtatacatctgtttagaatcaattatatttgaaaagctgcctgtgttttaacagtcaagtgtgctaaagtttgtcaatttaagctgcttttgatttcagctaccaagattacaggtgcactctacacataacactgacagacccataacattacatacatcttagtgaattctatcacatggtaaaatgaacagctttctttgtaactcataaaattctcttaggacatttttataaagtcacctgtttatagttctatcttttcagattccatttctttttacataaaacagcatacatatcaaaaactgtagcctagaatacagtttaatttttggcttttgtttttgtttaaaaaattgcagtgaagaatgggatgtttgtgtttatggctatttgggcacctttagtagaaacagacaaaagtaaggaaacgataataggacaagcatacttgaaaatttctgaatacttaaacaaaagcgcaacatcttgaaaaccagtctagtcattgaaacctatgaaatgacactgaaagatcctgggctgcttcttaaataagtagatcagcaagacttgtttcagagtgacagtggagtcgttaccgctggaggactaaagggccctgtggcagctgtcactggaactttgcctcttgatcaggaaaaatgcttcaccagtccgtaaagccaagttgtattttttttattgcccttttttccttctgtatttttaaagaaggatgttaatttttgactatatattttaaaaaaatctaagcagggggacatgcaaaaacaatcatcatccacttggatgtcattttatagattaacactgtgtgcttttgtatggaaaaaatatatataatttaatagtataaaaaataaaatatatattcatttgcacttacgtgaaacacaaactttgctctacaaaatttcgtgtttcttagtgattttaaaatgcatgtattgcatgtaaaggaaaaccattacaattaatgtttatcacacctttatcttggtctttgttgatttgggttttgttggggtttttgttactgtttttaaattacagtaggcttctatatatcctggatttctgaactggtcttgttgacaaggattcccaagaaatggatcttttcactggctgactctcccatatctgcaagagattctgcaggaactgggtgtgcacacggtgttgtagccagttcaggtactgaatatttaggatttggtgaagttcactgtattgctatatttttgtagataaataaaactcaataaattgttaatcattctctttttgctgtatagaattgcttatatcactctttctttcatgacattggttaacatttaaatgttcctcctgtacttgtgttgtctgtgaccgcttatagagttttattgttattggtgtttacctgaatacctatgcgtacacacacacatatttccttaatacttctgaactcattatcttttagaataataatactactacactttaccagcaattaacttctccctacccaaaatgtttttcttcctgtctgaaaatggaactaatttgtcttattcgtgcttatatctgtattaaatgcaataaagttagtttttgaaatgt

SEQ ID NO: 89299 - DNA, 708 bp, Homo sapiens
  misc_feature (1)...(708): n = a,t,c or g
cttacctaaagaacctacctgaacctagatatatagacaaaatagaactaaagatgaagataagcctccaaaatccagaatgggacttgccagacactatcgggtgaccaaccacctgaaataattcttggccttcccagtcagtcttccttcagtatccttggttttatttgtagttacttttaaacagctagtccttgaaaaagctattcatagaaaaacctcttttacagcttgtccttgatctgttcttcttacccttctattttagaccacattgtgcacattatagagctgataggcagaattccaagacgcttttccctcagtgggaaatattcacaagacttcttcagtcacagaggtagtattgttatgtaggacccagggatacttcaggaagcagagcattcacaccaagattgtttttagttatcactgaatccacaaaaatttgactttgtgaattctccattagatggatagagtcttcctcttcccatttaggatagaaagtaagcctgataggctttacaaagagatgtgcatgctgctccttctgctgttttctagagctgcatttgttactcttgttacggatcttttttttctcgaaccgacttgttggcctctagggccctctaccccatagtgcctcgtagtgattcgtagtcatgtcataacggtttactacggtntcgagggggg

SEQ ID NO: 89300 - DNA, 388 bp, Homo sapiens
acaagagaaagacagcttaactcctgatctccctcctaatatcacactgtcctggcagcagctgcatcctgttccccacccctcccccacaactttcctgaagatcaagctgccatctccaggcctcagctaagcagcctggctgagagcaaggttctctcagctctcctaggacatgggggaggcccactcactctgcttcctatgacacacaggtacaactagggtccagctgtgaagcgagatattttggacagcaaatgggaagggtatttatactgaatcatgtatccactcatggtccagagatcacagctgagagtggtgcttattccttatgtctataacaacataagcaatactataatgaccactaaaacactaggcc

SEQ ID NO: 89301 - DNA, 373 bp, Homo sapiens
gaatggtctgttggtatctgtgccaattctgggcctcattgtcctaacttccatccgggtccttcctggctatgctgtgttgaaaaaggacgtagtggggagtgtgttccctcaggcttctgtatcagcgggtgcaaggaagccttagccatcatttttgcctttccagcctctgcagagtagaaaggtacacttcatagcccagtcagtctcccaaaagctgaactcccttgtccaggcagtcatccagaaacacattgataccgtcgttctcctccactaagtccagtatcagcgcttccaggaaaacaactctaaagtcgaacacccactacttcaaaacccaaaccctggttacagtgcccctaattcg

SEQ ID NO: 89302 - DNA, 1241 bp, Homo sapiens
  misc_feature (1)...(1241): n = a,t,c or g
atggaagtcacgggtccacccacgcgtccgcccacgcgtccgccaagtagctgagattacaggcacacgcccccatgcctggctaattttttgtattttcagtagagacggggtttcaccatgttggccaagctggtcttgaactcctgacctcaggtgatccgcctcccttggcctcccaaagtgctgggattacaagtgtgagccacctcacccggcccctctcagagccttttctacctatatgtgatgtgaatctccaatgagaatctaggaggcagagtttgactacagaccagtgtcacacctggtggtttctgggaacactgttacagccacctgggttaagtgctcaggagtcagacctgtgtatgaatccaggctgtgacctcagtagctgcatgaccctgggcaagttacttcacctgtgtgcttcagttgcctcccctgttgggagaactaaataatcccagccctgtgggaggccgaggtgggaggattgcaagaggccacatttgaccagcatgggcaatatagtgagacccccatctctacaaaaaaaatttatttaataaaataaaaatgaaaaatgagcgtttaggacaacacggcacatgggaaacgcctagcaagtaggagtcactccgagcgtgccgactatgcccacctcggccccatcacacagggtgcagctctagcccgaggggcagctccctgagcccctctctccgtctggcaggaatgcttcacgccattcgtgaacggcagcttcttcgagcacgacgggcagccctactgtgaggtgcactaccacgagcggcgcggctcgctgtgttctggctgccagaagcccatcaccggccgctgcatcaccgccatggccaagaagttccaccccgagcacttcgtctgtgccttctgcctcaagcagctcaacaagggcacagttgaggatgggtctctactgcctcctcgtcgtcatgtccggatttgcgtgcttcctctttgctccggtcagatccagagctccagtcctaggccctctgattgtaaaggtgtccaggtcttgtgcttatgatgtgctcacatcagtgccggaaacgatgaagacaaagagacttttagtttgctgagctcgccaggtggcacagggaaccgggactccgaattcgcagctccagctccagctccggacgcgtgggtcggcccggcaaatgctatcaatncctcaaagtgtcatg

SEQ ID NO: 89303 - DNA, 1376 bp, Homo sapiens
aacctcccatggttaattaaggtatataatgtaaatatgggtatggaaagtataaaaattaaaggcttctgaaaaactcaagaagggtcaaaaggctatacaagcaagtagtatacagattgtttccttaaaagataaattttaatatacagaataaaatccaagatgattttattatttttcactttcccaaaacttgtgagccatgacatgcttctaaatctgaccaatgaagtttacattttggtccaatacattatgagactaacttgtatgatcaagtccagcttgattatcataaatcatagaagttaacaatttactctgagaatctgttgctaatatagatgatggatttccaattttttcttagctaagaatttactcaactttagctcagaaccagattcaaaatatcttctttaattagctggtcatcattttaggcttaatctaggcaaattatttaatactcaattgaagatcatataaaacctccaaaataaataaaaagtacacaaaattattagcttttgtgtacaatacagaaaatacaggtcagttctggaccaaaataattgcattaaaatacaaaaggtgatagggaagaattaaaagatttgcagtgactgcttttggtggtcagctacaacaagccaacaaccctcagctattttggaaagtgaaggtgagtcttaatttgcagataatgaatgtcttcggtagtttaaaaaaatataaactctaaaaaagctcgtgaatcatatacaaaagcagctatttgagaccaaggttgaacaccagaaattgtgttagcaccaccagcaagcacagggtcctctgactcttccgccctcctatcttgtgcagaatgcagacttgaatgttgtacacatcatttacagttacaaaaatcggccttgagtacagggttcctgtagggtagtcttaagtcctaagaggcaccaagcggttacaaaggctaggtgacaatccaaatcacaaggtccgacgatataataaatcccgtgttgccttatcaactttttgctggtagtcctccaatttgtcaagtattttctgggacagtgcgatgttgtgactgttggcactgttctctcccagagcttggagaagctgatcaatagaggagtatggaagccacaccattggggctgttgcggacagtggaaactcaattccgaagtattgatgtccttttcccaatacagcatccacatattctgacaccaaatccacagcttcttctaaaaggtcatagtttaagtataaacgaagcaattcagcagcatcaaccttcttgtaactgtttataagccaattaggcagaggcactccatgagacaagagcttgt

SEQ ID NO: 89304 - DNA, 653 bp, Homo sapiens
ctattttggccttaatctccatgtccagcatctggggaacaatgttttcctgttgcagactctctttggtgcagtcatcctcctggccaactgtgttgcaccttgggcactgaaatacatgaaccgtcgagcaagccagatgcttctcatgttcctactggcaatctgccttctggccatcatatttgtgccacaagaaatgcagatgctgcgtgaggttttggcaacactgggcttaggagcgtctgctcttgccaatacccttgcttttgcccatggaaatgaagtaattcccaccataatcagggcaagagctatggggatcaatgcaacctttgctaatatagcaggagccctggctcccctcatgatgatcctaagtgtgtattctccacccctgccctggatcatctatggagtcttccccttcatctctggctttgctttcctcctccttcctgaaaccaggaacaagcctctgtttgacaccatccaggatgagaaaaatgagagaaaagaccccagagaaccaaagcaagaggatccgagagtggaagtgacgcagttttaaggaattccaggagctgactgccgatcaatgagccagatgaagggaacaatcaggactattcctagacactagcaaaatctag

SEQ ID NO: 89305 - DNA, 908 bp, Homo sapiens
ttttttttttttcattcaacactggctaggaatttattggctaacaaaatacaagtgatttcctggtccccaatccagattctccacctcttcttcacttctgactgatggaatgcataagaactaagatcttgagatgttatttgagggcagccttgcttgggtgtggtctatcatagctcctctgactaccgccgttgctacctggctgcaaatgattgttgtcaaggatagagggtccttcagaattcctgggagatcagaatcagtctctgaggtgtgggccagttgtcatggtgattattctgttgtagcatcactttatgaactaaattaaaaaaatcttcagtcacatctgttcagtaggagccatttcctttggagtcaggacacgcgagaagggcttcaaagtgttgcctacccttctattcctttgacttctcctccttttggtcaaatgactgattacagagatgattcccaaacccgtgatcagtatgcaaatgatgagaatggacgtcctggagcggtcagccttgcggacaactttgggagccttgcagcttctggttttgttgcctgataggtctttcccagaccaaaagtcattggccagggttcctttgtcgtcagttacaatcagctctgtaaaatccatgtcatccctggcaaagtcccgctggatgccacaccagtaccagcccgtgtcctctttggtcaggcaggacatagtgacaatgagctggttccctgtgtccctcagggccacatgattggtgctgttaggggagaaggcgatgatgttgcagtagtcacggaaatagcctcggcaccagtatttggggtgattcttgtagtgggcattgtagttgcagatggcagaagccgtgtccagcacaaagcttctc

SEQ ID NO: 89306 - DNA, 1837 bp, Homo sapiens
ggagcttgcagcagccagaaccaatctccctggagttgaagacagattgccgtgtgctggggctaagagagatcctgaagacttatgcagctgatgtgcgcttggatccagatactgcttactcccgtctcatcgtgtctgaggacagaaaacgtgtgcactatggagacaccaaccagaaactgccagacaatcctgagagattttaccgctataatatcgtcctgggaagccagtgcatctcctcaggccggcactactgggaggtggaggtgggagacaggtctgagtggggcctgggagtatgtaagcaaaatgtagaccggaaggaggtggtctacttatccccccactatggattctgggtgataaggctgaggaagggaaatgagtaccgagcaggcaccgatgagtacccaatcctgtccttgccggtccctcctcgccgggtgggaatcttcgtggattatgaggcccatgacatttctttctacaatgtgactgactgtggctcccacatcttcactttcccccgctatcccttccctgggcgcctcctgccctattttagtccttgctacagcattggaaccaacaacactgctcctctggccatctgctccctggatggggaggactaagaaagctaccaccctaaccacagaggcttggaattgggcctggcccccatggggcttggaggaccgagccactgacaggtatcccctgaaactgagctgagcccagtatccaaggattcctctgtctgatcctttggtctttgctaccaggctgaagtctgtcatgaaaccacttattttaacaagcagaggcccagtcaaatgagcattgcatcccatgagggaagcacgacagggctgatggtgaggatcagagcagttctaaggtgactcgttggggtaaggatcaggactttgtccatgtagtagccaaccaccctcttccctgattcccgtccggtgtcacagttcagtcagtgaggatgatgaagtagatacagtcttcaggacaccattagatgggctttcccaataggccaaaaaaatgctgcgcatacccagagctggttgttgtgctgaggccagtcagaggatgcttcccctgaggtttgctataactaagcaacctttatgtgactctcaccttctgacctcctggcaagagaaattcagtgcagcagggggacacagacctgcccaagccaccccactgccgttccctctctgagcacaagctgggcaaatcactgtcccttggactccaggagaccagtgtcctagtcttgccttttttctctaagtggcaggatcagaaaacctgcgagctttagtttgtattttcactttatgaatgaggaaactgaaatggccttaagggagcaagttatttctttttttttgacacggagtctcgctctgttgcccaggctggagtgcagtggcacgatctcggctcactgcaggctctgcctcctgggttcacgccattctcctgcctcagcttcccgagtagctgggactacaggcgcccaccacgacgcctggctcatttttttgtatttttagtagagacggggtttcaccatgttagctaggatggtctcgatctcctgacctcatgatccgccctcctcagcctcccacagtgctgggattagaggcatgagccactgcgcccggcccctggagcaagttatttcttacaaagctgctgaaggtaagattatcaaaattataaagcatttttcacactcaagtgaaacaaggttgacaaactcacttcgcaggtcacatgcctatacatcacttattatatt

SEQ ID NO: 89307 - DNA, 2238 bp, Homo sapiens
ttttttttttttctctttttggtttcaaaagggtgtttactatttggccaaacaatattttttaattgtcagtcataaagtgaaatacatactaaaatatatattaaatattcaccaaatctgcattgctgctacatgaaaacattttttggtctgttggaaaatgtaattcctgagatcattgttgggctttgtcaatcattttcctcaccatcaaatcaccttaagtgacttgggagtgtgaatctaggatgttcaattttagaccaattttctctatcttctaaatgagtaaacaggctctgtcttttataaaaggtagaaaaataaccatggtgtgctaatttttttcaaggtataccatatggaaaagtataggctgaacacaaaggaagtcttttctgaatggctctcaatcacacataaggaacatatgttttccagttaatctgtccttgatgtacagcagtccagctgttgttttgcatttattaaaatattctctgctaaatagttatgtttgtctttaaaagtaaattgcataaaattacatccaatttctttctctaaaccaacatattcttcaccttcacaaagcaaacacatggtgcactgaaaccgaggtgttaccagctttacatactgttctgccatttgtgaggggtgcaaccacaacataagtcagaaaaaaagctatccagcttttcgtggaatctggtgaagtttatacttagcgataagcctctaagcctgaacttagcagggctagcaaaactttatttatttcctaactcctattattttagaatggttttcaaaataatactgcaagttcctaattgaaatacaaaacagaacaaaaagctgtgagaaatcttttttttctttggctccttaaagacttggaataatttatattagtgttgcatacattttaccttctacattttgatgtacttgctcttgaaagcactagaacaaattaattgaaataaaacctctctgaaaccatttgaatctttgatcctaccatagagttttaaaggctttcaggatataacttgtattttcccctgagtctgagtgtctacatgattatagaatgcatgtctcttgcttcatggtgatatccaatatgcatggaatactgaaaaataggtatttcccaaaggctcctatataccaggcatctcagactgacactgaaaaccttttgaagcatttttaacaacaaataatggactatttcacagactgatgccaataattagttttctggacctacagttgaaagcaaaattatctttttaactaaataggatcagcttcaaaatcctttttggagatgtttttatctattaaatgcctttattaacaacaccatcttccattttctattactccaattcgatttctcctgcatacaaggtaatgagtagaatggctgtgaatccagttaacattccagcattctgaatcatgaagaaggtgaaatcggtttttcttccagttaccttttctctcagcatatcattcatctctggaaacatatctgccagagaaatatagaggaacatgcctccagcaagtgcaaatataatatttggagcgaaattgttgcccaccaaaatgccaaaagctagcccaacatagcaggaacatgcagaaaggaagttgaatagcaaggcttgtcgagtgctcatccctgcattgagtaggatcacaaagtctcctaactcgtggggaaactcctcacataggattgctatggaagtactgagtccctgaaggagagacaaggtgcaggaagccccaatcgccaggccatcgatgaaattgtggagggcatcgcagagcgttatcatccaggcaatcgtccctatttctgacagtttgggccccttcaaacaggtacatgaacttggctctttttttccatcctagcagaaaatcaattaaaatgataaccaacatttcttgaaagtctcagaaatacagacaagttggagatgggttgtgcttgagaaaaacaaattgttccaacagaaggtcttttagagtaactaggaaaccctaataatatataacagagcaaagaaaacttatggttgagagaaaggaaattaatcaactgacacacctcgaataagccactaacagatattttcctttactttccctttaaaacaattcttttgacttgtataaacttcttcctactgcctttctaaaatgtag

SEQ ID NO: 89308 - DNA, 786 bp, Homo sapiens
ttcccgggtcgacgatttcgtatgctcagaaaaaaaagtatggtgacaaggtacctgaaaatttggaggagcaggcgatttcattagttggggaggacttataccaagcattgataaagggttatacggagaagcagtggggaagaagtgcaaaagaattgcctgcatttattattaagcgaatcccagtgagatttacgtttgataacaattatttttccgatcgctatcaaggtattccggtgggaggctacactaagcttattgaaaaaatgcttgaaggtgtggacgtaaaattaggcattgattttttgaaagacaaagattctctagcgagtaaagcccatagaatcatctacactggacccattgatcagtacttcgactataggtttggagcgttagaatatcgctctttaaaatttgagacggaacgccatgaatttccaaacttccaagggaatgcagtaataaatttcactgatgctaatgtaccatataccagaataattgagcataaacattttgactatgttgagacaaagcatacggttgttacaaaagaatatccattagagtggaaagttggcgacgaaccctactatccagttaatgataataaaaacatggagctttttaagaaatatagagagttagctagcagagaagacaaggttatatttggcgggcgtttggccgagtataaatattatgatatgcatcaagtgatatctgccgctcttacgaaatcgtcgacccgggaaaatcactagtgcgacagcatcg

SEQ ID NO: 89309 - DNA, 564 bp, Homo sapiens
  misc_feature (1)...(564): n = a,t,c or g
tgacagacctccaatattcagaccagcaccgtagcagagctggctgcacatccgctgaaaacgttccttgagcatggcattcgtgccagcattaacactgacgatcccggcgtacagggagtggatatcattcacgaatataccgttgccgcgccagctgctgggttatcccgcgagcaaatccgccaggcacagattaatggtctggaaatggctttcctcagcgctgaggaaaaacgcgcactgcgagaaaaagtcgccgcgaagtaacaaaatggatggtgcaaatgcaccatccatttttcatgcaaggcacaaagtcgcgcgatgtttggcggattcgatgcccagctcaatcaactccattacctggattgcctggcttgccggaaccggattttcaccatcgccatttaacgcatcacgaatagccgcatagtaagccggataattcccaggcaccgtcaacagcgttttttngacacgttcctcaccttccacgcgggtaagtacgccatcacgcacctcgtagcccccctcttcctgcggtagacgctcgaaatt

SEQ ID NO: 89310 - DNA, 318 bp, Homo sapiens
  misc_feature (1)...(318): n = a,t,c or g
gcanagccaccatcccctggcgcccactctcccgggcccctccaacatcctgggctggctctccatggccacagtgcgtgctctcagccccctgctccgggggcccctgaatcgtgggtctttacttattcctacacgacatagtcaggcctgcattttagacccgcatgaaagcaaacacatgagtctgtccagatggagtgccgtgcttctcgttggcaggtttcttcggcatttcgggactaagttggaaatagctccagcttcactgatttctggggtacactgactgctttacccacatttcagtctctgctg

SEQ ID NO: 89311 - DNA, 481 bp, Homo sapiens
gcgtttttgggtgccgtaagggttatacagaaatgtccgttaagcatagttcaaaattgattgccgtgatcacgactggtttgaaagccgcgcccaagcctgtacagctctggtttgcgttgattatgaacctgtcagcctaaagcaagcggatggacgatgagtattggtaatctttcagagtccggaaaagttcagccccagtctgaacaggcttgctggcgccagtccagtttcattcagtcgtggtttggttcttacggcctgtgcaatctacctcattaggcacatcggcctgccagataccggctcggggtgtatttccgcttccacgctgaatactgttctcagcaatcctggggtcatcacctcttctggtgtgccttgcgccataacatgtccgtttgccattaccaccagttgatcgcagaacccgctatcctgattaaggtcgcgcaacacagctaccaccgttttccct

SEQ ID NO: 89312 - DNA, 563 bp, Homo sapiens
gcaattcgcgctgtaccagcgaatgattgcgctgcgtaagaaaagtcaggcgctacgtcatggcggctgtcaggtgctgtatgcggaagataacgtggtggtatttgtccgcgtgctgaatcagcaacgtgtactggtggcaatcaaccgtggcgaggcctgtgaagtggtgctacccgcgtcaccgtttctcaatgccgtgcaatggcaatgcaaagaagggcatgggcaactgactgacgggattctggctttgcctgccatttcggctacggtatggatgaactaacgttttataacgccttgcgtgacgcctgcgccatcatccgcggataaaactgccagaagcgggtttcgagggcgtcataatgagcgtctaaatcgtcccaggagtcacgcagggcatccagacgtgggcggcggcttgccatgccgtttaacacgttgtggatgaaatccatatcgcgatagcgcaccagccactgctctgaccacaagtaattgttcagattgataaaacgtgacggtgagtccggcaaaatcgtcatcccttgctcgcgggc

SEQ ID NO: 89313 - DNA, 329 bp, Homo sapiens
aaaccccacctcctgggtggggtccctcccaggcgagtgtccctggaaatgtatggtcaggacgagtggactgagggtctgataactgggtctgatttcaggcgtccaggtgtgtccaggcttggcccttgtcacggccctgctgttgctttccctcatttgcttttctcctttctatcatgaaggcggcctttgcagggtaaagcgtcccccgtgaaaccgcctgcaggcgggtggggtatctggggagcagcagccactacagcagtgctcttgccccagtttaaacagagttgtgccaccaggtaggtccagccacggttctccat

SEQ ID NO: 89314 - DNA, 503 bp, Homo sapiens
tctcgtcccaggacgcaaattgccgaggaaggccgtggtattttgctgtatcaccgtcaggaaggtcgtaacattggtctgctgaataaaatccgcgcttacgcactgcaggatcaaggttacgataccgtagaggctaaccaccagttaggcttcgccgctgatgagcgcgacttcactctttgcgctgatatgttcaaactccttggcgtcaatgaagtccgcttgttaaccaataacccgaaaaaagtcgaaattctgaccgaagcagggattaatattgttgaacgcgtaccattgattgtaggtcgtaaccccaataacgaacattatttcgataccaaagccgagaaaatgggccatttgctgaacaaataaccctcttgcattgtgtaaatcatttgcttgccggaagcaaaataaccggcaagcaaatagttgttactttcctcatattacgaatgacataattgcaaatgccgtcgatctgggaagaagtccag

SEQ ID NO: 89315 - DNA, 848 bp, Homo sapiens
  misc_feature (1)...(848): n = a,t,c or g
tacccgattggggtgggggacctttattcgtactcaggagaaaaacagagggacgtacggggacgactttgaaccttttgttgaaatgaactggatgacggggaccccgtgggccattgtaaggacattggctttgctggagggaggcggggagaccccagagggctgaggggagaaggaaggatgtaacattgacctctagaggatcactctgactgcagacaggctgcagggcctggcaggcctggtgggagcccttgctagaatccgggaaggaacacaggcctgggagcgggagggagcaggggagtgggaagaagtgggtgctctgggcagcttttgagggtagagccagcaggatttgctgctgggctcgactgggcattagtgaaagagaggggtccaagtattctcagagctgtggccatcacagcggggtaggcctgggttgggcagtggagttaggcacaggctgcaaaggatgcctctcctggggccctctccaagtttttcagagagaaactttctctccttggatttccaaaagttgtgggagttttaatagaccgtaggccgtcatgtctagaaagagaccacctgccttcattttggacagctcatgggtgtgtggggctgtctgctttctaccctgtgtgtgctgtgaatgtttaggggtaagtaggttggtctgagttccagatcagcttgttcccaagctgtgttctgataattgttttaaaaagaaaagaatgatatgcctttctcaagaatgaaaaacgttgcgttgacttcggtgttggcaacatttaaactttacattgggcaccacatgggcttcgaacgnaatg

SEQ ID NO: 89316 - DNA, 342 bp, Homo sapiens
  misc_feature (1)...(342): n = a,t,c or g
cttagcttcccaggagcaataaggccgcggaagccaaagtgcccattgaaatgttggcaaagctcaagttttaggaagaataccacagagtactgaatgttgtacatctggatccacaagatcaagagtccagggccagaggcatgtgacatgcagaccaggcacgcccattcctgcatcaaagcccagtgataagaaggatgatgataccatggaggagggaggggaggaaggatgaagggaggaggaaggaacgataatgcatgttactcatgttcacggagcattttctgtttctcaaaatgccaatgacggccgggcacagtggcncaagccnnnnnt

SEQ ID NO: 89317 - DNA, 416 bp, Homo sapiens
ttgtaataaggccatgtttagcttccagaaattaaaaatcgagcagtttttcttcgagttgttcggcactgcttcgcagtttatcgagaaaacgcagcttacgcacggtatccgccgccgcgtcccacgtctcgttgtctaactgttcaaccatcaactgatggcgggtatcaaacatctttttcacacgtttgataaagctttccagccgcgcttcatctttcgcctgttcgatctcgtccagctcttcgcgcagctccaactgttccatcaggaacgcggtgtcgcgcacagtatgctgctcgctggcgagatcaaagccgtgcaaagaaagcaaatattccgcgcgcattaacggatgacgcagcgtttgccaggcctggttaatggttgcagattgctgtacggcggcgagt

SEQ ID NO: 89318 - DNA, 651 bp, Homo sapiens
tctcgtcccaggacgcaaaagtcgtctgactctctatccaggcaatgtcgctgtcattgagccagaggtgaagcagatggttaccgtctccggtcgtatccgtgcggaagacggcacactgctggctaacgcacggattaacaatcatatcggccgaacccgaaccgatgaaaacggcgagtttgtcatggacgtggataagaaatatcccactatcgattttcgctacagtggcaataaaacctgcgaagtggctctggaactcaaccaggcgcgcggtgccgtctgggtcggtgatgtggtctgcagcggcctctcatcgtgggcggcggtgacgcagacaggagaagagaatgagagttaacctactaataacgatgataattttcgcgctaatctggccagtaactgcgctcagagcggcagtgagcaaaacaacctgggcggatgcaccggcacgcgagtttgtgtttgtcgaaaacaactcagacgacaactttttcgtcactcctggcggggcgctggatccgcgcctgaccggtgccaaccgctggaccggtttaaaatacactggttcaggaaccatctatcagcaaagcctcggctacattgataacggttacaacaccggacgaaatcgtcgacccggga

SEQ ID NO: 89319 - DNA, 230 bp, Homo sapiens
tgtctgagtcagaattcgatgtcggtacccggagatcccgtctaccaaagctgatatggatgcacaaaccgcaccgaaactgatgcgtctgatcgatatgctggaagattgcgacgacgtgcaggaagtttaccataacggtgaaatctctgatgaggtcgcagcgactctctgatgaggcctgctaaacagcaaaacggagacgcgtgatggctattattctcggcatt

SEQ ID NO: 89320 - DNA, 661 bp, Homo sapiens
  misc_feature (1)...(661): n = a,t,c or g
gaattcattgtcgcgacccggacatcaggtggacggggagatccctgacaatacccaacttagtcagcttgtaatgcaactggctggtctgagagtgctgacaaacgcaaaactgcctgatgcgctacgcttatcaggcctacgtggagcccacaatatattgaattagcacgatttcgtaggccggataaggcgttcacgccgcatccggcgtgtacaacgcgcacttggtcaacaatctgaggccagtcagtaatgttactgcctggcctttaatcaatgaatcagaaacgcttacagcgccatcaacttgtccagcgacggtgcgaaataatagccgccggttaccggtttggtgaaacgcaacatcgcatcacgcttaccatcggtatcgccaaacatgctcagcagttgctgctcaatgttatgcagacgcgcgcagtaggcgcagaagtacagaccgtgagtgccactggcagtgccgtacggcaggctctggcgaacaatcttcagccctttgccatcttctttcagatcaacgcgggtgaggtgagaggtttccggacgttcgtctccggcaatctgattaaggtggttaacggcagggtttttccacttctcacgatgtacggcgacggnnnnngaatgcgtaatgaacgag

SEQ ID NO: 89321 - DNA, 409 bp, Homo sapiens
aacgcattggtgaactgacgccggagcggcgtttttatgaagcacgccgtcaacaaatgatggaaccgtcaattcgctggaacggcatccatgactggtatgcggtcatgggggagaaaactgggccggatcgttacgcttttcgtttgtatgtacaaagcggtgtgcgctggatctgggggggaggattgttgatgattgcgggcgcattgttaagcggatggcggtggaagaagcgcgatgaataaagggcttctcacgctactgctgttatttacctgttttgcgcacgctcaggtcgtagacacctggcaattcgccaatccgcaacaacagcaacaggcgttaaatattgccagccagttacgttgtccgcagtgccagaatcaaaacttactggaatccaacg

SEQ ID NO: 89322 - DNA, 598 bp, Homo sapiens
gaggttggacccggggatcgtaaacggtgattccacacacgtacatgccgactttcccggcgtgaataggcttaaattcctctttttggcgtgtcagagtattgaagatttttagcatcgaagattccgtttagacatgtgtgggtaattgagttgcgtataatacccatatttcccgcgcgaatcagcatacattgcgtgatgatccgatcgtgcggttatgctataacaccaccctatatatgacccgaactgggttgaagcaccaatcaaacggaacaggatgcaaaaatggttactttccacaccaatcacggcgatattgtcatcaaaacttttgacgataaagcacctgaaacagttaaaaacttcctggactactgccgcgaaggtttttacaacaacaccattttccaccgtgttatcaacggctttatgattcagggcggcggttttgaaccgggcatgaaacaaaaagccaccaaagaaccgatcaaaaacgaagccaacaacggcctgaaaaatacccgtggtacgctggcaatggcacgtactcaggctccgcactctgcaactgcacagttcttcatcaacgtgg

SEQ ID NO: 89323 - DNA, 444 bp, Homo sapiens
tacgacttcaagctttgtacccggggatctcattcacacagcattgggcggtagtggctgaaatgccctgttcagtcaggaactcttgcagcttgtgtgcaatcatggttgaagtcgacatgccggtaccgcatgccacaaggatctttttcataatggatgtgcctcttgtgtagtgcctgaatcaggctcaacggggaaatgtgctgctgacatacctgccagagcggtcaataggcggatgcaatcagtcaaatcacgcaggctggcaacctccgccggagaatgggtatagcgacaaggaatagagagactggcgcagggaataccatcctgctcaacctggatataaccggtttctgttatcacgccgggagccacttctcgctgcaccggaatgttgtgttcaagagccgtctgttccaacatccgtatcaggcgagg

SEQ ID NO: 89324 - DNA, 435 bp, Homo sapiens
gcatcacacgaattctagctcggtacattgatgaagcagacagtattcagcaagtaactgagaggtgggaagctcaaagccaaagtcctaatgtgcagtcaggggaatttattgaaaaatttgaggctcctggtggtgcaaatcaaagaactgctcctcagtggatgttgcctttacttctaggcctgtacggaagtgttacttctgctctaaaagcttatgaagatggccccaacaaaaagaaaaggaagttgtccaggggcagctcccaaaaaaccaaaggaaccagtgcaagtgccaaagctcgtcataaaaggaggaatagaagttctaggagttaaaactggagtagacagcttcactgaggtggagtgctttttaaatcctcaaatgggcaatcctgatgaacatcaaaaaggcttaaatctctatagt

SEQ ID NO: 89325 - DNA, 568 bp, Homo sapiens
aatacgctccagcagaagggcgaagttattggtcgtctcggcggtgatgagtttttagttgtttcactaaacaacgagaatgcggatatttcgtcgctgcgagaacgcattcagcagcaaatacgtggagaatatcacttaggtgatgttgatttgtattatcccggtgccagtcttggcatagtagaagtcgatcctctgaaaatgaccctacccttaatttaattaaaacgagctgtttacccactagaatgatacagttaaaaagtttgacaatacaaagtgttggcagggccacagaatcactggaattcttaaatgttgcttatgggagtgtaaagtaatacgttttatttgaaaaagagtttacagtcccttacaaagtaagcacacgacccagaaactctactcctaggtgttcgcaccaagtaataaaatttatgttttaagaacaagaaagttcttagcagctttattcaaaataagccccactggtaacaacgcatcggtaggtaaatagataaacacatcgtgctacggccatacaatggaatggtactcagcagtg

SEQ ID NO: 89326 - DNA, 977 bp, Homo sapiens
ggcacgagctccgggctgggtggggatcggctggctgcccccggcccctcacctccatctttctacccccagggtcgcggcgagcgcgcctatgacatctactcgcggctgctgcgggagcgcatcgtgtgcgtcatgggcccgatcgatgacagcgttgccagccttgttatcgcacagctcctcttcctgcaatccgagagcaacaagaagcccatccacatgtacatcaacagccctggtggtgtggtgaccgcgggcctggccatctacgacacgatgcagtacatcctcaacccgatctgcacctggtgcgtgggccaggccgccagcatgggctccctgcttctcgccgccggcaccccaggcatgcgccactcgctccccaactcccgtatcatgatccaccagccctcaggaggcgcccggggccaagccacagacattgccatccaggcagaggagatcatgaagctcaagaagcagctctataacatctacgccaagcacaccaaacagagcctgcaggtgatcgagtccgccatggagagggaccgctacatgagccccatggaggcccaggagtttggcatcttagacaaggttctggtccaccctccccaggacggtgaggatgagcccacgctggtgcagaaggagcctgtagaagcagcgccggcagcagaacctgtcccagctagcacctgagagctgggcctcctctccagaatcatgtggaggggccagaggcctgccagacccccagctgggccctgctcaccccttgttgctgggcttggaggggcctcttgaggaacttttaatttgcaggggtgcccgctatggacggggcattccagctgagacactgtgattttaaattaaatctttgtggtctttgctctgcgtctgggacaccctcccttctgcaccatgacagcgtgtacacatctgtgtttcacaggccccttctgctt

SEQ ID NO: 89327 - DNA, 1791 bp, Homo sapiens
  misc_feature (1)...(1791): n = a,t,c or g
gattncttcgtgctgggaatcctggccctgtcccacaccatcagccccttcatgaataagttttttccagccagctttccaaatcgacagtaccagctgctcttcacacagggttctggggaaaacaaggaagagatcatcaattatgaatttgacaccaaggacctggtgtgcctgggcctgagcagcatcgttggcgtctggtacctgctgaggaagcactggattgccaacaacctttttggcctggccttctcccttaatggagtagagctcctgcacctcaacaatgtcagcactggctgcatcctgctgggcggactcttcatctacgatgtcttctgggtatttggcaccaatgtgatggtgacagtggccaagtccttcgaggcaccaataaaattggtgtttccccaggatctgctggagaaaggcctcgaagcaaacaactttgccatgctgggacttggagatgtcgtcattccagggatcttcattgccttgctgctgcgctttgacatcagcttgaagaagaatacccacacctacttctacaccagctttgcagcctacatcttcggcctgggccttaccatcttcatcatgcacatcttcaagcatgctcagcctgccctcctatacctggtccccgcctgcatcggttttcctgtcctggtggcgctggccaagggagaagtgacagagatgttcagttatgaggagtcaaatcctaaggatccagcggcagtgacagaatccaaagagggaacagaggcatcagcatcgaaggggctggagaagaaagagaaatgatgcagctggtgcccgagcctctcagggccagaccagacagatgggggctgggcccacacaggcgtgcaccggtagagggcacaggaggccaagggcagctccaggacagggcagggggcagcaggatacctccagccaggcctctgtggcctctgtttccttctccctttcttggccctcctctgctcctccccacaccctgcaggcaaaagaaacccccagcttcccccctccccgggagccaggtgggaaaagtgggtgtgatttttagattttgtattgtggactgattttgcctcacattaaaaactcatcccatggccagggcgggccactgtgctcctggaagattctctgtttaagcacccagtgtcttgccctgggttttctaggtctcacctgcccacccaaaatcttttctgcaagccccttaagggtgcccaccccagtgcctggccagccctgcacccgtaaaacaccttttagccagtagagggggcccacgagccctctctcaccagctagcacttttctcaccaccttcctcgaaatacttgggggcagcaagggtgttggcagatgagagtctcccactcaccatggtgagagtggtggggagtacccagggctgacctgactcacaagggaagcagtaactgtagaacctgccagcctccctggtccctgtgcccatatggcttcggctgatgagggctcagactctaggttgccctgaagatcaaggctttgtctcccattctgcccattcctgggtttcttcccaaaatgactactgtggggccagtcatggcacaagggccaggacctctagaggctggggtggggaaggactgagctagtgattcttagaggccttctggggcctaagagctgaaatctcagcgcccgggtttccctaaagttagctgaagacagcagccccggccagcaggagaccgaccgagcaccaccaataca

SEQ ID NO: 89328 - DNA, 911 bp, Homo sapiens
tgcgtgtacccacttgtgtccagctgtgcgcacaccttcagctctatgtgcaagaatgcccggcacatttgctacttcctggactatggtgccgtcaacctcttcagcctgggctcagccattgcctactctgcatacacgttcccggatgcgctcatgtgcaccactttccatgactactacgtggccctggctgtactgaacaccatcctcagcacaggcctctcctgctactccaggtttcttgaaatccagaagcccagactctgtaaggtgattcgtgtcctcgcctttgcttatccgtacacctgggactccctccccatcttctacaggctattcctgttcccaggggagagtgcacaaaatgaagccacctcgtaccaccagaagcacatgatcatgaccctcctggcctctttcttgtactctgcacatctgccagaacgcctagcccctggacgctttgactacatcggtcacagtcaccagctgtttcacgtgtgtgtgatcctggccacgcacatgcagatggaagccatacttctggacaagactctgaggaaggaatggctcctggccacctccaagcccttctctttctctcagatagctggagccatacttctgtgcatcatcttcagcctcagcaacataatttatttctcagctgctctgtatcggattcccaagccagaattacataaaaaagaaacatgactcagaccataagcttttcatgccagatgtcaacattaagctgcaacatcctaaccaccataagccggaggtggttacagcttatcacggcctaaaatattcataatggttggtgtcttttgaatgaattcatgtcaaaaatgttattcagctggggaaatttctctaaatgtacactgattctgtgtgtg

SEQ ID NO: 89329 - DNA, 417 bp, Homo sapiens
ctaccatgcagatttgtatgttaggaggatcccactggaagacatccctgaagacgatgacgagtgctcggcctggctgcacaagctctaccaggagaaggatgcctttcaggaggagtactacaggacgggcaccttcccagagacgcccatggtgcccccccggcggccctggaccctcgtgaactggctgttttgggcctcgctggtgctctaccctttcttccagttcctggtcagcatgatcaggagcgggtcttccctgacgctggccagcttcatcctcgtcttctttgtggcctccgtgggagttcgatggatgattggtgtgacggaaattgacaaggactcaacatacggcaactctgacagcaagcatgtattcggccgctctggaggatcaacgctacggcgctc

SEQ ID NO: 89330 - DNA, 1195 bp, Homo sapiens
gggggagcagccactgctgctcaccaacgccgagctcaaggactactcgggcctccacgatgccgcagccgcgggtgacacactgcccgagggtgccacggccaacggcatgaaggccatgtagcccggcctgcggaacccggggctccagggtctggggcagcttgggcacaggtttacagaccagggaccgaacacgcagccaggggtgggaaagctgcctcagccaagctgagcctctcaactggtgtggggaaatcctgtctttccaaaagtccaaggagcgcgggtcggaggagacaaactctttggaaataaccctttcaagactttcttttctgccgttaaatgtgtgtatttattttggtcatttttacgagaagcactttattccctctccctctcactgatcacaaatggaatcacctccctgggcagcgagacgcagttgctctgggaagatgccacagtgaccagggccatggccggtccctctggggagatgggacacggctcctggcagcacccaggagccccccaggctgcctgcctgcgtgcagaggcaggagaggaccgtggagcgtttccgggactgcattttagacggagtgaaatgtacatgaatttggcttttgctagagtctgtgtatggttttttaaggtcctttttccctttctgtttgtaaggtaagagcttctgttcgtgtgcagggaaagcagctcacagacgccgttaaaaccagcttcatctttccttcaggatcatccttttgtacttgatgctggaagctcttggagaaaaagcttaaacatttcaccagaaatcttaattgagcagcagtcatatcgccacagctttgtgagtacacagctaacagatgcgtcgagacctgagatgtgctcgtttttattcctcctctcccagattggctccagcagaaaagtccctcgtgcacaggcagctcttgtgccggcactacttgaaaacatggctactttctaagctacaaaccattagaaaataactcaaaaagatggcagaggcaaatccacagaagggggggctgccctccacacacacacgcccgtcacccacaccttgagcacacaccatgaagatcaccagcttggatggccgtcacctcagacatcactccagggagcacctcgcaggagctgggccccctcacgcccg

SEQ ID NO: 89331 - DNA, 2523 bp, Homo sapiens
ggaggcggagcttgcggtgagccaagattgtgccactgctctccagcctgggcgacagagtgagctccgtctcaaaaaaaaaagaatcatttcctttatttttagtttcacgcctgcaaacacaagcattctgttgatcaacggaaatattttgatgtgccatttcttgtctaaacaagtttcatatacagcaccgagggggccacgagaggcagaggcccagacagaaggtgaacatagccttgcagggagacatatgccaggcaggatgaccattgggattgcatcaagtattaatcagttacttaagggcttcctgtcagacagttgaagttcacattccttttacttttcttaattagtccactaggatggtatgcctgttttcaacttaacacatgcatacttgtaaatattttagtatgctacagtaatttgtcatatctttaatatttattgtttgtaaagcagtaaacatttctgtattttagaagtcatggagtaaaatcaaatatttatgataaataattggaagtatgttttagtttgaagattgtcctttttcctatcttgctgcaaggaaaaatggacttctgattaggttttacaattgtgaacttttatgtaaatgttaagtgctttcgaggagaccaaactattattaatatataaaatggccttgcccttaaggagcaaattaaatctcatggagattagactcaaaaggcaataaataatcgagggtttatgcaatgaaatagaatttcagaagagtttggatctcaaagattggccttcactctcagaaacaggcaagtttcttaaaagcccttatagtcgtgtttttattttaaaaatcgtagcactttatttttgaagtttaaaaagcccataaacttaatgagtctttataatcagacacatggaaatatagaaaaccaaagactgatcttagaatatagagtagagagacatgtttgttattctccactagtgactttagtattttgttatgtgatgttttttaggtgcaccttttctcatgactccttttactttatctaatgtcttcctctttaaagtgtgacccagagaccagtagcatcagcatcacctgagacctgtgaacactgaagctccagctcagacatgttggggaccattttaataagatacctagctgattttttgcacagcaaactttgaaaacccctggtctaaggggtagtatttgtatcacttatggaatataatctcagggaaattaaatctgctcaattgacatttgtggtgtttcattttttaaattctcttgagtaacttctgtagccctttccagtgtgtcaggttgagccacatgaagttgctatttttgtaagtcaaaaatatcttcatagggtgcaactcactattctatggaatcttattttaggagtattgaaccttcctgaaatgtctttgaaggaagtgtcaccctttccaacactctgccagccataactgcttgggaacaggtctccaggatttgggttccatagagcagaaggtaggcctctgccctcatgtctagagggatgaataacattctgaaaaggtacagggtgtgtctagtcacaggagtcacctgcaaggctccaaactcaggctggatggccccttggggagtgaattctgcaagagttgcacctggggccaacagaaggagctggaatcactgattctgtatcctggctacatgccttagaccacaggaaccagactctgaagcaccacagatgtttctgtgaacatctggagttgggaatcactgagttagatcaagaatggattcggctgccatgctcgggttgagattgtattgacggatgaaggggaatgacggaagaattcctgcggtaaagtgctgtgaagacactcctgttttagaaagagctctctagccgcagcaaggaggattaactggaggcccaaggagtagtctggactttggggcagtaactttaggggggccctgagggagagctggtcgcgaggacagggacagcaggcagaggttgtggcccacaaggccattcgcaggagaggttgtgaataattcccaggtgatgagtgtgcagctttgaggaatttccaaagggttgccttggcgtcttttccctgaagacacctccctataaggtatttaagaaatccctatcaggagtgagaatcaagccccagtcagaaaattttagggcatttggggcaactgcattcaagaaaacagctatttatttggaatgcataataaaagcccatgagactgaatctcccatgcctctttgcccccctagtagccttcaagaagtctctaaaacagggttacccacagatttagcccaggatgatgtgtagcagcttttcttggaacaggttgatggattaaaataactttttttcagctctaatgtttttttcttgaatttgccagtcacatgataattttcttcaaaaataaaactttataattgtaaaaaaaaaaaa

SEQ ID NO: 89332 - DNA, 375 bp, Homo sapiens
aatgaaaataaatgttttttattaggcagaatccagatgctcaagggccttcataatatcccccagtttagtagttggacttagggaacaaaggaacctttaatagaaattggacagcaagaaagcgagcttagtgatacttgtgggccagggcattagccacaccagccaccactttctgataggcagcctgcactggtggggtgaattctttgccaaagtgatgggccaacacacagaccagcacgttgcccaggagcctgaagttctcaagatccacgtgcagcttgtcacagagcagctcactcagtgtggcaaaggtgcccttgaggttgtccaggtgagccaggccatcactaaaggcaccgagcactg

SEQ ID NO: 89333 - DNA, 2253 bp, Homo sapiens
acaaggtgtttggcacccacaaagaccatgaagtttcaacgcttgacacagctataagtgctgtaaaggttcaattagcagaatttctagaaaatttacaagaaaagtccttgaggattgaagcctttgttagtgagatagaatccttttttaataccattgaggaaaactgtagtaaaaatgagaaaaggctagaagaacagaatgaggaaatgatgaagaaggttttagcacagtatgatgagaaagcccagagctttgaggaagtgaagaagaagaagatggagttcctgcatgagcagatggtccactttctgcagagcatggacactgccaaagacaccctggagaccatcgtgagagaagcagaggagcttgatgaggccgtcttcctgacttcgtttgaggaaatcaatgaaaggttgctttctgcaatggagagcactgcttctttagagaaaatgcctgctgcgttttcccttttcgaacattatgatgacagctcggcaagaagtgaccagatgttaaaacaagtggctgttccacagcctcctagattagaacctcaggaaccaaattctgccaccagcacaacaattgcagtttactggagcatgaacaaggaagatgtcattgattcatttcaggtttactgcatggaggagccacaagatgatcaagaagtaaatgagttggtagaagaatacagactgacagtgaaagaaagctactgcatttttgaagatctggaacctgaccgatgctatcaagtgtgggtgatggctgtgaacttcactggatgtagcctgcccagtgaaagggccatctttaggacagcaccctccacccctgtgatccgcgctgaggactgtactgtgtgttggaacacagccactatccgatggcggcccaccaccccagaggccacggagacctacactctggagtactgcagacagcactctcctgagggagagggcctcagatctttctctggaatcaaaggactccagctgaaagttaacctccaacccaatgataactactttttctatgtgagggccatcaatgcatttgggacaagtgaacagagtgaagctgctctcatctccaccagaggaaccagatttctcttgttgagagaaacagctcatcctgctctacacatttcctcaagtgggacagtgatcagctttggtgagaggagacggctgacggaaatcccgtcagtgctgggtgaggagctgccttcctgtggccagcattactgggaaaccacagtcacagactgcccagcatatcgactcggcatctgctccagctcggctgtgcaggcaggtgccctaggacaaggggagacctcatggtacatgcactgctctgagccacagagatacacatttttctacagtggtattgtgagtgatgttcatgtgactgagcgtccagccagagtgggcatcctgctggactacaacaaccagagacttatcttcatcaacgcagagagcgagcagttgctcttcatcatcaggcacaggtttaatgagggtgtccaccctgcctttgccctggagaaacctggaaaatgtactttgcacctggggatagagcccccggattctgtaaggcacaagtgatccttggctttcagaatttgcaagaacagcgatttgaattttgggggggtctgctgttcattcctttaggtgctatacattattcaaaaagtctcccgcgcatttgcactaatgatggctgcatgcatagcaatcagcatgtgagcaaaatcgacaagaaaaccttgactttacagagcagtgtgtgagtaaacagaatgaaaacaacaacctccactctttagtttatataagtttgagttctttcctaaattaaaagatctacacttgagttgggaaccgaaagagaaaaatggacttccatctgttttactggtaaaggaaatcctctgatggacaggtcagagtgaaggaaggttgtgctggtaagacatctctgacgaagagccatggatgctttccacaaaatgtcacctcgctgcactaaaggatgatgaatcctaatcattaaaggaattgtttcagctgatttaaatttataatgaactcttttgtaataatgtatactgtagaacatgagtctctcctccctaaaattttaaatgtagaaaagtgctatatattagaaatttccattttgttaaataaatggttagagtctataaaaaaaaaa

SEQ ID NO: 89334 - DNA, 2790 bp, Homo sapiens
ccaagccaaagcctgcaacttactttaaaaaagaaaaggaaaaaaagcacttaggaaagttacagacaactacccccaaaaaataccctcccacacacaaaatccaaaccgtttcctcatctccctcccgcctcccccgacacaatacagtttcctgttttttttttttttaaaaacgttgcctgctacctctccatttgggaagcccagggcatgactgctggtgggtggtgacaggcacacagcgggcaaagcccatctttggccagagggaggtgggaggaccagtccctgccacatcctcaatccacagacacccaccagccagcctttactttggcctcccactagagggtagtggggcaagaacaggtggtcccaatggctgggcaatcagcacttctggcgttcccacctggactacctctatacccttctccaattaaaaggaaagtctcactttgggcgggaaaccactattacataagggatggacactacacatttagaatgtggacacttggttagggcagtggaactataaagatagcagccagttttcttccttgccttctcctgaaggtaatcctccctcttactgactgaagctctggttccagctctgctcatgggcaatgcctggctttacagttataaggctgtgctatggactagctgctgactcagctggcagctggcccttcctccggaggagaggacgtgttggggcatggcttactgggcctggcctaccattcccacagggaaccaacgagggagtgagcctgtgagactcagcttgccaccttggccaccacgtgctgccctcatcacaaaaaccacaccaaccactccgaaacgtatctgctggtcaggagcagggaggctgtctggctggctgagggataaggcgcagtgcaacggaagggatcaggaagcctgagaggagccaggtacacacagctgctctgggcagctgccctcttagtctcttccacctcaaggagccaaagcaaaccccaggctccagggacagaggataaactgccttcattccaggccctcgctctggaaaaaggggtgacgggtagcctaggcctctgaggaaccagtctgtcatcaatctttgcaaagcaaagctgttctttttccaactttattcagaatgttctgccttcaaggtactgattgcacacaggaaatgtaccaggtatagttactgagctggggccaccaatggagatggagcactgcagacccctaagagttcaagccatgctggagtgggaagacctatccaccttctgaacatacgaggcagaaggctcagagtcctggaggcagactctctcctggttttccttgtgctgatggcaaaatactaaacaagtcttctctccgtcacttctaagcccagggatgcaatctcactccctggcactctgctttcttctagaagtagtaagcctggctggtagggaaccaccctgaggggtatgggaaggggaagtcggttcactttccctatctcccaaaatactagaggtggggttggcaccctccccaggctctccgagcctacagagctagcccagtctccaggcaaggcccagatgccctgggacttagctcggggagggaggtataggcatggggtgctcgtctgtcctggcggctgcagagccctgccccttttctgggcggcagtaggaatacagaagctaagctcaccaaaatcctattggttaatgtttctagtgaatttcccagaaacatttttaagtagactaccaaactaccctttcttaattaaaaattcattaaaccactaaaacccctcccatgcactttttcttgcaaatcagatatttgtataaacaaacaaaaataggaagaaaaaaaaaagaaaggatattttcaaatggaacttactttttaagtgatggagacatgcacttgggggtgggtgggtgtgagttttcatttgtgttttgaaatcccaaattaatgagcatgataaactgttattgctggcactggctttaccccaagtggccaagtggcactgtctgactctctgagtccttgctgggtccccccaaccttcccctaacccccaccctttccctttccattgacttgggacagcccttgtcgatgtgccaatcacagtgggaagggggagaaggggggaggtcacagtgcatggggttcaaggtcacagtgggcggagcaagggggatcacagtgcaagtaagtcaggtcgttccctctgctcaagtccagctgtctgccacggcagtgcaacccgtggcggacgacccaggaggcggtgacggcagcaacggcggcatcttttcttgcctgcatttatctgcgctgtttgaagccttgagacccatcaggacccaaaggctgtctgatcacattattgggctgcctgctgtcttcgggttgggagatcctggttggcctgtcgaggatgggtttctcctgctcctcctcggggctggcgctgcccaggatccgcttccgggcctcggcgtactcggcctctcgctgtgctagggacttgactggaagggtgggcctgctggtggagttggggctgctgaccacaccgttgctggtgggcctcttgaggatgcggatctgtggagggggccccgcgggaaggctatcgtcctgaatcacaatgggcactttgggaggagatttggatttccccgctgtctgccgcctcttcccagctctcagcgacctcctcatcttccatcttactcgccgctt

SEQ ID NO: 89335 - DNA, 1237 bp, Homo sapiens
attgatttcgagatcactatcagtgtggtggaattcttttctgtgagagctgcaaaaccacactgggctggaaatatgagcaagcttttgagacgagccagaagtacaaggaagggaaatacatcattgaaatgtcacacatggtgaaggacaacggctgggactgaggggctcaggcagggtgtgcccttcctccgcatgcccctccctccccacggccctgccaagcagtctataccagcatgagtactgccccacccctgggggaaacctggctccaaccaacccctcccctgcctccaccatatccactaccaggcaccctttagaacaggggtctgggggtaccccaggggtgttaaggctcaggagtgggcagcagtcagggagagacagaactgggggaaagggatggttgtgggtctttctgttcccaagatcctgaacatggaagcgatggcagggcatagactcaggcagagaggattgtgggaggaatccgtttttgctccacctctttttgagtgaacagaggacaaaccttgggtcacagggcaagtagatcatggaccacagaacagcagatgagaaaagacttgggttggagtgaaattctggtctcagacaccaggagaccagagtctctgaggatgaagtttcctacccctatttgtagggaaaaggacttgagtgcagggaaaactcaaatcccaggccctgggaaatagtaaaataatcaaagggttttccatttcactccacttgttagtttatcttggcactgaagaggcactttcgagtatctaacttttgccattgggtggggtggggacagctgctcgcggaacagcccctagtcggctgcttccagagtaagcagtctttatgggctttctctgaggcccagtcactgctcctgggacccagtcccctggaggggaggtggaaaatcagtgctacggggccagtctttcccgtggctgccaccagcgaatgaaacttttgtatgatacataaagtgcttgagtctatttttaataaaaagggaaaaagctacttgaggcaacctgacctctgactttctttccctgtgcatgaacccataaactgttcccgtcacacacacacacccccacccacccgggcctgggcctttataccactagggggcaggagttgccctgtttatgggaagactactgcttgagcttttacccgggaaaaagcgctcatgttg

SEQ ID NO: 89336 - DNA, 70 bp, Homo sapiens
atatcagggtggtttataaagcctgtaaacacacctaagaaaataaacattttacaaatgaaaaaaaaaa

SEQ ID NO: 89337 - DNA, 1446 bp, Homo sapiens
aaaataaagtggagcccccagtgctatatctgaaattgtttcaacagccctggcattaggccaccagcatgcattctttccagcctgcattcagtgtgaacccattgtctaggcattcatctttctgaaggagcagaggacagaaggcaggatgtaaactctctggatgctcgtggttcttttctcctgataatcagggcaactctctgcaaacagcagcaggagtgaagaagaatggcctgggaggataaatacagggcttacccttcttctctggaagagtcaaccagcttgattgtcctttctgggcatcagagcctcttcaactccacagttttccatctcgacaccagaggaccagatttagccctgttctttccatccaagataactttattccattttgcattatttgataactatttccttcccctccccacctccaactgcatctcctactctgaaatgcctcttgagcagccaagggtggccagttctgctcctcattttcctgaagaagaatctcagcctgaaagaatatagagctaggtgacatatgggtggccaaccgcttctcctcaagttccaagagagtgggcaattagtgaaattccatcagtcatgttaaaatatactttcaccaggtagacatccttctttcaatgctagaggacagtgaaaaatgtagattaatgagatctgtaactgtcttctcttaactgtacacccctcagggctgaacgcgggagtgctgaacacatgccctcggaagggaccctgaagacccaagtgacctgcaccataaaaccaccccgagggtcagccatgctgccagcactcaagaggcagcagggccacctgctggaagacctgggcacggctctgggtgcctggccctgcctgcctcctccacgtccttggagccaggtctacggcaggaccatgatcttcttctccagcttctgtggagggaacaggaagtttttcatgatgtcatccagctcttctagggccaactgggcatggagcttggccacgtcatcgggctccagacacactacgtgcttcagcaggtggtagagatccttgaggacggcgctcagcacctcagtagctttctggctgagtccccgaagcagcagcacaaccacatgtatggcagctctgcgtacttgaacttcaccatctgttttggccacagcaatcaggcaagctgttacctcatggaccacggagcccagcagaaagtccagcctctggcacagctccccaaggttggccaagctgctggccctgtgagcaccatcaggatctctcactcccctcaggaaggtatggatcaaaggttctcggtactttgagaccatgtctcctaatgccctgacgattcgcataaggacttccccgactttcatcctcgtgccaagattggcgtaagcatatcgt

SEQ ID NO: 89338 - DNA, 1816 bp, Homo sapiens
ttcaaattttattgggaagtttacaaatgtattacagacatcagtaaaacatcatatccattttacagggcacggatctcaagcaaagtgttcagaacagtcttctggcgagagccgacaccaaaggcctgtgcagaccctccttaacaaataccttgaacactccaacacagaacacagactcctggcctgccctcaccttcccaggccctttgaggttttgtttatgcacttgaaatgaaagcaggagatggacaaagcaatcctgtggaggaaagaatgagtttaggagaggaaaacctgccgaagtcctaatttgctaaaaaaaaattaattaaaaaatggaggactcatagtccttacaatgttaagtcagggtctatgatagaatcatgacactttatggaaagatatgaaaatcaactaggtaggtttaagaacagaccttattggtaagtaactctctctgaaaaatttagaaaagcttggtcagtgacctgttgaatatcaatggccaaatgccaagcagagtgaagggatatctcagagaactctcagaatagaacaagcagatttttctctatcctatggattcatcgtattcaaaacacaggaatgttttcctaacactatgtgactttcccctcctttatatttccttgaggaaagctagttttgtcagcaggaagtaagcttataaaatagtatggctcccaatagtgagtcatattttatgggagtcttgtgttgactaggctactattatgagaaaatggaaaaagaatccaattttttcttgatctttactttgaggactacttccaaatggtcataagaataagctctggtatctgctgaggcaccagagggacaaaccactggagacaaggcaaaggccatttctacttctcttgtgcttaaagaaatgtacctcaaaaggtggcgatctgaaactgccttcaacaattggcagtggaggcttggctactgagtcttgcatatgcaaatgctgtctgcagagcccattttaaagccctgaaggtgcaaaacagttgctaatagcaactgtcctggcatgaagtattcagataactggttcagttttccactttcctttgtcatggacggatcttccttcttaggcttaagcatctgttttctgctagaaatacacaaagaacacttctccttggaatttaaatatttatttattttttgttagaaggtgggattacatgaagaataagatgaagtcttacctcacctctgcaaaatgaagactgcctatagtaattggcagagaacatgaaaatggccaaggaggtaaagagatttttttgtcctttagcctaagaagtcagcttcctcgagcctccacaacctgggatgggggaggggcaggtgaattggagtctccgaattacttatacatattggttcctaaatgttcgtaattatgcttcctaaactgtttttgttctacggcaagagaaccaagagtggaaagacagatatgaatcagttcacaaataagattggttatcagaccaataagatcagttctgatcaactggtcctggctggttggagtgttgcaaagatctgtgaggctgcatccacattctcagcaagagtatacagtgatgcattggttgtatctgctcagcttgcagggagcgcagagcacatgctacatatatgtcatcacaggcctcacctgaattgaacaatagctagtagtacccaagaagcagaaagctgctgcagaaggaagaaaacataatcttgttatagtgcaggaacatcctacaggaaa

SEQ ID NO: 89339 - DNA, 1183 bp, Homo sapiens
ggcttctacaggcctggggcccgtggggaccactacgctcgcaacttactatggtttgactttggcctgccctttcccccagagaagagggccaagagagggaatattcatccccccagagaccccaaccccccacagctgcaggtcttgccttctggtgctggccctcgagcccaaaccctcaatcccaatgccctcatccatcctgtttccactgttactgatcatcgcagccagatatcaagccctgcctctttcgatttggggtcttcatccttcatccagtggggtctggcctggctggactctgtctttgacctggtcatggtggctgagtacttcgatgagtcattggttctgctggcagatgccctgtgctggggtctagatgacgtggtgggcttcatgcacaatgcccaggctggacataagcagggcctcagcactgtcagcaacagtggactgactgcggaggaccggcagctgactgcacgggcccgagcctggaacaacctggactgggctctctatgtccacttcaaccgcagtctctgggcacggatagagaaatacggccagggccggctgcagacagctgtggccgagctccgggctcgccgagaggccctagcgaaacattgtctggtagggggtgaggcttctgaccccaaatacatcactgatcgccggttccgccccttccagtttgggtcagctaaggttttgggctatatacttcggagtggattgagcccccaagaccaagaggaatgtgagcgcctagctacccctgagctccagtacaaggacaagctggatgtcaagcagttcccccctaccgtctcactgcccctcaagacttcaaggccactctccccataaacatcagactacagatttaggtggaagagcagccatgtttgaagggcacatgtgatgagtggggggcagcaagatgccatttctgcatctcccagaagggatgagtctttgtcccgatgcaagccccctcttcgctgggctcccagcagtgcttccctcctccaccctccactcattttgttctttccccccaacttttttttttttgaaacgggattttggttttgcccccaggctggaatgccagggcctgaacctgggttaatggaacctttggcctccagggttaagggaatttccc

SEQ ID NO: 89340 - DNA, 1088 bp, Homo sapiens
tatgccaacccatgcttgtcacgaggaagaaccaccccaagctgctactgcgccggactgagtcggtggcagagaagatgctaactaactggttcaccttcctcttgtataagttcctcaaggagagcgctggggagccgctgttcatgctgtactgcgccatcaagcaccagatggagaagggccccattgacgccatcacgggtgaggcacgctactccctgagtgaggacaagctcattcggcacctgattgactacaagacactgaccctgaactgtgtgaaccctgagaatgaaaatgcacctgaggtgccggtgaaggggctggactgtgacacgggcacccaggccaaggagaagctgctggacgctgcctacaagggcgtgccctactcccagcggcccaaggccgcggacatggacctggagtggcgccagggccgcatggcgcgcatcatcctgcaggacgaggacgtcaccaccaagattgacaacgattggaagaggctgaacacactggctcactaccaggtgacagacgggtcctcggtggcactggtgcccaagcagacgtccgcctacaacatctccaactcctccaccttcaccaagtccctcagcagatacgagagcatgctgcgcacggccagcagccccgacagcctgcgctcgcgcacgcccatgatcacgcccgacctggagagcggcaccaagctgtggcacctggtgaagaaccacgaccacctggaccagcgtgagggtgaccgcggcagcaagatggtctcggagatctacttgacacggctactggccaccaagggcacactgcagaagtttgtggacgacctgtttgagaccatcttcagcacggcacaccggggctcagccctgccgctggccatcaagtacatgttcgacttcctggatgagcaggccgacaagcaccagatccacgatgctgacgtgcgccacacctggaagagcaactgcctgcccctgcgcttctgggtgaacgtgatcaagaacccacagtttgtgttcgacattcacaagaacagcatcacggacgcctgcttgtcggtggtg

SEQ ID NO: 89341 - DNA, 1528 bp, Homo sapiens; identical to SEQ ID NO: 80488

SEQ ID NO: 89342 - DNA, 859 bp, Homo sapiens
gagctgggttctttttaaggggccccccttttttttttttttgctcttagaatagactttattgactttagccaagggcaggccctgagatgggggtccagagagagaggcttggtggggctacgtcctgggggccaggttggttctgaggggtagaaggccatccacccactcgcacggctgctccaggagggcttgccacagctgcttctcctcaggtgtggaatccatccagggcacctgcagcccatagctgctgccggtgcccaggctgaggcgtgtgcctcccagctggcggttggccagggccccatggtcccagagggagagctcggcacaagcctggcgcaggtcagcaggcccaaagccatcgtacaccatggtgtgattgaacacagggctgaggctgcgtcgcacaacccttgtacgctggcggctggcccggctgtcatcaggcagcacgaagcattgtacgtaagtgtccagggatcctgcccgcagcggcaggaggtcccgagcctccttcacccagaagtgcagctccccgctcgggggcagtcctgcgccctcggagccggcggggacgtacttgagggacagggcgagtaacccgcggctcggaaggtcgtcgggagagggtgggacccggggctgcagggggagccaggtgggctcagagccccagtcccacgtgtccaggggcacttcaacttcgcccagaaagatgttgcgacccaggctttcgcggtgccacacagacaggctcagcacgcggccctgaagctcggcctgcgggacggagtaccggagagtctcgttgaaaaccggattcagattccgtttcttcaccgccgttttg

SEQ ID NO: 89343 - DNA, 1916 bp, Homo sapiens
ctggaatctgctggagggaagggtggccctagagacccagcgggacctggaggacaggtaccaggaggtccaggcggcccagaaagcactgaggacggctgtggcagaggtgctgcctgaagcggaaagcgtgttggccaccgtgcagcaagttggcgcagatacagccccgtacctggccttgctggcttccccgggagctctgcctcagaagtcccgggctgaagacctgggcctgaaggcgaaggccctggagaagacagttgcatcatggcagcacatggccactgaggctgcccgaaccctccagactgctgcccaggcgacgctacggcaaacagaacccctcacaaagctgcaccaggaggccagagccgccctgacccaggcttcctcatctgtccaggctgcgacagtgactgtcatgggagccaggactctgctggctgatctggaaggaatgaagctgcagtttccccggcccaaggaccaggcggcattgcagaggaaggcagactccgtcagtgacagactccttgcagacacgagaaagaagaccaagcaggcggagaggatgctgggaaacgcggcccctctttcctccagtgccaagaagaagggcagagaagcagaggtgttggccaaggacagtgccaagcttgccaaggccttgctgagggagcggaaacaggcgcaccgccgtgccagcaggctcaccagccagacgcaagccacgctccaacaggcgtcccagcaggtgctggcgtctgaagcacgcagacaggagctggaggaagctgagcgggtgggtgctgggctgagcgagatggagcagcagatccgggaatcgcgtatctcactggagaaggacatcgagaccttgtcagagctgcttgccaggctggggtcgctggacacccatcaagccccagcccaggccctgaacgagactcagtgggcactagaacgcctgaggctgcagctgggctccccggggtccttgcagaggaaactcagtctgctggagcaggaatcccagcagcaggagctgcagatccagggcttcgagagtgacctcgccgagatccgcgccgacaaacagaacctggaggccattctgcacagcctgcccgagaactgtgccagctggcagtgagggctgcccagatccccgggacacactcccccacctgctgtttacatgacccagggggtgcacaccaccccacaggtgtgcccatacagacattccccggagccggctgctgtgaactcgcccccgtgtggatagtcactccctgccgattctgtctgtggcttcttccctgccagcaggactgagtgtgcgtacccagttcacctggacatgagtgcacactctcacccctgcacatgcataaacgggcacaccccagtgtcaataacatacacacgtgagggtgcatgtctgtgtgtatgacccacacgtgttcaagtctaatccatccagtcagcagcttacggtccacacacattacagtccacagctgttgtgagagccacctgtgtgctggacaccctctggatgttgggcaagttgttacatgagatgccctggggtgctacatccactcactccagatagcagggaggtctcagcagatctgcagagatcaagggggtcagcaacagccaaagcccctagtcccagagctggctgccctctgtttcacagcagctccctgacctgtgttgctgcgtgcactccctacagctcgacacagccaggggaccaacaggccaagaaatgcaagatcccgggagggttctcagcagcagaatctgaggcccagagaccctgaggccgtggccaggcctgctagtctggctagagcaaggcccactcctggcgggggtgtcattgccttcaccggacc

SEQ ID NO: 89344 - DNA, 2565 bp, Homo sapiens
aattcaacatcatttaaagatgagaaaatcatggagactgatagtgaaccagaggaaggtgaaattacagactctcagactgaggatagttatgacgaagccattaccagtgaaggcaatgtaactgcagaagatagtgaggatgaagatgaagacaaaatttggcccccatgtattagagtaattgtcattagatcacctgtgttgcagataggatcactctttatcattactgctgtaaaccctgctacaattggaagagaaaaggatatggaacatactctccgaatccctgaagttggtgtcagtaagtttcatgcagaaatttattttgaccatgacttacaaagttatgtccttgtggatcaaggcagtcaaaatggcacaattgttaatggaaaacagattcttcagccgaaaactaaatgtgacccttacgtacttgagcatggagatgaagtcaaaattggagaaactgtcttatcctttcacattcatcctggcagtgatacctgtgatggctgtgaaccagggcaggttagagcccaccttcgccttgataagaaagatgaatcttttgttggtccaacactaagtaaggaggaaaaagagttggaaagaagaaaagaattaaagaaaatacgagtaaaatatggtttacagaatacagaatacgaagatgaaaagacattgaagaatccaaaatataaagatagagctggaaaacgtagggagcaggttggaagtgaaggaactttccaaagagatgatgctcctgcatctgttcattctgaaattactgatagcaacaaaggtcggaagatgttggagaagatgggttggaagaaaggagagggcctggggaaggatggtggaggaatgaaaacgccgatccagcttcagcttcggcgaacacatgcaggcttggggacaggcaaaccatcctcatttgaagatgttcaccttctccaaaacaagaacaaaaaaaactgggacaaagcacgagagcggtttactgaaaacttcccagaaactaagcctcaaaaagatgacccagggaccatgccttgggtaaaagggactttagagtgaaggctaatcatagaaaaaaaacctctagtttttttaaaaagagaatttggaaacttattttttctccccaaaagaatcagcagcacaggggaactatgtcacagtttacctcttcctgattcagaaatgtgtatggtttgcagcttttaaaaaccatttttttaaaactaataaatagtgactgaaccaatttatgcagtaaatagactaaagttcacagggcacggatgagtttatcaaacttcgttattttatcttgtcatttacaacatccatataagcaactagccatataagcaaaattcatagaactactaatgacttaagtgtacatctgttcttgtctccatatattcatgtaagatgcacaacaaaagaaacatcagaagtttataaaaataaatctgactatatgcatcctcatttattccctttagaacctaggtaaaaaatgttgcgaaaacatgggtagtggcgcatacattttgttatccttgaaatagcctaagtaatgttattgaagaactaatgaacaggtaacatattgtagaaaattagtctttcattgttttcttctgtgaagaatctgttgctatgtactgtatattcagcatttatatttggtttgtttcatagctaatgaggtatttagatatgaacaactgaatacatattgaaatagtgtgctggcttttgtagttttgataaagaccattgcaggcaatggaattgtgccagagaaatctgatttctagtacaaaaggaatacttagccagggcctcaagctcaagatacttattgaaaacatcctcaattgcaataaaaacattataacatgaaaaagagtgattttttgaaccggtgatttaaatgtattgatctgctttgaattttcaagcagccagaattttctagtttaaattggcagagttataacaaaggagagcctcaaatattagacaattgcagtgcggctttctgggcacaggtgtcactgctctgccacctatcactattctttttctgttcagtttttctctcagatgtttgctgggaaattaacactggaactgacccttttctggcagtgaatgtaagctctagctcccccatctactataaagaaatgtcttcgagatgtagaaataaggaatattctgaaaataaaaattatacagtagtaaagataattcagaaagaaaaagctacctgttagaatttccagtctaaatggcacagggtagttacggagaaaaggggatggagaaggagaaactatgactaaagatgagaggtatgaacgagttgtcaggttcctatgggcttaagctaggacaatcaggccctaaactccaaatttggataaaatatctctttgcattcttcttggccacctgcatagtctgacacatacgtatgtacagttagacttgcaggctgcaggagtgccctgcattgttttcttttaatta

SEQ ID NO: 89345 - DNA, 3504 bp, Homo sapiens
tcccgcgttgttaaaccgccggccagggaatggaatttgggggccccataaaaaaaattttaccttgccatcccgcggtagtaaaacttggtccttttaaacgggccccccttttttttttttttcaaattttaattaaaatctttattgaataaaaatgtttcagactaggtaagactaagaaagcagaatgttttacatctctaaaaaatattaaagctaaatctctataaatgcagtacaaagaaaagcctacagcttaagacacctctccctcccatccatacaatttggaatatcaactgtgtacaacaaatgtactcaagtttataatgtccccaaaccttaagactagaaaatcatcccaagaaaaaggcctatagttggtttaatttcaccctgagaatactgtgataaaaatcaatatatttcagagctagtaagtatttaaaaattagtgtctcaaaaaggggacatcataagggaaatacagggtttagaggtctgagctcaagtggtgtaagacagttctttcttcttcctcctttaaactcttcactttgctctaacacggaagatgggggacagtgatcccgaaggtattactaaaatattgcagctttcagtaattatgagaagcacagatatcaccagaaaagaaagcaatcatttggagtacagtaaattcactggcagatacaaaagcttatttgggagacagcagatctctctaagcaccgaagagtgtaggttggtttttcaattgcctcaaaaagtgctctgttgtattatacctcaggacgtcgagttcaggatgtagtttagagagcaggacataaagtagtaaattcctcatatatatcacagcaagaaaattaacctaaaaaatttaaagactaaataatctcttaacaggtaaatactaaaaaattaaattggtattcatttaaaaatatacaaactgtgccctttatactaaagtgcattcagtcgtaatgtttaagcccctaaattccttctgtatgttctctaattccaaaatagtgtgtaacaatatactactaatcatctatctaccttaatattgccttttgggaatacagtagaatctgggctattatcaggtggaatatttccccagttacaagccttacagcacttatgcatatcatcactgctaaaatgaagaatttaagtaaagttatctctagtatttagaatgtgttttttgtgtttttttgttttgtttttgattttaagaaggaattcttttccaaagttacttccaagtaaattacatttcatgctgggatacctgcttatgtgcatcacattttgacaaagggcagtggctcgctaacactaacatgaatttaaggcccagcatcattgcaatttgtcactcttcatcctcatcctcatcataataccgatttctctttatctgttcttccacagagagctctttgaccacttctccctcccagagttccacatcctgggatttctgattctgagtagtgaattcttcagcaaaggtgttgtctacaaaactcgaccaattcagagacttgggttcttgtggagattgttgtttgaggaagctgttatcatcttcatcggagtctgcaccattttctacaagattctcattctccatctccaaactatgaccttccttacttctcttccctgtctctcctttagattctttgttttgccaggttgtttttcccacattcccattcttcttagaagccttggcattttccacttgtttcctttctgcaactcttccacccacagactcttcactctgctctgacatgctccagcctttcctgataggtggggacacagtttttgggctcttgacagaggtgctttgaaatgaagctgctacagtgaatgggcggcttctttccttcagtgaagaagatcgtcttagcttcttcagatctagatcgacatcctcaggaacttcgggcttgctgatttcgtcttcaggaggccatttgggctttgacattttgatcccttcctccaaggcacttcctgaacttccaagttcagtggggggtggccaggcgatcctcagcttcttggtttcagctggcttgtcttccttctcctgctgagaggaggccttggcttccatacttgcagccaggacacccaccttagcaataggggcatcttctacccctgggctgtgaggggtctcccttgcatttgcaagctgggctggtctctccaaaatctcttcgttttcatttttgcttgcccatagatccttgtgtggtctgtgcccaaagccttcatcatagttgcccttagatttaaagagttgattgaagtgaggcttacaatagattcttccatgtaaagatgcatatgttcctagactgagtttgttgttgcaataggagcaacggaagcagctgatgtgaaacacctgctggttggccaagagacgctccattggatagactgtcttctgacattccacgcaggtctctcttgcaggtgcctgaaacttcttcattgctttgggaggagaactttcagaaagactggaggctctggaatctggacttagtggcttgggatggacaggctgttgaacctcactcttaacctgggagtcacgggagtcatcttcggcaggggtggaacggactgccaggctattctcatttgcagaaatcttttccccttcctgatgggtgatgcagacctcaggacctgggggcacattctccttttgctccattttatgaattttgatttcgccaccactggctttcagctcatttgtatagttggttgagctgctttgtttggacacagctgcctggtacttggccattcgatcctttatagaggtttctgagaggcgtggaagttccagatttcgtctactctcatttttctccgagtcaaatgtagaagatgacaactgacctgggcctatttccaggtcatctagagaatagctgttttcagagatcttccttccacttgcacttcggctttgggcccggagaatcttagtttgagttggttcacctttctcaaacatcatcttaagcctgttcagcggaacattatatttctctattttgcccgaagcatctgtgttttcactgatttctgatttttctacttcatgcctggattctcctagacaattttccatttttttactttctgttgagtggtctttaagatcctcaccgtccttgatgtggggatatcgaccctgaacgagggcttcaggaggtgacctgagtctagatctggggtggatttgttcttcttggtcagctttggctccagaagcagcgtggcttgtcacttcagcaggaggatggtctgctctgtgcctaatctcagtgctgctgttccgtagagagtctgtgtgagactctgctcccagccctgggttctcccacttcttctttaacacagtcagggcccttctgtcgtcttctcgcagccgta

SEQ ID NO: 89346 - DNA, 3453 bp, Homo sapiens; identical to SEQ ID NO: 64739

SEQ ID NO: 89347 - DNA, 400 bp, Homo sapiens
aaccgcgatatcgacttctggcccatcgcctttgcccacctcttcgccaatccacagcatcggcgcatggtcaatttctccttcgccgataaccactcgtccacgaaaagcgacgtcgtttaatgcctggcgcatcgcggtgaccgccaggccatcaattttatttttgtcgccacatccggtttgcggccaggcagccaacgctgcctgttccgtaacgcgaaataatggccacgccagggacatcattgcgcggcctccccgatatcaacgccaaattgtgccagcagatatttctcggcctgttcattccagatgccgtgcgtttcctcaacctgccgctggcccttatcagcacggaagggacaacagcgtggtacgcagaatacgatgaatgggg

SEQ ID NO: 89348 - DNA, 366 bp, Homo sapiens
tcccgggtcgacgatttcgtcattgaaattagacttcaacgcacctttaactttatgggaaattccacagcgtttgtccttattggctgacatgcttgttgctttcatctctttaccaactccctttcccattcgagttccgctgggcggtattaattccctttgtgaagttttgttgggagttagtaacaaatatttaccgttaaaaaaagaattgcgtcgggataataaactaaatggggtcatcaataccatcttacctcaaatacaatttcaaggcatcaggttatgggaaattatggtttcaaaatatggcaaatgcggtttatcatttttcgaaggaatcctttcttccattgaactttt

SEQ ID NO: 89349 - DNA, 640 bp, Homo sapiens
tttcgtggcggcataaagcgaaagtgcaggcagctgtggaaggcgaagttcaatcccagagtccgccccctgaattggggcctttccggaggaggaagctctgaaaaacagggggcccagtgccattccgcagggaattgtcgcttgcgttcagctgttctacacaatggactcagtacctgccactgtgccttctatcgccgctaccccgggggacccggaacttgtgggacccttgtctgtgctctacgcagccttcatagccaagctgctggagctagttgctacattgcctgatgatgttcagcctgggcctgatttttatggactgccatggaaacctgtatttatcactgccttcttgggaattgcttcgtttgccattttcttatggagaactgtccttgttgtgagtaaattaatgcatactttaactcataaattcaagtatggttttataatcacagtccttttgtttctttttcagtttctaatatgaacagaaattaatgcttttaattcaagctaaccttgtaaaataatttagtataatttttgtgttggtaaattcttaagtgaataagacaacatgtataatctcaatgggaaaacttcagtttatatgtctcatatcaaagtg

SEQ ID NO: 89350 - DNA, 4828 bp, Homo sapiens
cagaaggctaatacttatatatttttggaggctaagacttgaattgcaacttagcccaaagaaatcactgtaagtagttagggttatcctgaagggaatatgttttatttatttttttgaagtctgaaatatcttggccttgaatagcatgaaattcccttattatctggaataaaaaaaaaccctaagctataagtagtgaaagtcttaggaaaatatttttgaagcatttaaaaaaaaattctgaatatgttgtgtaagaagaacattgtaattgaatatctggcagacattctatatgagtatctttatgggttttgtttttcaggcattaaaaaatatttaatcattcatgtgttgagactcattcttgagttatggatgacaaggcttctgttggaaaaatcagtgtctcttcagactcagtatctactcttaatagtgaagattttgtcttggtttccaggcaaggagatgagacaccatctacaaataatggaagtgatgatgagaaaacaggactcaagattgtagggaatggaagtgaacagcagctgcaaaaagagctagcagatgtactgatggatcctccaatggacgaccagccaggggaaaaggagcttgtgaaaaggtcacaactggatggtgaaggagatgggcctctttctaatcagctctccgcttcatccaccattaaccctgtgccattagtagggctccaaaaaccagagatgagcctaccagtgaaacctggacaaggagattctgaagcttcaagtcctttcacaccagtggccgatgaggacagcgtagttttcagtaaactgacttacttaggctgtgcctcggtaaatgctcccaggagtgaagtggaagccttaaggatgatgtccatcttaagaagccagtgtcagatttcactagatgttaccctttcagtgccgaatgtgtctgaaggaattgtgagactcttagatcctcagacaaacactgaaatagcaaactaccctatctacaaaatcctcttctgtgtcagagggcatgatggaactcctgagagtgactgttttgctttcactgaaagtcattacaatgcagagctcttcagaatacacgtcttccggtgtgaaatacaagaagctgtaagccggatactttacagttttgccactgccttccgccgttctgccaagcagaccccactttcagccactgctgcaccccagactcctgacagtgacatctttaccttctctgtgtctttagaaataaaagaagatgatggtaaaggttattttagtgcagttcccaaagataaggacagacagtgctttaaactacgccaaggaattgataagaagattgtcatctatgtgcagcaaacaactaataaagaacttgccattgaaaggtgttttggtcttctccttagtccaggaaaagatgtacgaaatagtgacatgcacttattagatttggaatctatgggcaaaagttcagatggaaagtcgtatgttattacggggagctggaatccaaaatccccacattttcaagttgtaaatgaagaaactcctaaagataaagtcctgtttatgaccacagctgtagatttggtaataacagaagtacaggagcctgttcgatttctcctggagacaaaagtccgcgtttgctcacctaatgaaagattattctggcccttcagcaaacgtagtactactgaaaatttctttttgaaactaaaacagataaagcaaagggagagaaagaataatactgacactttatatgaagttgtatgcttggaaagtgaatcagaaagagagaggaggaaaactacagccagtccttcagttcgcctgccacagtctggatcgcaaagttcagtgataccttctcctccagaagatgatgaagaggaagataatgatgaacctctcctgagtggatctggtgatgtatccaaagaatgtgcagaaaaaattcttgaaacatggggagaactgttgtcaaaatggcatctcaacttgaatgtgagaccgaagcagttgttcatccctagtaagaaacggtgtccctgaagctcttcgaggagaagtctggcagctgctagcaggctgtcataacaatgaccacctggtagagaaataccgcattcttatcacaaaggagtctccccaggacagtgctatcacccgggatattaaccgaacattcccagcccatgactactttaaggacacaggaggagatggacaagattccttatataaaatatgcaaggcttattctgtgtatgatgaagagattggttattgccagggccagtcatttcttgctgctgtgctccttctccatatgcctgaagaacaggcattcagtgttctggtcaagatcatgtttgactatgggctcagggaacttttcaagcaaaacttcgaagatttgcattgcaaattttaccagttggagcgcctcatgcaggaatacattcctgacctgtacaaccacttcctggatataagccttgaagcacacatgtatgcctcccagtggtttcttactcttttcactgcaaaattccctctctacatggtcttccatatcatcgacctgcttttatgtgagggaataagtgttatttttaatgtcgcccttggattattaaagacttcgaaagatgacctgctgttgacagactttgaaggtgccttgaagttctttagggttcagcttcctaagagataccgctcagaagaaaatgcaaaaaaactaatggaattagcctgcaacatgaagattagtcagaagaagttgaaaaaatacgagaaagaatatcacaccatgagggaacagcaggcccagcaagaagaccccatcgagcgatttgagcgggagaataggcgtctacaagaagctaacatgaggttggaacaggaaaacgatgacttagcccatgagctggtgaccagcaagattgcactacggaaggacctggataacgctgaggaaaaggcagatgctctgaataaggagctgctgatgaccaaacagaagttgattgatgcagaagaagagaaaagacggctggaagaagagtctgctcatttaaaaaaaatgtgccgtcgggaactcgacaaggcagaatctgagattaaaaaaaacagttctatcattggtgactataagcagatttgttctcagttgagtgaaagattggagaagcagcagacagccaataaggtggaaattgagaaaattcggcaaaaagtggatgactgtgagcggtgccgggaatttttcaacaaagaagggcgtgtaaaaggcataagctcaaccaaggaggttttagatgaggacacggatgaagagaaagagacgctcaagaaccagctgagagaaatggagctagaactggcacagaccaaactcccagctggtggaggccgagtgtaagatacaggactttggaacacccattttagggcttgcccttcaatgagggtgcaggcagcccaagaagacgtggtttaaccgaacactgagctccataaagacagcaaccggggttcaagggaaagagacttgctgagagcagctgccgcctcccgacaccttcagaaaacacgacaccttttgttgccttctttggccagatgtgtgattctgtgacttgtcccaggaccagaatgtacctaagtcagatccatagacgcatgttggtaggtcactggaccagagcttgtgaagcaggcaacctctggggtaagactactgatactaacaggcctgctagctcagccgacgctctggacactctagaaatcactcctcagtgtgacctcccaggcctcttccccgtgtacgtcaacacctcacccagcctaaaaggctgaagtttacatgattcagagttaggggatccttcagtctgttgattttttttctaaaccttttttttttaatatacatatatatatatatatatatatatatatatatatatatatatatatatatatatatatatatagtgggggtggggcaagggatcacaaattcaaataattcttttctgcttcaatgccagcagaaggtcccccaggtagacatggagaagcactttgttttaaataggagggtttcatagttgcatctgaagccacctggttctgttaaactgtatcgtgcaggttttgggtttggcattattcatgtttctgatcaattctatgcaactctcatagttcctgttactttttagcattagctgccaaatgacttcaaaaggctggggtgggtgacttgactgtgagactggattataacatggacaaatcttattttgcttaatgtgtttgtgtgtgtgtgtgtgtgtgtgtgtgtgtgtgtgtatgtatatatatatataaatatctttcccaatatgccccgttgacagtgtttaaattccagactaggactgctgatctgcacaatttaattatgtggttattcgagcacttaatttcactcaaggttcattgggctctgctctcctccctgccattacgggagctgtggacagagctccctcacttcaagattcctagtgtttttgcacaacaggttgtccaagtgagaaagactgagttgcgtgtctgtaaatgtctgcgcagggtgcacatgctgcgaggtctccatcctccgggcctgtccctcccagatgggctgggcctttgggccctcctcagagtatgcctgggtacaaacctcactgttcagatgggctgtaagttctcacttcaaagctatggaatggattttagcacctttaaaaaaaaaa

SEQ ID NO: 89351 - DNA, 1086 bp, Homo sapiens
cggacgcatggggagagcccggccttcggcttcttatggcattgttttgcttctagcttctggagattccagaagagcaaagaattttttttatctagaacacactgaacaggttttgaaataccttttcagcactccccctttgttttatgccacatatgtagtaaaaccaaagggaaacaatttaataaaatagccctgggatagtaatgaaataaagatataacatgattactgggtttaataagagttatcttaactttaagttatttgcccatttatagcattgttatgaattattcataaaattatgtcccacaggatatagttttgaaaaaacatatgatatactacatccagtctaacttctgtggaaagtagatcagaaaaaataagatagtcttgagagaattttattatagaagctgtctaatttgacctattttgcttgctcagtgctaaatctattgcttttttttaatctcctggcttgaaattatatttacttcaataggaaaggtaaaaacatcagtttttacttttcaaagttaattttctgaaataattgcattttaatgagcacaaaatgggtcattttatttttattatactcatcttgtttacacctatacataaacagaaaacgttaaagaagagaaaaataaaggagctaagttctgctgttgaagattatttcatccaaggcttggttttgaataactgagggaaatatctctaaatctcaagttcatcaaagcagctgcgatggaataaaattgctattttatcgagaaacctggtttggatgcttataaattccactactctcagcttcattttcctgagtacgtggtcactgaagcatcatttagacattacataaactggcatgcagataaacctatttacatagagggagaaaacagtttcaatgtcttggacaatctgttattttaatgatttacttaagaaagaaacaatctgaaagcttaccatagcttatcttttctactcacttggagattcaagctattcaatgtgagttttaaaaagttaagcacagttagtgagtgaaatggtagaatg

SEQ ID NO: 89352 - DNA, 385 bp, Homo sapiens
  misc_feature (1)...(385): n = a,t,c or g
ctggaactgagcagcaacttcaagatcatctcttccaacagattcacatgacaggtgggggaaatgtggagaatggggtatttcagagcaagaaactgaaatttaaaagaataaaaatcttaaagttaaaacaatagcaagatcacatacagtcaaaggcattgtcctaattagctcatggattcaacattaaggataaataaaattgaagaattaaatgaaaagaattaaaggatgaaaataactcaaaatgtaaaagatggatcacactcatctataaacatggcccaaaagactgtctttgatattacaagtaacaagatgacttggactcaaaaccagttatgcttattcataataatagttatcatgtacttactgtatn

SEQ ID NO: 89353 - DNA, 460 bp, Homo sapiens
aggctgccccctgcactgttgctgccctgtggctttgctctggcgaggcagaacctgtgtgtgtggatgaagggcagtgtcgcctgtagcacctggaatcccggggcttggacaggcagccagccccctgctaggagccacgtggagtgctgggaagccatcggggccgggcgcggaagggctcgctggcaccgtctggcgaggggtgcctgccacaccctggggagttagcacagagggtgcctcttgtggcagtggtgctgaagggagtcagcagccgctgacagttggggtcaccctggcctgtgcaagggacagggctccccatggcctcctggttgcctccctcagggctgatagcagcactccctggccacacgccatggcgctccctcaggcgagactgataggccagtgaggcctgcacggtggcctcagcttctggggtgcccttgctgag

SEQ ID NO: 89354 - DNA, 462 bp, Homo sapiens
ttttgcaataaaacaaacctcattttttcccctaaccccattctccctcgtacatcttctttattttaaagtgatgattattctaaattcctttctttctcccatccttccttctccaagtaagcagcagatccctcatagctaccttctaatcattgtttgtacgtcttcttgtttgatgctgttatcttaatttaaacattagtaacctgtcgctttaaccattccaagtagctctgatacgaattatagagagtagaatttcgacgtcctgtggaatgttcatcattctccttgtgcttgcagtgcatttaaaaacgaatacatgcttctgtctataggcaaccattaagtaatctatcgtcctggttaatacgtccttgtttcatcaacattattctgtgctagttactaacgcaactttttatggacgctaaactgttgggtatcttgtttcaaagg

SEQ ID NO: 89355 - DNA, 1627 bp, Homo sapiens
gaataaaactttgacaggtgttcacaaacaaatgtatgggatttctggtatgtagcaatttgagatttgtgttttgtagccattttttgaaaataaggaaaccttttacaaaaagcttttccacagcttttgacattgccttggccaaaatcagatcaatgtctgcctcaaaagtggcatgaaactgcgtggtttagaagggtcatcatttggcattagatggttgccgataagatctccatccctaggacactccacaggactcagtcttttgtttttataatgcaagagtcaacttcagccgtagtatgacagggcacatagcatttgaagaagacatggaccctatttacagaaccagggagggaaaggtgccatattcattgagactccatttctatttaatagtgtctgacatttattaaaaataaggaaaaaacctttgtacaggtagtgtattagagcagggaagggagcagggcttactgtgttgaacaaaaggcacccatcagagagacagctgcaaattcagaagaaaacaggattctaggcaaaactaactggtccacaggagaaaatgagagattcgatttggttgccaggcacacttaagccctggcagctatgtggcaggaacacaagaggtctctggggatggggaggaaatgggtctcgctgaaggtgacaggctccttgggggacggccagctgtctggatcactgtccaggggctgtgtccagctcggatacctccgaggtgagtccacatcactaggagccacagtctgttggtgagatgcggtggatggcgatggcagtggtagcgtaggtctgtgggcagaatgatgtagttggctggcagtctggaggagtggaggtgggttggcagcagcggctgtgggtggtctgtccagtatgtaacaggagcccagcttgcacctgaagtgcaggacagcgtccaaatgtgcatggaggggctgggctggcaaaagagggcggaggcagcgcgctctagagtgcggcccaggagctgcagcaggagcctggagcgctattcctggaacaaaggcaagcactacgcgggaggggacaggagcgcaggggacatcgcggcggctcgagggggagggaggcgcggagggagggcgcctgtggagaccctagcggtggccactggcacagcgaactcttcccagagcacccgcccccaggcccaagggtctcccggcctagaagtcctcgtcctcctcccatccaaagacccgcttcatctcggccaggaagccccggtaatcattgagcagggggctctccttcctgatgtaggggatcacccactgcagggctggccccgtgaggcgggtgatgaggaacgtcaccttcagggcgtcgttggagaacgtgttctcgtccacgaacatgtaggagctcgtctgcacgatgaactccgggagtcggtcggtatctccgtcaaacgtctcgggaaagggaatcgggttcctccagcgacgcgccgcgggccggaggggcccggccaggagggccttcatcagctgcacccgaccgtccatcgtgccgcgcgcgctccgaagagttacgctgggttgcgtgggggtcagcgctaagg

SEQ ID NO: 89356 - DNA, 1117 bp, Homo sapiens
ttttttttttttggaaaactccaaagccaaggttttttattactggtcaaaaggtgctcgctaacaaaacagtgttggggagaggtacattccacagctctgtaggagccccagtggggccatcctgccccaccccgccccgcctttccagtgggcattgtaaggcatttcacacattggtgttttcactttttttttttatatatataaaaacaaaaccagtcctggagtagaaagaaagaccctgtgatgaacttttaggactaaactgaaatggaaaggattggagtgtgggattttgaggggctgggtcagtggccatggtggtccagccccccatggttggcagaagccgctggaagggggcatgaggagagggaagggcacagctcacatgagggccaaactcagacaggtgcacccgttttcatcattttttcacttttacatactgtagaaatttaagcaaaatagctattttatatatatttatatatctcatatatatatatataaattaggcaaataaagagttcaggggacactgagatggggcacccctaggggcctcctaggatgaggagggatgcaaggtctctggtgcccaggtcaccagcccaggctgggccaagggtttgttcattattgctgatttggggcctgggtctcagggcggggagcacctgcaggccctgccttccagcccttcctggcctcttggggctagggagccacccaggctggctagggtgaggccagggactgctgccctcaaatccacatgggggttaccatcagtaccccctcctgcatctgtggatgggagctccagaaactctgtgctctgctgggctggggcagcccccttctgttttgggctctgtggggccttggcaggtgggggtgtgggcagctcagataccatcgaggacttgatatgttgagctacaaaattctcccaactcaaagcggtctggcttcctgatgtcttaaaaataaggggctcttgccaggacacttttgtggcaagaaagcacacttggaaagctgtctgctaagtgcggtactaaaaatatttactaaacatcatggctggaaagaaatggagatcattttt

SEQ ID NO: 89357 - DNA, 645 bp, Homo sapiens
  misc_feature (1)...(645): n = a,t,c or g
ggcacgagagcaggtggaatggtactttgccacgattctagtacagatgaaatctgatagttacttcccccaaattatgaagtctggaatttgcttaacggtagtagttaggggtctatacatatgaaaaaagactgaccatgacnnnnnnnnnnnaaccgtttaaagggtttgttaattatttattaagataaacaatttcttagcccacatattcatgtttcacagatagttcaggaacacaggtacagtgacaaacttttatgtaattcaacccaaagaaatactttatgttccaaaatcactttgtactctgagagatattagccttcctcacctcaaattctttaattcaattataatttctgtagaaatctgcatatgccttctttcttggtcaggccacagcaaacttacagagagctgcaaccccagggttataaggaatgctccaacaatatgaaatgacagatgcttggccagaaggccacacatcccaggttacaccaaggcactgagagccatggtagttattgtccttgacagggatgtcatcatcaacactaatgtctttcccggatgatggagaaaaggaccaacttgataattattgaagctcgaagatacttactatcaacttcgtcg

SEQ ID NO: 89358 - DNA, 4570 bp, Homo sapiens
agaggaagaaaatggcagagaatacaaatttgatgtttcgtcagagttactagagtggatttggcatgataacatgcagtttcttcaagacaaaaacatttttgaacatacatattttggatttatgtggcaattgtgtagttgtattcccagtacattaccagatcctaaagctgtgtccttaatgacagcaaagttaagcacttcctttgtcctagagacatttattcattctaaagaaaagcccacgatgcttcagtggattgaactgttgacgaaacagtttaataatagtcaggcagcttgtgagtggtttttagatcgtatggctgatgacgactggtggccaatgcagatactaattaagtgccctaatcaaattgtgagacagatgtttcagcgtttgtgtatccatgtgattcagaggctgagacctgtgcatgctcatctctatttgcagccaggaatggaagatgggtcagatgatatggatacctcagtagaagatattggtggtcgttcatgtgtcactcgctttgtgagaaccctgttattaattatggaacatggtgtaaaacctcacagtaaacatcttacagagtattttgccttcctttacgaatttgcaaaaatgggtgaagaagagagccaatttttgctttcattgcaagctatatctacaatggtacatttttacatgggaacaaaaggacctgaaaatcctcaagttgaagtgttatcagaggaagaaggggaagaagaagaggaggaagaagatatcctctctctggcagaagaaaaatacaggccagctgcccttgaaaagatgatagctttagttgctcttttggttgaacagtctcgatcagaaaggcatttgacattatcacagactgacatggcagcattaacaggaggaaagggatttcccttcttgtttcaacatattcgtgatggcatcaatataagacaaacttgtaatctgattttcagcctgtgtcgatacaataatcgacttgcagaacatattgtatctatgcttttcacatcaatagcaaagttgactcctgaggcagccaatcctttctttaagttgttgactatgctaatggagtttgctggtggacctccaggaatgcctccctttgcatcttatattctgcagaggatatgggaggtgattgaatacaatccttctcagtgtctagattggttggcagtgcagacaccccgaaataaactggcacacagctgggtcttacagaatatggaaaactgggtcgagcggtttcttttggctcacaattatcctagagtgaggacttctgcagcttatcttctggtgtcccttataccaagcaattcattccgtcagatgttccgggcaacaaggtctttgcacatcccaacccgtgaccttccactcagtccagacacaacagtagtcctacatcaggtctacaacgtgctccttggtttgctctcaagagccaaactttatgttgatgctgctgttcatggcactacaaagctagtgccctattttagctttatgacttactgtttaatttccaaaactgagaagctgatgttttccacatatttcatggatttgtggaaccttttccagcctaaactttctgagccagcaatagctacaaatcacaataaacaggctttgctttcattttggtacaatgtctgtgctgactgtccagagaatatccgccttattgttcagaacccagtggtaaccaagaacattgccttcaattacatccttgctgaccatgatgatcaggatgtggtgctttttaaccgtgggatgctgccagcgtaatatggcattctgaggctctgctgtgagcagtctcctgcattcacacgacaactggcttctcaccagaacatccagtgggcctttaagaatcttacaccacatgccagccaataccctgggagcagtagaagaactgtttaacctgatgcagctgtttatagctcagaggccagatatgagagaagaagaattagaagatattaaacagttcaagaaaacaaccataagttgttacttacgttgcttagatggccgctcctgctggactactttaataagtgccttcagaatactattagaatctgatgaagacagacttcttgttgtatttaatcgaggattgattctaatgacagagtctttcaacactttgcacatgatgtatcacgaagctacagcttgccatgtgactggagatttagtagaacttctgtcaatatttctttcggttttgaagtctacacgcccttatcttcagagaaaagatgtgaaacaagcattaatccagtggcaggagcgaattgaatttgcccataaactgttaactcttcttaattcctatagtcctccagaacttagaaatgcctgtatagatgtcctcaaggaacttgtacttttgagtccccatgattttcttcatactctggttccctttctacaacacaaccattgtacttaccatcacagtaatataccaatgtctcttggaccttatttcccttgtcgagaaaatatcaagctaataggagggaaaagcaatattcggcctccgcgccctgaactcaatatgtgcctcttgcccacaatggtggaaaccagtaagggcaaagatgacgtttatgatcgtatgctgctagactacttcttttcttatcatcagttcatccatctattatgccgagttgcaatcaactgtgaaaaatttactgaaacattagttaagctgagtgtcctagttgcctatgaaggtttgccacttcatcttgcactgttccccaaactttggactgagctatgccagactcagtctgctatgtcaaaaaactgcatcaagcttttgtgtgaagatcctgttttcgcagaatatattaaatgtatcctaatggatgaaagaacttttttaaacaacaacattgtctacacgttcatgacacatttccttctaaaggttcaaagtcaagtgttttctgaagcaaactgtgccaatttgatcagcactcttattacaaacttgataagccagtatcagaacctacagtctgatttctccaaccgagttgaaatttccaaagcaagtgcttctttaaatggggacctgagggcactcgctttgctcctgtcagtacacactcccaaacagttaaacccagctctaattccaactctgcaagagcttttaagcaaatgcaggacttgtctgcaacagagaaactcactccaagagcaagaagccaaagaaagaaaaactaaagatgatgaaggagcaactccaaataaaaggcggcgtgttagcagtgatgaggagcacactgtagacagctgcatcagtgacatgaaaacagaaaccagggaggtcctgaccccaacgagcacttctgacaatgagaccagagactcctcaattattgatccaggaactgagcaagatcttccttcccctgaaaatagttctgttaaagaataccgaatggaagttccatcttcgttttcagaagacatgtcaaatatcaggtcacagcatgcagaagaacagtccaacaatggtagatatgacgattgtaaagaatttaaagacctccactgttccaaggattctaccctagctgaggaagaatctgagttcccttctacttctatctctgcagttctgtctgacttagctgacttgagaagctgtgatggccaagctttgccctcccaggaccctgaggttgctttatctctcagttgtggccattccagaggactctttagtcatatgcagcaacatgacattttagataccctgtgtaggaccattgaatctacaatccatgtcgtcacaaggatatctggcaaaggaaaccaagctgcttcttgacattaggtgtagcatgtctacttttaagtccctcacccccaacccccatgctgtttgtataagttttgcttatttgtttttgtgcttcagtttgtccagtgctctctgcttgaatggcaagatagatttataggcttaattcttggtcaggcagaactccagatgaaaaaaacttgcatcttcagtatacttcctaaagggcaatcagataatggatatgttttatgtaattaagagttcactttagtggctttcatttaatatggctgtctgggaagaacagggttgcctagccctgtacaatgtaatttaaacttacagcatttttactgtgtatgatatggtgtcctctgtgccagttttgtaccttatagaggcagattgcctccgatcgctgtggttcttattatcaaaattaagtttacttgtatacggaacaaccacaagaaatttgattctgtaaagaatcctctttagctgtggcctggcagtatataaatggtgctttatttaacagaatacctgtggaggaaataaagcacacttgatgtaaaaataattgttttatttttattgacatgactgattgattgattgctattctgtgcacttaattaaactgattgtgatgacttttcataaatttacat

SEQ ID NO: 89359 - DNA, 692 bp, Homo sapiens
tttactttcataattgtaacattgaaatctttaatctggaatatgtactggcataaagagtgaggcacatacatggctttactattttccagagggccaactgcttttactgaataatccattttactcgttaattggaaacacctctagcctgtactaaatttccatatttatttggcccgtttcaaagtcctctattctctgctcatctgtccacatctaagtgctttaactattgtggctttataaaatattccaatatcccataggaccttatccttagtacttcctattttaaagttttccttgcagacaggtactttaaataccatctcacagcacccatcatgtcctatcttcaggaaataaaatctctgggtatttccaagggaagtgaaggactgacaccatgattagaaagcagagccagcaccatggcccgtccctgaagcatgtccagcaaaccctgccaggctctgcagctcctgagcaccctgccttcgggtctgccagtgtgtgggggccagaagagaaaaacaacccaggtgggaatgcctccttcccccagcaggaaagcagcttggtcatcatctgtctgaaagcaggtgctgcagcagctggcaacaaagccactctgaaaggagctgtgtgcactgcctgtctggaaggccatgccagagtccatcgttgcc

SEQ ID NO: 89360 - DNA, 3464 bp, Homo sapiens; identical to SEQ ID NO: 61676
  misc_feature (1)...(3464): n = a,t,c or g

SEQ ID NO: 89361 - DNA, 1353 bp, Homo sapiens
ttttttttttttggagacggagttttgctcttttgcccaggctggagtgaagtggcgtgatctcagctcactgcaacctctgcccccctgggctcaagtgattctcctgcctcagtctcccaagtagctgggattacaggcgcctgccaccacgcccggctaatttttgtacttttagtagagatggggtttcgctatgttgagactggtctcaaactcctgacctcaggtgatccacctgtctcagtctcccaaagtgctgggattacaggcgtgagtcactgcgcccagccagcaaatcttatgtagaatttttaaggagtggtgagtttggattgccagagagaaaagataaccattcattcattcatcaaagatttattgagtgcttactgtgtgccaggcactgttctaaagacacagcagcaaacaaaactgttatagaacaggataaggcaggtcatctcccagatacgacactttgataggaacacaaaatacaaataggagagtagaaagagatcgaaatacaaaggggaaagagctgatattggggcttatattaatattgaaaggccttacatgctagatattctaaatggggagaaacatgctgggaaagatacttgggcatgaatgaacttatgtcccctatgttcagaacagactgctttcccttctctgttggttggctcttctagcctcctaggaacttttataatcaccagtatgatccaatataaatactgcacatatgaaggttcccagttgaggagtttggaagcaaaaagggaaagaatggctggcaaaggcttcaatcttctgtctccttttatcttcccaatggctagtagaaaatactatcatcaatctcttccttgcaacaatctcccatttgatatttgtctgcattgtgactcaattcctgaaggttctgttcttcattcctttctggtagaatcacagttctaagactttggggcagatttcttaatctgaacctcaggtgtcctcatctggtaaagttgttccgaggcttaagtgcgataacccctgtaaagcgctggagaacggcaaaagctctacaagccggcagggcggttttaaatgcacgtgtatccatatactaggtctcattgatacattccgttgtttggagtttagacactggctgtaagacgtttttcttttctcctaagcaggacccgtatttgtttacctccaacgtagactaaatgcctgtgggctggtagctataagacgacccctcggccccacaacctctaagttcacttcacctccgcggctttgcaaaagcgctacacgcacgcgcaagaagcaagaggactgcaa

SEQ ID NO: 89362 - DNA, 1858 bp, Homo sapiens
  misc_feature (1)...(1858): n = a,t,c or g
tttcgtgtcaatgtgtctgtccttcactcctccattgtctgccgccactgctgctgctgctgctgctgccgctgctgctgcacgaatcgtcgcagcccccagccttgcgcgtcgtcgctacctcctcggacaggtgagaagcagcccagaaattttatgaataagcatcagaagccagtgctaacaggccagcggttcaaaactcggaaaagggatgaaaaagagaaattcgaacccacagtcttcagggatacacttgtccaggggcttaatgaggctggtgatgaccttgaagctgtagccaaatttctggactctacaggctcaagattagattatcgtcgctatgcagacacactcttcgatatcctggtggctggcagtatgcttgcccctggaggaacgcgccatagatgatggtgacaagaccaaagatgaccaaccactgtgttgttttcagcaaatgaagatcatgaaaccatccgaaactatgctcaggtcttcaataaactcatcaggagatataagtatttgggagaaggcattttgaagatgaaatgaaaaagcttctcctcttccttaaagcctttttnccgaaacagagcagacaaagttggccgatgctgtcggggattctgctgggcaatggcaccctgcccgccaccatcctcaccagtctcttcaccgacagcttaatcaaagaaggcattgcggcctcatttgctgtcaagcttttcaaagcatggatggcagaaaaagatgccaactctgttacctcgtctttgagaaaagccaacttagacaagaggctgcttgaactctttccagttaacagacagagtgtggatcattttgctaaatacttcactgacgcaggtcttaaggagctttccgacttcctccgagtccagcagtccctgggcaccaggaaggaactgcagaaggagctccaggagcgtctttctcaggaatgcccgatcaaggaggtggtgctttatgtcaaagaagaaatgaagaggaatgatcttccagaaacagcagtgattggtcttctgtggacatgtataatgaacgctgttgagtggaacaagaaggaagaacttgttgcagagcaggctctgaagcacctgaagcaatatgctcccctgctggccgtgttcagctcccaaggccagtcagagctgatcctcctccagaaggttcaggaatactgctacgacaacatccatttcatgaaagcctttcagaagattgtggttctcttttataaagctgatgttctgagcgaagaagcaatactgaaatggtataaggaagcacatgttgctaaaggcaaaagtgtttttcttgaccagatgaagaaatttgttgagtggttacaaaatgcagaagaagaatccgaatcggaaggtgaggaaaattaaatggctcaacaagcacaatacctaggttaccacacaccactttttgattgggaatgctgaaccatttgagaagagaaacttggcttctgttttcgcaaaggaaaaaaaaaataggataggcttcccttgtgcagagggagaaatggttttgtttttgttttgtttttaaatggagccctgaggcatcagctattatacttgggactctacctctcactcactatatgctaacttaaagccattcaacaaggagtcaagtagatctgaaattaaatactcaacagactcctccttttttagctgtatttttcaggtactgtgtggtgaccgccccactggtgtctattacaggccactttggtagttgtgtatctgctcatgtatgtgatttgacaaaccagttttttaaaataaatggctttttaaaaaaaaaa

SEQ ID NO: 89363 - DNA, 408 bp, Homo sapiens
gcgcttggctcctgtggaggcctgctgggaacgggacttctaaaaggaactatgtctggaacgctgtggtccaagggcatttttgctggctataagcggcgtatccggatccaaagggagcacacagctgttcttaaaatcgaaggcagtttacgcccgagatgaaacagaattctatttgcgcatgatatgcgctaatgtatataaagcaaacaacaacacagtcactcctgtcctgacaccagacaaaaccagagtcatgtggcgaaaagtaactcaggcccatggaatcagtatcatggttcgagctcaattccgaaccaatcttcctgctgatgccattggacacagaatccgaatgatgctgtgaccttcaaggatgtacactaccgaaccatcctaaatgca

SEQ ID NO: 89364 - DNA, 1708 bp, Homo sapiens; identical to SEQ ID NO: 61805

SEQ ID NO: 89365 - DNA, 457 bp, Homo sapiens
atcctggaaaccagaagaaaaatatgagacggggaatcatcgtgtgatgtgtgtgctgcctttggctgagtgtgtggagtcctgctcaggtgttaggtacagtgtgtttgatcgtggtggcttgatgtgaacccgctgttcatagctgtgactgctgctgcactcatataatcttcccttgtctactcttatcgccgggccttctctacttgtcattattcatagtttcctgtgttcgtgatgcttaatattcctcttcatcagtctgcattgatacattctttgtcccatttatttcttttcctatatattattcttgatatttttttctattttctttattttttctcttttattatctttttatctgtctttttgtccttatattctttttattatttttttttatgtttctgttttctttgttattctattatctttgttgttctattgttcg

SEQ ID NO: 89366 - DNA, 5769 bp, Homo sapiens; identical to SEQ ID NO: 61443

SEQ ID NO: 89367 - DNA, 1812 bp, Homo sapiens
ttttttttactaccatttttttttaacactggcatctgtaggtcactctccagcagttaggcaccttaactggagaccagaaaccttccagagaacacagggctgcatcccgagcaaccctctgaagaagggaattaggctttagattttgatagcaatgttccaggaatgaaatatagatgttagcccaagacaccatgacaaaatagcccagccttttgagagtaatttgggaaaagaagctgtcagaagtttctaacttacaaactggtttgaaatttttgatgcccagacagcaagtataaatcattttggaggcttacttttcatgatacaaaagcaattctgtgtgatttttttttttaagaagaaagaaaatgcaagctagttttgagaaaggaaggccaaattgggtcgggggagggtgggagtgaggaagttaaaatcactatagggagaaaaaacttttttcaagatttccaaagagatgaaattttcttaatccttttaagttttcatagtaaacagtatggcagattgggttggttgtcctacctggtctatttttaaaagtcaccttttaaagtgacattattagatacacttaaatgtttccaaggcactctctgcattacccttgtttttctctttggatactgtcctgggactaagtgtagatttctgcttcaagcacttctggcattgtgtgtttttgtatgcactccccttcatgccacttcagatgtttatttggatgtggttggggacgagagcagacaccaaggaaagggagttggagagaatgtaagtcctgacctgaaggtcttttgtgatgcatgtataggattgccctgacacacaccctcctttcttgggattataccagccatcttcctgagagttttggagccctctaggatattttttctagtaccccaccccccacccctaaagaaagaccttaatatgttaaaacagcattgcttggagaaggtgtcattgaattccgggacgagccggagcctttaaatgggtgcttccaccactacaggctcctgacacgagtaacaggcactgttgcttagaagaacacacgaagttgccgaacacagggtaaaatttccaaggcgctgatcgttgccctggccagggcctgatgagagccagtcagtacattctttttttcctacagttcttgggtttcaaacttcagtttcagggaatttcaagtcaacaacaggtagaatgaataaacttggttaccagcctaataatgtgaattgctacagaattattcttattatgtaagaaaacaaaaactttatgcagatactttagctataaattgatgtaaaatactgatttttttaaaggaaggagagaacagtatcttgttcaattattatgcaatcaatcagtaaatgtttttaaaatgatactacaggagaacacatcatggaggacctggacacaaatgcagacaagcagctgagcttcgaggagttcatcatgctgatggcgaggctaacctgggcctcccacgagaagatgcacgagggtgacgagggccctggccaccaccataagccaggcctcggggagggcaccccctaagaccacagtggccaagatcacagtggccacggccacggccacagtcatggtggccacggccacagccactaatcaggaggccaggccaccctgcctctacccaaccagggccccggggcctgttatgtcaaactgtcttggctgtggggctaggggctggggccaaataaagtctcttcctccaagtcaaaaaaaaaa

SEQ ID NO: 89368 - DNA, 970 bp, Homo sapiens
agcagctccaaccagggcagccttcctgagaagatgcaaccaatcctgcttctgctggccttcctcctgctgcccagggcagatgcaggggagatcatcgggggacatgaggccaagccccactcccgcccctacatggcttatcttatgatctgggatcagaagtctctgaagaggtgcggtggcttcctgatacaagacgacttcgtgctgacagctgctcactgttggggaagctccataaattgtcaccctggggggcacacaatatcaaaggacaggagccgacccagcagtctattcattgtaataagacccatccccgctctcagcctataatcataagaacttctccaacgacatcatgctactgcaagctggagagaaagggcaaagcggacaagagctgtgcagcccctcaggctacctagcaaccaaggcccaggtgaagccagggcagacatgcagtgtggccggctgggggcaaacggcccccctgggaaaacattcacacaccctacaaaaggtgaagatgacagtgcaggaagattgaaagtgcgaatctgacttacgccattatttcgacggaccatttagtttgtgggtgggggccccaaaaattaaaaaaactttcctttaagggggactctggagggccctcttgtgtgtaacaaggtggcccaggggcattgtctcctatggacgaaacaatggcatgcctccacgagcctgcaccaaagtctcaagctttgtacactggataaagaaaaccatgaaacgctactaactacaggaagcaaactaagcccccgctgtaatgaaacaccttctctggagccaagtccagatttacactgggagaggtgccagcaactgaataaatacctctcccagtgtaaatctggagccaagtccagatttacactgggagaggtgccagcaactgaataaatacctcttagctgagtgg

SEQ ID NO: 89369 - DNA, 368 bp, Homo sapiens
cagaggtcacagcctctagagaagggagaggggcgtgtgcatgggagtgtggctcatctcgggggccatggggcctcctgaggggcacctttgcccctgtaagggcggctacgccctgatcctgactccccaagggctcactaagacacaggccatagtgccccctcccgttcacctaccacccaagtcctcatgccctccgagggcatgggcaggaagggctactagtatgtgaacctcatcttactcgtcagaataccaaccacagaccccataagctcttgttaccctgcctccacgatcatactacctactgacacacttgctcacattaacgcatttacatcatcaaatcctattcgaacccg

SEQ ID NO: 89370 - DNA, 404 bp, Homo sapiens
ggcacgaggaatcggcagcttaggcagggaccactcggggtctggtggcggcacaggcatggcgggcgcgtgggtgcggaaagctgcggactatgtccgaagcaaggatttccgggactacctcatgagtacgcacttctggggcccagtagccaactggggtcttcccattgctgccatcactgatatgaaaagagtctccagagattatcagtcggcggatgacatttgcactatgatgctattctttgacattcgtgagatttgcccactatgtacaactcttggaactggctaatgcttggatgccacactgctgtagactttgaccagcttatttctagtatgccgtgtatctcacacgggatgactgcctcggcgtctgcgctatgactcggaaccgg

SEQ ID NO: 89371 - DNA, 1348 bp, Homo sapiens
tttcgtggaaacttgaggcttggagtccgcgggaccggaaggggctccgtagctcggggcagggtgggcgcgagagagcctagaagcccatgtagccgcgaatcccgcagccccagtacacctccctccgtgcctccccgccttttctgcagagctccgccctggagtgaaggaggagccgtcacctggagctccgaaaaaagcagaagaaggtgctttttatttagccagtgtgaccccgccagggccttctcggttgggtgagcactctctctgaccaggccatgaaaagaaaaatctgtgcgatgcctccccacatgtcacgggactctgacttgcctttgtcgtcagagtttgcagaactttgggggacctgagaggggagtgccccctggacgggccacggctgtctgtggcttaagggcttttggaagggcggagagagggaaacggcgtcctagtggcctgcttcagggccacccacgggccctcccccaacctctctctgatccaacttgtttttccagcctagttggaaacttgtggatgctgtgacctcaagaagacttggcattttatttggaagatagacatctatttgcaactgtcctgagcccctattttcctcccacctttcttggggaaacttgtttttaaggggtgccactgtttttgtaacatgttgctcctagctcttagcattcatggtactgttgtaaccgtccagcgggttcactttgtctgctagatagagccgatttatcaagacggggattacaatggagaaagagtaattcacgcagagccggctttgcagataaaactctgcaaagacaatgtctagcacttatatctccagtaactcctgtcaaggtttattgttgcttgttcatcattgcagtcctgactacaagtgtgattgcactttctattgttttgtcagaatttcctgaaaagatacaaaggcccttctgaccattggattggccttagaagagaatcatcccatcgcatttggaaatggacagacaacatggaatataataacatgcttgctatcagaggaagtggagaatgtgccttcctgaatgacaatggagtcaacagtggcagaatctacatgaacagaaaatggatttgtagcaagccaaacaattatgtctacaagttgccagtaaggtcccccttggaaactacctaagaaaagtggtaaaaaaaggcccccattcttcaaaattcaaaaagggggaattatcagcagcttcccccatgcccctggaaaaactgcaagtaacagacctgcacatgtatcccctacatttaaaataaaagttggaaaaaaaaaaaa

SEQ ID NO: 89372 - DNA, 713 bp, Homo sapiens
ggcacgagatgagaggaggtgcaaaatattactggcccttttggaaaaggaacacagtacagatcactttccatagatagccaaccaatgtgaactctgtaggccgcattccaggaactcttatgaatggctgcaattgtgagctgtcatctgtggccaaaagactgttgaaaacctgattctaaggatcctttggtggcagatatttctatgtcttgttaatggttttatttgtgtggtttgctaatgatcactgataaaatattatacattgtgaatgttaagtggtgtgtcctggtatgtgccataaatacacattttgtttggacatttatatatattttaaaccaaattctgctgctttttttacttgaagtttaagtgagaggattaagtaaatgtataccaggaggcagaactgtctcagtcttcgacctctgttgtatgaaagtctcactgaattgaagtctctaaagatggaaatttcttacttgaatctctgtttcttggaagctgacatttatctggtaaattgtgaaggtaacttttgctcttgcaggtttacagctggaggccgaatcccatacatagatactatccctatgccttatctacacgtttaagaagcggtcctaactggaggagctacgtaccaatactcctaccaattggcattaaccgtgccaataatctgccttcgcccttaaaacccc

SEQ ID NO: 89373 - DNA, 4879 bp, Homo sapiens
ttttttttttttcctggtgcagccagattgttctaacttttgaacaaatgagcgtggtcagtaatgtacaataactcttgagtctgttactttggcctagctaagcccatctggccctcgggcatcctgcaagatgacagacagaagagcaagggcactatcagaaatggaacaggctgccccctactcctcccagcctctaccagtacacagagacagactggagatagagcattcgcagccagttggcatcttggttcttttgtcttctgaaaataaaaataagtgcttgtcttgtctttggaggtcaaagagaaccgcactaatttatttcctcgaggggggcttttctgggagggagaggatcctcagtcctgttgcccaaggtttcacgctgtttgggccacacggcagggcttttcttctgggatctggtctgcacgtccagagatgatggaggaattgcatcagcatcatatgcacagtgaaagggtggctcttgtccagagaggcccattcccgggcctggctacatggcctcagggcctggcggcagtttgaagagtctggctgcagataggagctttccttatgtgtctctcctctgtgatgcccggcctcctgaaggcaagtgtgagacagagaaggcacttggctcaagtgtgctgaagcccgcggtggagagggtgccggcgtacatgggcagaccgatggaaatgagccaatctgacacagaccgaaatgcacccaggagagacgggctttcggcagatttccgtgagtccaccacttggaatcgccatgcggtgctgcttccgaagctgcttcacccggatctggtccatgttggcggcgacgtcccgctcgggctgatccaagtcctctgcgtatctctgcaccagggcttcaaggaaatcccacagcggccatgccttaatcaagaatacggctccctccgtgaagatcgaatgccttcagcgtgcaagcttgttttcagtgagcgtttctagatccactccccgggcacaggagaccttccctggtcaaagccgggcccagcttcacaccgtgctcctggaggcttgtgttctcggggagctctgagagccaggggggcggccttgtgcttggtgggctgccaagcgcctgccctgagagaggcctgggagccagtgctgggggacagtcgctagggctggtggggctggcggggctgccccttttcactggcaggcatggcgcatcgggactggggagggccccactggggcccatgggaacagggtggagtccgttagcaaggcgttctctgctctttttggcaggaacaggtggaggctgtgatggaattttgggctgcattctctgctcagcatctaccccttctttggtgcccaggggatggtgtgttccttcaaactcgtgtccttttctgtggccctccagaggcgtccttgctaaaccgtgtttagctccaggaggctgagcatcatagtttctgggcaaacactgagggggtgacaggccgcgaccagaggctgcgattgagccctccagtttcttagttgtcaatttctgaggttcagaaaatctcttgctttgggtcagtagcaatgcattgtcgacagcagagtcttgctccaggggctgggccttcgtggaagaggcggtcgtcttctgtggcacttcaggtacaatctgagggggcggttctgtcacctcggtaggcacgtcttgctcagcaccaggctccacttgaaggtcatccagggaatgggatcggggccaagtgtccacagtctgggggccctcccagggtctcaacagctccggcaagatggaaaactgggaggcttccttcggtttttaattcaaaaccagtcaacacccaggtgggtcacagctcttggacgtgtcctggggcaaggccaccacccagcctgccctcctcctgtccctgcttcagtgcatcccctgatttcattaaaggcaatgttgggtaattgcccaactggtttctgctaaaagccttcaagctgggctcggtggatgacttggcagataggaggctagctttccgagtcttgccgttttccaggttctcactgctttcgtagcatcatgagtctcggggtgagcatccactcaggccctggctgtcaacgagcagcttctcctgggatcctgactggtcgctgttactgtcatactcttgtaacagctccactgctgtcaagagatcagctctgtgctccgggtccctgatatttaactcatccaagtcttcctcctccagcagcttaaaggtgtccaaatcttcatatccattgaacaggaaagtgggcatgtgctcttttaggttaatccgatccaggagatcctccacagacttgggctggggtggtcgtcctttccgacgcctcctggtggggcgtttgggtttctcctccgtcttcactgagcacgtccacgtagatgaaattgaacgtgccgactttgttgttcagcaggcccatccaggtccccatgggtggcttgctgattatatcgatgatatctcctttcttgagcttgagtgagtctgtgtcatagggactgggggtgaagtcggtgtgcaccctggcacgcccgcagaacgggcctcggtaaggcggctcttcgtcatccccatcttccgacttgacgctttcccggttgctggttgaggaatcagtggtgctcactgtttgaccgctcatggagctctgcccactgagagaactgcgaagactttctacagaacccccggccttgagcttgggcttgtccaagtgttcggggtcgggctgtgaaggcggaggggagccaggcattccatcaaggcccgagtcctgctcagagacagagctgctgtattttttagacattctctttctcatcgtctctttcactgatttcacctttttcccaagagagatgcgagaggcagtaggtgatttgatgacttctttgtacacaaagtctccttctttacccattgggtcagaattattactgccaacgtgcagagagcgattcgtcaagtcaaatcctccaaaactgcaggttctcccgtggcttagggacccgagacccttcttcatctccccctcggtgagggagcgggacactttctgggccttttcttcttctgggtaggagaagaatgtccccatcttcttggggggcttaatcaggccccggctctctcctttgctgaaggttttgaccaacttccggccagccccccaggtgtccaggctgctggaggatggagacgtggtgagagagtctgagtcatcttcgggaggtttctcaggagagccatcaaagaaaaggggcttcttgtgcacgccagagtagagggcggaccgttcatccaggaccggcgaattctcaaacacgtgctcctccccaccttcagtgtctgggttttttcatttcttccaccctaattagtttctttctgactctgcgagtggagtttaccagcttgtgtaacctcttaaacttcaccgactcctcagtctcatcatccgattgttctcttgaattgcagtttgatgagccatcaaacgttgggtaagaaccatctggccagtcagcagggtccagggcagccgactgccggtgctgggcctcgtattccttgagcctagcaagtgcttcctcaattgtgatcatcttttctttgaccatcatcattagctgaatccgctcctcatcgctcatcgttatttcactggcaacataaccaacgtcttctccttttgaagtctgtctcattattcctttctggttctttcggaagttctgccagaaatacttatttttcttcttccagtctccttttcctacagagctgtcttctgagtttgatttatgaagagggttctttctttccacttctggggttgacacggcgctacagaagccaagcgactcttcgatctgggaccgcagctgaagtgacgtggggctagcatcgggtttctccacttccaggtcctgggaaacccgccgtttccgcagctcctccatcctctcgcacacgtcggagaaacaggtgttgtaataatctgcatactgctgcgccaggtcatcgatgtttcccagtgaaccgtccaggatacccatcacgtcggtccagagtcgggagaacgcctcggatgtgccagcacccggcttgggctccggttccggctccggcgcgggctcgggctccggctcgggctcgggctcaggctccggccccgggccagctgctcccgcgtcctccatggccgtgtcccgcgcgcgggccgtgcgtcccagtccccgcggcgccctcgccccgcacccgcgcgcagcctgcccggatgccgggtccccgcccgcggcgtcaccgagccgcgcccccgcgctgcatgccccggcggccccggccaccccgcgggggcccttcgcaggcgcccgcacctcgggtctaggtggccacgggctgcgcgactgacaactccagaaactttcccaccccgctcggcgcagcaacagggtagcaggaggcaaagtccgcaccactgagttgtacggcggggaattcgctcggcccagaagcaattaaacccactgcaaaggcgtttcttcctgtgacgggaaccaactaactaaggcacgcgactcgttccttctagcaagtcttggcaggacccggcaggggtggccgcggagcctctagatcttggagggagctccccgggacccctctcttcaaaatgagctcttccagctccacatgactctctccctcgaggctaaagaaagcgtttagcaacaaaaggtgctctgatgtcaggctctttgcatggaaatgagcctcgga

SEQ ID NO: 89374 - DNA, 1727 bp, Homo sapiens; identical to SEQ ID NO: 61505
  misc_feature (1)...(1727): n = a,t,c or g

SEQ ID NO: 89375 - DNA, 5127 bp, Homo sapiens; identical to SEQ ID NO: 61678

SEQ ID NO: 89376 - DNA, 4791 bp, Homo sapiens; identical to SEQ ID NO: 61449

SEQ ID NO: 89377 - DNA, 401 bp, Homo sapiens
  misc_feature (1)...(401): n = a,t,c or g
cccacgcgtccgcccacgcgtccgctccattaaaaatatagaatatttccatcatctcctaaaagttatcttgtagtcctttgcagtcaaccccctctgttaatcgccttgcaaacactgatcagttttctgtccctaaagtcttacaagatgtcctataaatgaaatcacacagtacatagctttttgagtttggcttcttttactcagcataatgtgtttaagagacatccacactgtggtgtgcgtcagtagttcatttccttttattgctgagcagtattctataatatggttgaaaccacagtttatttaaccattcacttgttcaaggacatcagagttgtatctagtttttaatctattattagtgaaaatgctatanacattcatgtagaagt

SEQ ID NO: 89378 - DNA, 914 bp, Homo sapiens
ttttttttttttgacaggaactgtttttattccaaccacctcacctccttagaatgggaggcgaacagtgaaatagtgcatttatcttaaaagtgaaataattccaggatggtagggcgagaccctgtgatgggtgaatttacctcacttgataccaagggcccttaatactcggggaagtgggactttgtcgacaaagccaggacaatccccctacccccaccccacccagcagtgattaaaaacccgtacggtcactttctatgtgatggctgtctccctctcaccagactgcatagcggttgcagatgaacatttggcacctagatgggggtcaaggagctggggctgtgattcagggaagatgctgaggggggactggggagtctctgtttgaatcttgaagcaaggggtgaaggtgtggggtgtgtgtaggggagctgacactgaagtctttcaggaagcagatggtaagggtcagggggtgtgtgtctatgctggggtgagggtcctgtggtgttgctggtgatgctgactgccttgcccaccccaagttggactaggagagtcctatcaggctgctgggcagggagggcaaaggagagcaccattctgcgggtagggcaggaagggtggcctccccaccctgggtgcctgcagagcctggcagccccgccctgtggccatccgatgccacatgtcctctagagttcctgggccggctgctccacagcctgctcctccacaggctgcatggcctcctgcacgtagacgatgaactccgaggcctccccgccctgcgtgtagacagtcaccgtctcaatgccctccacgtcgtcggaggacaccaccaggtggtgctgctcggcaagctccacggacgcttgctggaccgtctcctgcccacgcgtccg

SEQ ID NO: 89379 - DNA, 5553 bp, Homo sapiens; identical to SEQ ID NO: 61468

SEQ ID NO: 89380 - DNA, 3880 bp, Homo sapiens
ttagaaggataggggaagagattaagtaattgcagtttaacatgaaaaatgcacatgtgatagaatggagcacaatggaggattcataaaacatgctcatcagaaaaatctgttaagtcgactttgtccagattcagaaagagtaagtttatcaacatctggcatccctcatactttgtgaagatagatcttctactgcttaattatgagaaattattttattcaaagaaaggagctcttaatcttttgataaaacaaaataaaggagtagagagctgactagatgtcaagtgcttgctagaaatgatttttaaaatgcttctacacgtaaaatgtactgacaaattttggtaaaccatttaaaaataagaattagttttaaaatcttggagaaaatgcctttttgcccacatttaaaactgaaaatcaattttactatagataggagttctgtggagtgtacaaaattccttttagagatcaaatggccatcccagatagatatcatgtttcacaggcattacttttagtcaccctcaagtttcagccatgggaccaaaatttagtgttctgtgccatgtggtcacagggtcattggtttcacatcatggcttaagaaaatactggcattttgtttcttacgaagtaagtcctaccttgtgcatacaagcaaaaagaaaaaggaagaaaacaggggagggaaaggcgcaagaagctttttttgtttgtttgttttgaagacaacagattgaaggcaaaagaacacagagctttcacaagctcaaagaaaaatatttgctggctgatcgctgatttgtatgcactataaaacaattccataaataaaaccaatatatcatttcttaatcatgaccctatcaaaaccaagttatttcctaactattctttcaatgtcaaatgtaccctagagttgacgtttcatttttaagggttacagctacctcataggaactgaactagatgtactcttaccctttctctgaagtataacagtacaccactgcacaacagtatccaatttgaagactaatggtaaagaaaattcttcaggaaaaactgaaaatccatcaagctgaaaatctaaaattagttctactttctaatgaaaaatacataaaagtgcatcatcagaataagtaattcttatgccagtttgtattgcaaattttccaaacaatgcatcaaacataaacccaatccagatgtcaattatgaatacaaatatagcttgaggttgttttttttaaaggcagtaatttttgaaatagttaatgcaactgttgctaacacaataataatagtactcctggcttcacatactaacctggacttccgatcaagtgctgattagcccagtaagggaggtcaccaaaaaacccaaatccatttcagtcatgtctagtcttgtaccctccattctccttttttagcatttgaagacaacaggttgagttggcagatattgtttatggacccctgaggttgtttttaccgattcaatctcagttttattgaattcttgataacaggaataggatttgcagggagagcagggatatcagaaaggtctgtactggatgttttctgagaggccaacagagaagccgctgtctgaatagtttctgattgagttgtacttgtctctgtatcaagttgttcctttgcttctgttttatcatgtccactcaaagcaagacagttagcatcttcacttgtttcatcctcttctgttttggttttcttgggactctcttctttatgaggtgaggatgtcctcttgactcctactataggagtaggtatttttgttgctgcatttcctgaagttgctgcatttcctgaagatctaggtggtgggtttaccagacgtgttgaagaaacaactctggagaccgtaggctttggtggtggagaaatggctggttgtgtggcagtttgaggaatgctttcactcgatgtaccccctgagctttcactggaatttacttgtggcacagaaacttcagtagcctgtatgttggtcacagatgctgctgttacagctggagcaggactgtttctgccctgagagctgccagaactgttcaatggactggtcttcgtagcactagtaggtgaaggcacagacatgctgttatcactgtccatagacaagtcgaggctgctgtcattgagagctgtcaatttgacaccttctgttgaatgctttttctttttctgaagcacatgattaggtagtagttgatggagttgctttctttttacatgcattgcagcaattttcatatccacctcaaacatcttgctgtttattgcttgcctataaactgtatctgtgaaagactgaatatcataggtgagatcaacactgaggttttcagagttttctgtttttttaaacactaacccaatcacccacatcgtgcgaaattcttccttgtcgggattttctttgggtgctggaaatgactggggattcacatgagccagtgtaataaattcattcttctccaagcttccaaccaggattcggatttttgattccaccaagcccacccattccaggcgttgattttctgttggtgcacttgctagaagtacaatataatgcttgtacttttgaaagaagtttggagcttcaaaaagtttggaccactctgccttactcagcaaaatttcatctgtgatagcaagaccttgtttaaactcctcaaccatgaccatccgtgttgaaacggacacattgtacgtggagttctgttgtgggtatgctggtgtaattataggcataagatggtacctatcactggggtttacccttgggtcccatacaggcaaattaagattgcattcttcaggctgtttcaatagcactggatttggccattcccatttagaaaataccaagaaaaatttatgtacaagagttgatgctattgcatttggataaagctggcaagttcttgctactagcatagcccaggaaacaccaccgaggaaacctaatatattggaatagatgttgtggcgtttggcccatagtttgatagctctcagagttaacctgaagttgtcaatgtttggtactagatgtaaaatttcatcggttaccctgcaaccgttaagacttcttatacatcttatatctaaattttttagcagactgtcatctcgtagatccaaatcttcaggaattgtctgcagtgctaatcttgcaaacaaaatatcaatctctatcccatcaaaacagagtttaataactggtacgaatgcctcttcaacagctcttaaatcttttacttcttcctgtaatttcaacttatcatagaatgaaggtgaaaaagtcacttcgatcaacatgtcttggtgcaaacacacaaacgccatcaatatcagcaccttttgtatgcacttccctaatctgtaagatcccaaaatgtaaaaatttttcctccaaacattttccaattacagattgtggaagattcttggcttttcactgatttcttcgtatccactcttttaccaggtttatttagtttttcccaaaattaaaattcctgcggctggcagttccctcttccttcttcaaaaaccccccaaagggtttcaatgtctccaattagttttctgtgtaagtacgcagtcagtctccttgggggctgctaagctgataggagaagtaatgccatagtgcttctgtggcggttgtgtttgttgtgatccctgtgttgtaactggaaacggcatcgtctccggcgccgcaccgcccagtcacttcccccccgcaatcgccgcctgccgccctggtatgatccactgaggcgggagggaggggggggcctgcctcagcctcgtc

SEQ ID NO: 89381 - DNA, 1089 bp, Homo sapiens; identical to SEQ ID NO: 61613

SEQ ID NO: 89382 - DNA, 1155 bp, Homo sapiens
gcggccgcggagcggaacaaggatcccatcttgcacgtgctgcggcagtacctggatccggcccagcgtggcgtccgcgtcctcgaggtggcttcgggacacagccctcctggaggacctgggaaaggccagtggcctgctcctggagaggatggtggacatgccagccaacaacaaatgcctgatcttccggaaaaactaagcccctccttcacccccgcacgcagcgcacttcgcgcgggcctttcccctggccgagtggcagccgtcggacgtggaccagcgctgcctggacagcatcgcggccaccacgcaagcccagggcctgaccaacgtgaaggccccgctacacctggacgtgacgtggggctgggagcactggggcgggatcctgccacagtcgctggacctgttgctctgcatcaacatggcccatgtcagccccctgcgctgcacggaggggctcttcagagcagcaggacacctgctcaaacccagggccctgctcatcacctacgggccctatgccatcaatgggaagatctccccccagagcaacgtggactttgacctgatgctcaggatgcaggaacccagaaatgggggctttcgggacacagccctcctggaggacctgcggaaacgccagtggcctgctcctgggagaggatggtggacatgccagccaacaacaaatgcctgatcttccggaaaaactaagcccctccttcacccccgcacacctgcactccctgccggaggctctgtgaggcacgaaccctgcctccctaggccggaccttgtggacgacagccccacccagtctgtgctttcagccgctggccgaagggcccagcctgctcagaataaagcatgtcctgctgccggaaaaaaaaaaggatgccagagatgggagaagggattcagtctctcgcccgggaaacccagtcccacagagggcgccggcaagggtgggacgcgacctgggtgacacggtgcagggagtctttaaatagaggaggggctggagcggggaaacgcgccggggccctagcgcaccatgtattccttgcgcttattgagccgaacttggcagaaagagaagcctccgaggaggaggtaaaggcctgcagcgatgaaccagttgtagctgac

SEQ ID NO: 89383 - DNA, 781 bp, Homo sapiens
cagtgctatacatctgaattgaaaaacaaaattggtttttgagaggatctaaattcagtattaagcatatactcatggagagcctaaatggccacctggtccttccaaagtccttcaagctttcattgttaaaagttctgtatgccatcactcatcataggagggataaactgatccaggttacatttttaaagtatttattggtatggggactattctaaattgctaaaatggttgactaatatttgggtggtcaaactcataatcctgggaagacaatcaaaacttcaggtacatttctgctacctgatgggccatttaaacatttatagagaaatttcattcaactgtcatttttaatgcgtattttctggttatatgaaagctttctcatacaaaaatctgatggctgtaatagtagctaaaacattattagaaagtgtgtttccctcatgggacattcctagaaaaatctctagcaataaaaggcacttgattcactggacaagttgtaaaacaaataaggtatttcagatacaatagcattaggcaaaggtaactgattcaactagattgtcttattcaaaagtattacagtggatacagtggataatcagatccacttccaggggaaaacgtaagttggcctttctaaaatagtcggtagagggcccatatccctaataacaaaacctcatttactttctggtctgaaactctgatatgactaaatgctacaaggctttaatacatcatgccaaagtatactttcgctagattt

SEQ ID NO: 89384 - DNA, 766 bp, Homo sapiens
accatattgcttcactgtactatttcaagtcagctcctctgtagccgacctctatatggtgcttggtaaagctattcaatgaaatttagtaccgggaggaaattaggcagcaaaagctccaccttttttttggtggcatattcttcaagtaaattcttaactgtctttgctaaatgcaaagctacatggggttagattatataaatatgacaaatagaacatttcttagtatattcgccatggagtaacctcttaaaaaatctgataaacaattttggcatttattcacctttctcccaagtggaattacaaacatttgaacttgatggactttcataattatctgatactagccatataaccttgaagaagcttctaagcctctctgtgcctcagtttctgcatctgtaaagatgataaccccaccttataggggaaatgcaaagattaaatgtgtcactgcacgtgagacaggtacatgcggagcactcagtgcttgttgattcttacgatgttacgttcaccattatggatattattcaaactgagactgtctgtgacaattactgttcagagttgtacagttgatttaggcagcaagtcttctggttcttaatccagtggtgtttttgtgcaattcagaagacatgtatgttgttcccagtaatgacttggtgtgtttgctgaggtagttcggtaggactgctagagctagccatgaaagcataatatattttcacagagttgagctcagttttcttctaga

SEQ ID NO: 89385 - DNA, 4165 bp, Homo sapiens
ttttttttttttatcattatattcttttatttatagactctgagagcaaggacccaagcacagcctggtgctcttggatagagaagaaagcagctattgtccacactcagaggttgctgaggtgccctcccccactgatctggaatgatctacactgctagtgaagaggagggatggcaagctgactaaataagaaggcagggaaagaaagtccgctttagttctgagggctgtgacattagatgagagtggagccctgggcatgtcagccagccttctgtgtaacgcccgcccaggtcccattgtgtctgttctcttggtcctccactgttgcccacatcttcctccaggctgcttaagtgcccctcctggagtgcatgagtaggtcgcgttgcagcccagcctccaggctggaggtcagtctggctgtgggagggtcggtcagcagagtcaatttgttgaaaacacctctgccaaagtagtcagcaatcacagaaaagctgtcattggagcacttgagctgatgctggaattgatcatggagatctcgtttctgttcctgggcccggatcatatccatgaccttccggttttcagggaggcaggtggggcagtcagcatcactttccgagtaactctcaaagcagtgttggtggaaggagtggccacacaggaagtggactgagggcaactccaaggcactgttacagatgctgcacttggtcttttggaaaatcttaggatccccaaccccccgccgctcctttccccgtttctccagcagagggcgcaggcccaaaggttccgccgaccccgccccagcctggccccgccccgccccggcgtaggggcggggaagacgggcacagaaacctggccgcggctttccgggagctgtgggcacgcgagctgctcgaagccggtggcccggggatcgtcgctgcccagtccggccgcggccggccgcttccccgagcttaccagtaagccggtccgcctccgggacgcgccccgcccgccccgggctcgcgcgctctgaaggggcgcgtcccgcgcactcccggcgccgcccactcccctccccacggccgctcctccctccgcccggatagccggcggcggcggcggcggcggcggcggcggcggcggcggcggccgggagaggcccctccttcacgccctgcttctctccctcgctcgcagtcgagccgagccggcggacccgcctgggctccgaccctgcccaggccatggccggcaacgtgaagaagagctctggggccgggggcggcagcggctccgggggctcgggttcgggtggcctgattgggctcatgaaggacgccttccagccgcaccaccaccaccaccaccacctcagcccccacccgccggggacggtggacaagaagatggtggagaagtgctggaagctcatggacaaggtggtgcggttgtgtcagaacccaaagctggcgctaaagaatagcccaccttatatcttagacctgctaccagatacctaccagcatctccgtactatcttgtcaagatatgaggggaagatggagacacttggagaaaatgagtattttagggtgtttatggagaatttgatgaagaaaactaagcaaaccataagcctcttcaaggagggaaaagaaagaatgtatgaggagaattctcagcctaggcgaaacctaaccaaactgtccctcatcttcagccacatgctggcagaactaaaaggaatctttccaagtggactctttcagggagacacatttcggattactaaagcagatgctgcggaattttggagaaaagcttttggggaaaagacaatagtcccttggaagagctttcgacaggctctacatgaagtgcatcccatcagttctgggctggaggccatggctctgaaatccactattgatctgacctgcaatgattatatttcggtttttgaatttgacatctttacccgactctttcagccctggtcctctttgctcaggaattggaacagccttgctgtaactcatcctggctacatggcttttttgacgtatgacgaagtgaaagctcggctccagaaattcattcacaaacctggcagttatatcttccggctgagctgtactcgtctgggtcagtgggctattgggtatgttactgctgatgggaacattctccagacaatccctcacaataaacctctcttccaagcactgattgatggcttcagggaaggcttctatttgtttcctgatggacgaaatcagaatcctgatctgactggcttatgtgaaccaactccccaagaccatatcaaagtgacccaggaacaatatgaattatactgtgagatgggctccacattccaactatgtaaaatatgtgctgaaaatgataaggatgtaaagattgagccctgtggacacctcatgtgcacatcctgtcttacatcctggcaggaatcagaaggtcagggctgtcctttctgccgatgtgaaattaaaggtactgaacccatcgtggtagatccgtttgatcctagagggagtggcagcctgttgaggcaaggagcagagggagctccctccccaaattatgatgatgatgatgatgaacgagctgatgatactctcttcatgatgaaggaattggctggtgccaaggtggaacggccgccttctccattctccatggccccacaagcttcccttcccccggtgccaccacgacttgaccttctgccgcagcgagtatgtgttccctcaagtgcttctgctcttggaactgcttctaaggctgcttctggctcccttcataaagacaaaccattgccagtacctcccacacttcgagatcttccaccaccaccgcctccagaccggccatattctgttggagcagaatcccgacctcaaagacgccccttgccttgtacaccaggcgactgtccctccagagacaaactgccccctgtcccctctagccgccttggagactcatggctgccccggccaatccccaaagtaccagtatctgccccaagttccagtgatccctggacaggaagagaattaaccaaccggcactcacttccattttcattgccctcacaaatggagcccagaccagatgtgcctaggctcggaagcacgttcagtctggatacctccatgagtatgaatagcagcccattagtaggtccagagtgtgaccaccccaaaatcaaaccttcctcatctgccaatgccatttattctctggctgccagacctcttcctgtgccaaaactgccacctggggagcaatgtgagggtgaagaggacacagagtacatgactccctcttccaggcctctacggcctttggatacatcccagagttcacgagcatgtgattgcgaccagcagattgatagctgtacgtatgaagcaatgtataatattcagtcccaggcgccatctatcaccgagagcagcacctttggtgaagggaatttggccgcagcccatgccaacactggtcccgaggagtcagaaaatgaggatgatgggtatgatgtcccaaagccacctgtgccggccgtgctggcccgccgaactctctcagatatctcaaatgcgagctcttccttggtctgtttgtcctggaaagggatccctaaccacaaaatgtcactgaaggttcccaagttcccgagaggcctccaaaaccattcccgcggagaatcaactctgaacggaaagctggcagctgtcagcaaggtagtggtcctgccgcctctgctgccaccgccctcacctcagctctccagtgagatcgagaacctcatgagtcaggggtactcctaccaggacatccagaaagctttggtcattgcccagaacaacatcgagatggccaaaaacatcctccgggaatttgtttccatttcttctcctgcccatgtagctacctagcacaccatctccctgctgcaggtttagaggaccagtgagttgggagttattactcaagtggcacctagaagggcaggagttcctttggtgacttcacagtgaagtcttgccctctctgtgggatatcacatcagtggttccaagatttcaaagtggtgaaatgaaaatggagcagctagtatgttttatta

SEQ ID NO: 89386 - DNA, 4045 bp, Homo sapiens
gcgcagtgacgccgacccatccaacggtcatcgcatgcgcgtgccccgcgcaggccccaaacccccacggattaggttgaaggtcagacaaaaaatcccggacccatacgtccggttccttaaggccttgcccacacgcagcggctggccccgcggtgggagtggggacggggctttcgaatgggggccccgggaagagtcttggcagggatgaggaaagaacccgttctagaaagcatctgggtaacaccaaaatgtattactaccctaaatcgccatgaactggagccctttcccggctaactcccacaaagatttctgttctcaagccaacatggaaacaactagacgggacacagcaccgggcagttttatgtactgacttcctttaagcgttatctaataaaaagtgtgttatctaataaaagttccacacagtatttaaccgtcttaattcatctagggtagcaggggatataacagaactgctgggttccacaggaggttgaggggccaggatccccaacactagatatcttccttagcggggagaaagctggaaattacaagatgactcaacggagaaatgggcttcagtgggtaactttcagaaaattataaacccatatcagtgcacatagcgagggaaaggggagtttacttgaggtttgggttactgtgagcagactacttggggtgactagtattggcatcagaaccagaaatccaggcgctcagggcagccctgcaggtggggtgggtctccaggctgctccatactcagcgcctgtgttcctctccattcttcgggatccatcagacatactccattgagtacccccatcccacccccttttcagcttcacaggtttcacaagaaatttctcaccaccttgtttaaaaataaaaataattccagcctcttggacatagcttcttctaggtaaacggtcttcttttttttttttttgtttccttctgcctcataaaagaaggggatttcccctgtctgggtttttagacagaacactagcagtctgccagagtgtcaaagatgttctccctgggggattacactggcgcctacagggtggcaggatccgtggagtccagccattagttggtgtcccatgcctgcaagccctcatcattccccaaagccctgctgagagctgcttggtcgtgtccctccatcagaggaaccagaactgctaaagtgaaaggtgtcttataaaattcatcatctcgacgttggtaaaatagcacataagctgctttagtcaactatctgatcctcagaggccaggggacacgttggctatcatcaaagtaataccattttaccattcagtttggttcttcgcatatgccagtgtagtgggccaacccccatgggctccataaatgattggacacggcaatgagggtcgtacacattaaggccttgctgaccaggttacagaccaacctcggacctgttcagccctctgattgggaattctacgactgtgtcgagcttatccctccagtatctgttgtaggagaaacgtttgaggtggaccaccaggatcttgggcaaggaccataggtcaaacttttttgtggcctggtgatgctttcttacagttgggacagtaccaggggtcatgctccccaagggtctccatggtggtgaagagctcgatgcagtctctcagggccactgtggtcttcttcttcttctgaggctgcaacatgctcacatgcttctcgtaggcctcagattcttgctcatcatagtaaagtctccgagtttcactgtcccaatccatggccagtgtagatcgagagttgagtttaagtagttttccatcagctgcaagtgaatttatgtcagctgttccataggagttcacaagactgaaggtaaaaagcctttttgggcagggctggcctttggaacttccttttgggtggtctcaactggggtcaattccctggctcatctttcccccactgccttctgtttctgaaaagctgctctttgccttcttccctgatgctcccatttcttcctcatcttctccttcacagctgttccctggagccattgcaggcccctggctccaagggtgagctgccaaactcatcaggtaaaggctgtttcacatagcggctgatacgatcacaaacagcctggtacaaagactcaagggttaacttgtgcttggggacagaaagcaatagtggctgcccatatagcgctgatgcggaggaagtgcttgatggcctggacttcctctccctgaagtagactggaagcgtgacacattccgagccatccacggaagtgctgcagacctcgtacacgaaaatgtcatcccgaggcatgatgtggtttaaaccttcatccatttggaaaattttgtggaatcggtgattatacacatctgcgaccaccatattttctgcagcaatgccagacagcctggagagagcctcgcacaggtcggacacagcccccatcagcggcacagtcacacggtactgagtaggtctgcagtgagggtcagcaggaaccaggaaaacctccataactcgatctttcttcaagggcagtggcagcgttagatagcaaaatgggtcaaaggtcacagaaaccttagcacattctgggcaaaccaaagtagatttgaagaggccatggaaagtatccacaatcacagaatcattcctcaacctgtgattctcccaggcttcctttgccaccaccgcatctggccgcccattggcatccttcagctccaagtagggctttttctttacccggttcagatctttcatgcaatccatctagaagaaaggccagcagctcctgagaatcttgttgctggtagccagaaaattgaggagcaaaacgtcctacttgagttttgaacatgcgagggtgccacatgggcgtcccttcccagacccacatctgcttaatgagttcagcataggcttctgcaatttcccctttcatccccagagggttgtctctgttgatttcggcttcatactcatctttgagaaagtagtcagtcagtggtgcagtgttgctcaaacactgcaaagcggagttcatgaagcaggtgtttcccaggtttccaagtccacagagcccaggttgtatatgagaggatggtggctcctgacaattatacgaagcagaaaagccagatccacccctgctgacaccggaactgtgcatcccacaggtgctagtgctatcaccatttgcaatgagagaggcagacactgaggaatagggacttgctgatgattttggagaggtagtaaaatttctgctaggcgcagtgcttgattttgactgcaaggtctgcctgggccatgtgccatcttcattttgaggctcaattactagcacctgaccctggtatagcccagcatcctggacagtgttgtctagcttgctcaactgctcgtaggtgttgctcatgtatttgttccagagccgtgtttcacgctccgcagggatgttgaatagcttccgcatctctttctcgatggttgcaatggtgtctgccttgctgaaatggcaactcagcacattggtggggtcactgttctcacagagcttcagttccagcaaatacacctcgactttgcagtgcttgacaaacaggccatgctccacaacttttctgacgatgggttgctggccttctacacagccgtaccagtttagtagtttattccacgcctcggtagggaccaatacatagtccaattcatcaattaagtgttctttcaaggtctgactctcaggatctgaaaatagcccagagttgtctattgggccaggaaataggttatgttcacccacattgtacatgtcccagctgtcaaagcccacatacttcttccactgcttgaaccaccggctgtcaataagataccactgcgccccgcgttggagtgtggtcctcattaagggtccaagctcggacttctgagtctccgcatccggtcgctcacggcagcctccaccttccgccatctc

SEQ ID NO: 89387 - DNA, 3074 bp, Homo sapiens
cggacgcgtgggggacgccatttccagcggttgctggttctgacgggttgtagtctgccaggacaatgagttatgactaccatcagaactggggccgtgatgggggtccccgcagctccggtgggggctatggaggggggccagcagggggtcatggaggtaaccgaggctccggaggaggcggcggcggcggagggggtggtcgaggcggcaggggccggcatcccgggcacctgaaaggccgcgaaatcggcatgtggtacgcgaaaaaacaggggcagaagaacaaggaagcggagaggcaagagagagctgtagtacacatggatgaacgacgagaagaacaaattgtacagttactgaattctgttcaagcgaagaatgataaagagtcagaagcacagatatcctggtttgctcctgaggatcatggatacggtactgaagtttctactaagaacacaccatgctcagagaacaaacttgacatccaggaaaagaagttgataaatcaagaaaaaaaaatgtttagaatcaggaacagatcatatattgaccgagattctgagtatctcttgcaagaaaatgaaccagatggaactttagaccaaaaattattggaagatttacaaaagaaaaaaaatgaccttcggtatattgaaatgcagcatttcagagaaaagctgccttcgtatggaatgcaaaaggaattggtaaatttaattgataaccatcaggtaacagtaataagtggtgaaactggttgtggcaaaaccactcaagttactcagttcattttggataactacattgaaagaggaaaaggatctgcttgcagaatagtttgtactcagccaagaagaattagtgccatttcagttgcggaaagagtagctgcagaaagggcagaatcttgtggcagtggtaatagtactggatatcaaattcgtctccagagtcggttgccaaggaaacagggttctatcttatactgtacaacaggaatcatccttcagtggctccagtcagacccgtatttgtccagtgttagtcatatcgtacttgatgaaatccatgaaagaaatctgcagtcagatgttttaatgactgttgttaaagaccttctcaattttcgatctgacttgaaagtaatattgatgagtgcaacattgaatgcagaaaagttttcagaatattttggtaactgtccaatgatacacatacctggttttacctttccggttgtggaatatcttttggaagatgtaattgaaaaaataaggtatgttccagaacaaaaagaacacagatgccagtttaagaggggtttcatgcaagggcatgtaaatagccaagaaaaagaagaaaaagaagcaatatataaagaacgttggccagattatgtaagggaactgcgaagaaggtattctgcaagtactgtagatgttatagaaatgatggaggatgataaagttgatctgaatttgattgttgccctcatccgatacattgttttggaagaagaggatggtgcgatactggtctttctgccaggctgggacaatatcagcactttacatgatctcttgatgtcacaagtaatgtttaaatcagataaatttttaattatacctttacattcactgatgcctacagttaaccagacacaggtgtttaaaagaacccctcctggtgttcggaaaatagtaattgctaccaacattgcggagactagcattaccatagatgatgtcgtttatgtgatagatggaggaaaaataaaagagacgcattttgatactcagaacaatatcagtacaatgtccgctgagtgggttagtaaagctaatgccaaacagagaaaaggtcgagctgggaagagttcaacctgggtcattgctattcatctgtattaatgggtcttaggaggcaagtcttctaggatggactattcaactgccagaaatttttgaggaactcctttggaagaactttgtttacaaataaaggttttaaggctaggtgggattgcttatttctgagtagattaatggrcccaccatcaaatgaggcagtgttactctccataaggcamctgatggagcttgaacgctttggataaacaagaagaattgacacctcttggagtccacttggcacgattacccgttgagccacatattggaaaaatgattctttttggagcactgttctgctgcttagacccagtactcactattgctgctagtctcagtttcaaagatccatttgtcattccactgggaaaagaaaagattgcagatgcaagaagaaaggaattggcaaaggatactagaagtgatcacttaacagttgtgaatgcgtttgagggctgggaagaggctaggcgacgtggtttcagatacgaaaaggactattgctgggaatattttctgtcttcaaacacactgcagatgctgcataacatgaaaggacagtttgctgagcatcttcttggagctggatttgtaagcagtagaaatcctaaagatccagaatctaatataaattcagataatgagaagataattaaagctgtcatctgtgctggtttatatcccaaagttgctaaaattcgactaaatttgggtaaaaaaagaaaaatggtaaaagtttacacaaaaaccgatggcctggttgctgttcatcctaaatctgttaatgtggagcaaacagactttcactacaactggcttatctatcacctaaagatgagaacaagcagtatatacttgtatgactgcacagaggtttccccatactgtctcttgttttttggaggtgacatttccatccagaaggataacgatcaggaaactattgctgtagatgagtggattgtatttcagtctccagcaagaattgcccatcttgttaagagagctgtagtacacatggatgaacgacgagaagaacaaattgtacagttactgaattctgttcaagcgaagaatgataaagagtcagaagcacagatatcctggtttgctcctgaggatcatgggtacgacaagaaatatttttttaaagaatag

SEQ ID NO: 89388 - DNA, 3918 bp, Homo sapiens; identical to SEQ ID NO: 61531

SEQ ID NO: 89389 - DNA, 3418 bp, Homo sapiens
ttcccatcccacctcccgagccttcctcttcccgcagcacgcccggcccggcccggccgtggccctcctcagtgccggccgccatggcagaggcgtccggcgcggggaaaatctagcccggggatttcatgcggcctagctcggttccgcctcctcctcgcgcggccccagcggctgcccgcaccccagccccactccgggcctccgtgtctctcctgtgatcgcactgacacggccggggggttagaatggaacaaactgaaggcccgatgagagaaagggaaagttaaggatgctggagcagaacaatggatttctctttctctttcatgcaagggatcatgggaaacacaattcagcaaccacctcaactcattgactccgccaacatccgtcaggaggatgcctttgataacaacagtgacattgctgaagatggtggccagacaccatatgaagctactttgcagcaaggctttcagtacccagctacaacagaagatcttcctccactcacaaatgggtatccatcatcaatcagtgtgtatgaaactcaaaccaaataccagtcatataatcagtatcctaatgggtcagccaatggctttggtgcagttagaaactttagccccactgactattatcattcagaaattccaaacacaagaccacatgaaattctggaaaaaccttcccctccacagccaccacctcactccttcggtaccacaaactgtgattccaaagaagactggctcacctgaaattaaactaaaaataaccaaaactatccagaatggcagggaattgtttgagtcttccctttgtggagaccttttaaatgaagtacaggcaagtgagcacatgaaatcaaagcatcgaaagcagaaaagaaaagaggaaaaaaagcaacaagcatgactcatcaagatctgaagagcgcaagtcacacaaaatccccaaattagaaccagaggaacaaaatagaccaaatgagagggttgacactgtatcagaaaaaccaagggaagaaccagtactaaaagagggaagccccagttcagccaatactatcttctgttccaacaacggaagtgtccactggtgttaagtttcaggttggcgatcttgtgtggtccaaggtgggaacctatccttggtggccttgtatggtttcaagtgatccccagcttgaggttcatactaaaattaacacaagaggtgcccgagaatatcatgtccagttttttagcaaccagccagagagggcgtgggttcatgaaaaacgggtacgagagtataaaggtcataaacagtatgaagaattactggctgaggcaaccaaacaagccagcaatcactctgagaaacaaaagattcggaaaccccgacctcagagagaacgtgctcagtgggatattggcattgcccatgcagagaaagcattgaaaatgactcgagaagaaagaatagaacagtatacttttatttacattgataaacagcctgaagaggctttatcccaagcaaaaaagagtgttgcctccaaaaccgaagttaaaaaaacccgacgaccaagatctgtgctgaatactcagccagaacagaccaatgcaggggaggtggcctcctcactctcaagtactgaaattcggagacatagccagaggcggcacacaagtgcggaagaggaagagccaccgcctgttaaaatagcctggaaaactgcggcagcaaggaaatccttaccagcttccattacgatgcacaaagggagcctggatttgcagaagtgtaacatgtctccagttgtgaaaattgaacaagtgtttgctcttcagaatgctacaggggatgggaaatttatcgatcaatttgtttattcaacaaagggaattggtaacaaaacagaaataagtgtcagggggcaagacaggcttataatttctacaccaaaccagagaaatgaaaagccaacgcagagtgtatcatctcctgaagcaacatctggttctacaggctcagtagaaaagaagcaacagagaagatcaattagaactcgttctgaatcagagaaatccactgaggttgtgccaaagaagaagatcaaaaaggagcaggttgaaacagttcctcaggctacagtgaagactggattacagaaagggtcggcggaccggggagtgcagggctctgtcagattcagtgacagctccgtctccgcagcgattgaggaaactgtggactgagattcctgtacaatttcatcccagaaactccagacttgtagtctccatgcaagatttctttgtcggcggcttgataaacagtttctttgttttcgattttgatttcgccaatcatcattattggcattttcctgcctggtttcttcttcaagactctgaacaattgctttaacagtcaaatgatttttttttttcggtttgagctggatgggtacagcttaaatcatgggtccagcctaaaaaccaccatttaacttacactgatcaatttcaacatggactgtttttggttttttgtttttaaataaagcatcattaatgcacatctgcaggggtttgccaaacagcccaaactgtatacattacaatcattaaaagttcttattttttttaatattagtgccgttatcatggagaacagcatgacagctgtctttggcagtctgtcatttttctagcattttcagaaactcatcggaaatggcggtacctgtgtttcccttcgaaagcctctcagtacagcactcctgttcctctgttaaaactccttgttaatccagtgatcttttaggccaaggaaatattttgtgatggtgttctgggtccatacaccagcaatgaaggagatagatttgtgtacttgtgttttttaatcagcattaacatgggcaggcaccctcatttatagatgtcaggaaacattcagtgaaaaacttgtagaatgggatgtgataacgaggttccagtaatctgagcagtctaacgaggcccacctcctccaccacagaacgtggctatgttccaagtgctactctcactcagcctgttgcggatcttcatggcctcaggagacttgtttctccatgggctcttctggactgcacacttccaccatagcttgctgggttgatctagatgtctgtttgttgtatggaaattttgggggaaaaaatccaaaacacaaactgtgggttgaaatattaaccgtctccttggttccttggtattcaccgtgcctgatctgcacatttcatcgtggctgtttctgtatagcctatactgcattagcccaagagattgttgctttgtaactttttgcactattgttttggctggatttgtattacacacagttttaaaaaaaacaattccccactataaaaaaaaaa

SEQ ID NO: 89390 - DNA, 2544 bp, Homo sapiens
cccacgcgtccgatgacattccaccacaaaagtgtaaatggccggtccttgccttgagtgatgacattaccttgtgaaagtccttttcctggctcgtcctggctcaaaaagctcccccactgagcaccttgcgacccccactcctgcccgccagagaacaaaccccctttgactgtaattttcctttacctacccaaatcttataaaacggccccaccccatctccctttgctgactctcttttcggactcagcccgcctgcacccaggtgaaataaacagccatgttgctcacacaaagcctgtttggtggtctcttcacacggacgcgcatgaaatttggtgccgtcactcggatcgggggacctcccttgggagatcaatcccctgtcctcctgctctttgctccatgagaaagatccacctacgacctcaggtcctcagacagaccagcccaagaaacatctcaccaatttcaaatccggtaagcggcctctttttactctcttctccaacttgcctcactatccctcaacctctttctcctttcaatcttggcgctacacttcaatctctcccttctcttaatttcaattcctttcattttctggtagagacaaaggagacacgttttatctgtggacccaaaactccggcgctggtcacggactgggaaggcagccttcccttgatgtttaatcattgcagggacacctctctgattattcacccatgtttccaaggtgtcagaccatgcagggacgcctgccttagtccttcacccttagcggcaagtcccgcttttctggggaaggggcaagtacccctcaaccccttcttcacccttagtggcaagtcccgcttttctgggggaggagcaagtaccccaaccccttctttccatgtctctacgccttctctgcttttctggggaaggggcaagtacccctcaaccccttcttcacccttagtggcaagtcccgcttttctggggaaggggcaagtacccctcaaccccttctccttcacccttagcggcaagtcccactttcctgggacaggggcaagatttaattaacctcgccttcaaggtgtacaataatagaaaaaagttgcaattccttgcctccactgtgagacaaaccgcagccacatctccagcacacaagaacttccaaatgcctgaaccgcagcggccaggcgttcctccagaacctcctcccacaggagcttgctacatgtgccggaaaatctggccactgggccaagcgaattccgcagcccgggattcctcctaagccgcgtcccatctgtgtgggaccccactgaaaatcggactgttcaactcacctggcagccactcccagagcccctggaactctggcccaaggctctctgactgactccttcccagatcttctcggcttagcggctgaagactgacactgcccgatcgcctcggaagccccctagaccatcacggacgccgagcttcgagtaactctcacagtggaaggtaagccctttcccttcttaatcaatacggaggctactcactccacattaccttcttttcaagggcctgtttcccttgcctccataactgttgtgggtattgacggtcaggcttctaaacctcttaaaactccccaactctggtgccaacttagacaatactcttttaagcactcctttttagttatccccacctgcccagttcccgtattaggctgagacactttaactaaattatctgcttccctgactattcctggactacagctatatctcattgccgcccttcttcccaatccaaagcctcctttgcgtcctcctcttgtatcccccgaccttaacccacaagtataagatacctctactccctccttggtgaccgatcatgcaccccttaccatctcattaaaacctaatcacccttaccccactcaacgccaatatcccatcccgcagcatgctttaaaaagattaaagcctgttatcactcgcctgctacagcatggccttttaaagcctataaactctccttacaattcccccattttacctgtcctaaaaccagacaagccttacaagttagttcaggatctgcgccttatcaaccaaattgttttgcctatacaccccgtggtgccaaacccatatactctcctatcctcaatacctgcctctacaacccattattctgttctggatctcaaacatgctttctttactattcctttgcacccttaatcccagcctctcttcgctttcacttggactgaccctgacacccatcaagctcagcaacttacctgggctgtattgctgcaaggctgcagggacagccctcattacttcagtcaagccctttctcattatttactttctttctgtccatctgcttctcaccttattcaatattgtaacgaccttctactttgtagttccccctacaaatcctcccaacaggacaccctcctgctcctccaacatctattctcaaagggatatctcgtatccccctccaaagcccaaatttctt

SEQ ID NO: 89391 - DNA, 638 bp, Homo sapiens
cccacgcgtccgtaaaactgagaaatgattccaaaaagaagtgaattaaatagttaagtgataaatatgttcttttccatttgaaagcacagaactctgaaaaattggctacatcatcatatgacatcataaatacctaattacccttacttctagggatgttaataataactaatataacaccttatttgtatactactttatgggttgcccttgccaagatattctatttaatctatttcttatttaatgttcattagtgctttatgggtaacatatgaatagcactttatgatacccggtcatcattattgctttcctggcacattcgcattgaagtatagatattatttttcttatctccatttaaagatggaaagtgaagctcaaagatatcaaatgagtttgttgttttaggtattgtatcactataactggtcagttttgatctgtatttaatggattttgatagaatttttaaagctgggtgatattttaggactgatgggggatttggcccccccaactactttgggaaaatacttttttttttattggggaagacattaataagttaaggtacttttaaaacccttattaaccctatggggcctaaaatggacttttttccccctgaa

SEQ ID NO: 89392 - DNA, 2406 bp, Homo sapiens
  misc_feature (1)...(2406): n = a,t,c or g
ttttttttttttcatttagcaaagtttttattcaaaagcttctcaccaccatctagttatcagaaagaatggatatcaccttttcctgcccacccaatccccagttccacaggcagaagttaaacccatttggctagagttccccctaatgattatgactgagaccatgataagattttggttgttctcacccaactgtctctaagcctctactcaaacctgactcaagcagagatgtgcacaccccacagttcagaacaggaaggaatcatgtcagatctgatcaacctcccattcttgggctattagaggcacaagaaattaccttgaaaaaatggaattcagtgactgccatctaggaaagacagtgatactgtccagcagcatgcagttccgagagctcaactcttaggccaccctccctccactctactctaggaacaaggagcattaggtctgttttctctccatacacctcaatcgctcgtcctctcgtcttattaaaacacagacacagaaccaaactttttgacagttaaagacaaacaattacatctaattaaaatgctaagagatcctgagctgttagagatgaggagagtagatagtatgacctgatcttcccccctcttttttttcctttaacagtattctgtttcagcataaagcacactttctgaagaggttcctggtggagactggaaaatcttggacttgtgtcctgtggcaaacaacacaagtccccttgcataactttggcttcagtccctggatctgtcctttgcaagctacgtcaggttccatggaaggaaggaaagagctggagggcagtatcactcagccaaagctcccatggggtcccatgctggcaggacaaatgggttccctgctcctaacacagctagcacctcttccagggacatgcttcctgtcccaccaaccacttcgtagacatactcaagagacccaactcaatctgtcatgcacaggtaacctttggtggccatggtcttcaccccattgaaattctccaactctcccattttgtgaaaagcaccatccctgaatcatcccggctctgagcacagcagtgaaggtcatggtgtgggtcataacgtgactcaccaaaagtcacgcctctccgctttattcatgttcttcaaggagacaccaaacactaactcatggtcatagagattcatgtcactgagggcccagcttgctattgaaagtgttttccaacatcacagccaaaccacacagccgtctccatctttgatggaggcagcaaccatctttttcaggaagtcaatgggctggttgttgtaaaagagtttttctcccctccaaaccatattgccttaagtattcccactgtgtaaagtttgttgtacttgtgctggggcctagggtcattcactaaacaaatcttatcttccatattgaagagtggcttgacatgttncccctgtwaaactccaagggtgttcatggggccaattttctkatwawttttatctttgtctcgatattcccaggtgaatgtctctggtggattacccaaacagatgcacaccactcggaatatctcctccatcatgacgtcctgtgtggccgagatttctcctttcgttgctccactgtgtaccaggttccgcagtcgtatacagaattctctcatcttgtgattcagaatatcattcatccttctggttgcctctgttgtataagattcagggaagcatttcttagggataacaccatatttttcaacaatattaacaagcatatcccattggccaccatcatttgcagggttcataagcaaaaactgcaccagcctcccatcctcaggctcctttctctgggctgtgtccacaaaagcactcaagaagaaataacagcgttcaaccttgtcccaaaaaaacaggtaagattggctaaactcaaattcttcaatatttaactttttcatgaatggaagcctcataacattcagacaagaaaagatccagcatcgccctgagctcttctggttggtgattggcttgccctcctggggcacggcgtgctggaacacatgctgcgcgcgctgcaccgtggcccgcttcagacagatgtccagcaggtcgtgggtggtcccgacattctgggcaagtacgaactgggggtcggaattcagtttctgtatcagagcagctaccttctccgaattcagtcccgagctgctcatggcgcccacgctgcccggcggggtaacggtagcttccagggtccttgggcgagcgccgggattgcgctgcggctcgctgcctagggggcccgacctgtctctcgcacccggagcgccggaaaaaggaaaccggctcggcggcggcggcggcggcggcggcggggaggctgagg

SEQ ID NO: 89393 - DNA, 1152 bp, Homo sapiens
tttcaagtaacctgtggcattttattttattttggatcaggagatgaaggctgacaatgataaggtaccttatgttgaggtaaacgtagaaaacaaacagccccaggtgtggacctgactgtcctgctgaaccagactagagagtaatatgaggctttgccataacaaagccacagaaaggctaaggcctggtttaatgtaaggtaagcctatcaccgccaaaacaaaacaaaacaaaaaaatacccaatattaagcagaagtcatgaaaactagtataagtatttatatttttattccactctaacacctcagagtaaagaactgatgggcaggcatcggcttctgctgacaattgccaaccggcatgagattgctgagctgaggtggactctccagacactggaactggaactccaggcccaatggcctctggtaagaatgctgcaacgtgagacccttgagagagactgacttgttgaagatgaagagaaaaccaagagcctccagtccagttgttgaagagcaaccacgagccaacaccaaggagacaaggaagaagaagtccttctctcaaccgatgtccgcaagcacaaaagaagagtcccaagatgggcgaagaaagggaaaataactcaaggggagagccaggaagaaaaatgctccacaaaaatccatggctttaagaatacttgaggaagggagcaggccaacaccctctggccacagtgaccagctgaatgaggaactctaacagaatgagctgcagttggagcaacagaggggacatagctggaacaacagagcgaggggacacagccggagcaacagagtgggaggatgccaaccatttcaactctctccctgagcagcgagtaatttcagggcaagcccagagactaggatccatctgagaagtcttcagaggtctgacccagagaactcaacaacaggatacgtcccatggtgatgaaaataaaatgaatcttgtgttcaccgttgtattcctcacgacttaagttaaaaacctgatgaaaagtggttaatctccataatgggtgttagctccatcgttttccaacgttagagataaccgaatgtgacctcaccccgtttagttccggaggcggcggacgcgacggcggaagtttcg

SEQ ID NO: 89394 - DNA, 1975 bp, Homo sapiens
ccagtccaagacgattttcaagcatgagaagtcagagtccagtcaagtgcattaaacccagtgttcttggtcctcttaaaagaaaaggtgaaatggagacagaaagtcagcccaagagactcttccaaggcactaccaatatgttatctccagatgccgcgcaactgtctgatctcagttcatgggggtgttatcaaggagaagaaattcctgccttgaccagatgtgtggagcatctacaaatgaatgaatagttatttacacacaaaccactgtgtacaaaagcgtccatggagctgtcagtgtctcgagtggtattatgaggcctcaggtgccttggggtacattgtcatgctataagggatgtatatcataaggtatggtggaagaggggccttatgtgaatgattgccacatactgtttctgttgctgctttttttccgattcctttttgtcattggatttgtttgttttgtcatgtggtgaatggtgttttagttattgtgttgctgccagaatcagaatccagttcttgttcttactgccttatagttattgtgttgccaccaaaatcagaatccagttcttgttcatactgccttgtagtgagggcagtttaatatctacaaagaagcttttagaagctgaaaaagtcaatgtgattgtgcattctgcttttaagaagctgtttcagctatgaactgtgtatgtgctataagtgtgaggtaccataagttatttaatttttaaaagaggaaactcctgagtgagctgtttaagaaatctgagtgtgatctattgttacgttatttataactaggtaaaatgtctgtcgtgatagatttcttttaacgttcagatactgtggttgggttgtctatatttaatatgcagatttgcctgctggaatcataatccatttttaagtgaatgtaagaaatgaaaactactgcatttgtgtcttttgaaggcaaggatccttggattttaaaggaagagtatgtgctttgaaggcactcagagactagtaatagcatatggtttgaagggaaacccattctctttcaattacaagagagcatcacttagcgtgcagtacttctgttacagcatccgatgtgtcctttattttaaattgtaaccataacagccattaatggctttatttcttgtattgctctcatctgggaaaagtctctacttcttcaaacgtaacataaatctattatgaagcttgtcccctagtatgccattataaagaaaaaattcttcgatggtatgcagtgtatctattctgtttgtaaaagatcatgtcaaaatgttctgcctctataatgataatagatggttttgtctttcaggatatttatccacctactgtcttctttgccttaaagggacacttggccatcatttttaggctcgaacttaacactgttaagaaataactgaaatatgatggtatttacattaatttttgaaattcaatggtgggatagaattaggtcaggaaatggaagttgttccaatggtgtgagaactaggagacaagatgattcactttattatttaaaccaagcttcatttttagtttttgttgtttaaatggactggaaagttaagtttttgcagggattgttttgaaataaagagatatgctaactcacagatgaactttgttaagacccctttatttttatataaagtctaatatttgaaaagcgattgttataaagtaaaattctctcttcctattctaatatatatcatatatttcaggcttctatttgaaaacaggtataagagatgatatgatacaaccctatagataatgttttttgcttgattgacttatataatcactgtttcatgattactgcttttggaataataggaagttttgtgaaatgctggccttgtgtatatcttagaatgcaaatttaataaagtgtgtatacatgcataaaaaaaaaa

SEQ ID NO: 89395 - DNA, 2472 bp, Homo sapiens
  misc_feature (1)...(2472): n = a,t,c or g
ttctgtttaaatcctgggaaaccttagataaggtatgtgaaactgaaaaaagatcaaatcagcacacacagataaaggatacaacagataccaagatgggtaaatgcccaattattttcagtcctcataatctgtacaaagcctatgaggccaacccagtaggcccatacctcactaggcaagactttgaggaagatgtttcccctatttgaaacacaagaaattatgaaaaatatggagatgaagagggagtagttctgtgcttcttgctgtgttacctttattatattccctagtgtcactgacactagtttaaaaacagcctgcaacaagaatattctcatcaccagccaccttttccacctttcttctttttcctgttgcctgtttcttttttgttgcttggagccccctggcaggtttctgggtagtcttggggggtatgatgttacttgtagaggcagatactgttgcagcactgccagggccttggggaggtgggtgggctggctcacagttttactggcatccagttcagatgaagctcctgcaggttgctccctgggtcccttttccaatctgatccttctttttacccttctttcttccccggtagtaagaacgttctcgcattggcagccatctttctggatcttggggtaacttttgggtcataattctctaggcaatattcccttctttttctttctcttctttttcaaatctccctgtccttgctccttcggttgactatctccactcactctttcacccttcttccgaatgtatgcagcaccagcagaatgtttcagagcctcaacatctactgttagagacgtactatctgacgatggcaagtgtttactaagagctttggctttctctggatctcacaagtgagtaagcagaaataagctgtgccacgccgtgtgaaatatctttttggatttttgtttcacaggctggttgtagggtcactaattgcctccttcttccgcccatatttgaagtttgaaggtttgcaggcttctcttatcaagggacaaatgaggcagggaggattttgggctggatgggttttggataccactgggataggcttgtgtggaaggacctccaatgggcactatcaatatcttcttccatggccaatacatggtaaactaatgccagaatacccatgccccggtttatgcctttaactccccctatgcttcctcaatattagacatgctttagaaatattacccttgagaaattttcaactgtgcccatgggtcagcttaatttcagctgcattctcctggatggctgatctgaaaaatcccgaaagcagctctattgccttttgtgtgcctgccttttccacgggcangagctgggcagccttggaattaaacacagggtaagagatgcctcgggactttgggactgtaaactggcagatattttgcggcattgttcagccctggtttgtgtacatagcaagtaaagctttgttaaattctatagcttgtagttgtttcttggaaagcttaaactctactccttccgcattggttaatttcactttcttcttggagtcaaagacattttggtccttgttaatggtaatgatgttatttgcaattacagctagtaatcccacatctgttggttttagttttattatttgattgtaaagttgcaaagccangcctcctctgttcgaccctgaagctgcagaatataagccatctgaccatgaatgatggccagttctgcctgtgggtcttcctcagtcccatcagtgtcttctgataatgaacggcggcaaagatcttcagcttcttgtaggattttcatggcctggttcagctggccttgggcctatcagtgcacatgcagtgttgtagcacagctcatgtgtgccttcttggaggcccaggttctctggaaccactttttcccaattgctttgagctgcaacaactgctgaaaggtttgttttcctctcctcatcataatcatcttgggagtttcggacgagatctcctaataacactgcctaagcattcatccatagcgttcccaaacggtaataacacttgtcccataaagctcaattcagtttgtctgtctgctggttggcactttctattgtcttcaaggcattctcaattctgttcagcctgtactcgcaatatgccttttcaaaggagagagagttattggctaacactttggtgtgagtattgatgacattcaaagcttccttgaaacttccattctggataaggcataccactttacaatgcagggcagttacgtcatctttgttgatctgtagtatcttattgacggtcttgagagcgcgcgtgaagtcgccgttctggccataccggttcacttcactccacagcgcaggtactgacacccccccgctgccgccgctcgccatcttggaggagacgaggggcggggcggggagac

SEQ ID NO: 89396 - DNA, 925 bp, Homo sapiens; identical to SEQ ID NO: 61640

SEQ ID NO: 89397 - DNA, 2121 bp, Homo sapiens
ttttttttttttcagaagggaatggctgatgtctttattctgagggtgagaggctggcaccctgtggacccttgactggccagatcccctcctgggtcctccctgcaggctggaccctgcctttgtaacagctgagcagcaccccagcatggccccttccttggttgatgccctctctgctgggctgagggccaggctggccacaggaggggcaacttctgcccagtgttctccaccccatgcccccagctggtgcagttcccagacctctctctgcctctcctcaagtttaagtatcaaatcgaacattcttttttaaagtaagctctgccctgactcccccagccatgcagagaggcttgcagagctgcctaggcctagtttggccctttccctggcacccaggccctgtgttcagacccctggctctcatcacagaaacaccctttgttgagcagttgtttattctggccctcacagccttggctagtccacaaaggccctggggatgggcaacaggctacaggaacccacctgtcttcctggtcagggcccctggcccctagcagcaggccaatcctggtggggcacagggttctgtgccctttggctgcctacctctgaatatcctggccagcaagccatgccttccccgcccctggggccctgggagcccttcagctcctgtccccataatgggtcctgggcctaggatgaggggaaggtcccagtttcttgtagggtgttatctgggggtcctggtgtgggttgagctggagggctgtggggccccaagacccctgtgccattggggtgctccaccctctcaaacaggatgagcatctcacagtgcggggtctgcgggaacaggtccactgcccacagccttgaccggccggaagggaatgcccttcacccggttagatggggctctgcagaggtccacaaagttgcccatggctgcccgggggttgcatgagacgtacagcagccgcctgaggttcttagctctccggatggccaggatcaccttggaatgcaagccagcacggggtgggtccaggatggccacgaggtgctgggaggccagtctgctcaccagggtgggcaccaggtcctcggccctcccgcagtggaactccacattactcaactcattgtcctgggcgttcacccgggcgtcctccacagcctctgggcatagctcgaccccaatgaccctctttaccttccgggccagggccaggccaatggtgccggtgccacagcacacgtccagcaccatgctccccgcatccaattgggcccagtcctggatgactgtgtagagcacctcggctgcgggtgtgttcacctggaagaaggcgtgtggagagatccggaaggtcagccctagcaggtcctcgtggatgcaccggtccccagccacatgctccaggggcaggccctcctggctaggagtctttcgctgtccctcctccacaaagtagaggcaggtcactccactggccctgcctggccctgctgtgaagtgctgcgctagggaggtcttcagctctgccagctcctcagggctcagcttctgggggtggaagtaggcaatggccatggcctggtggcggcggctggtgcgcacagtcagctgcttccagtggcctgtgtacgtctctgggtcgtatgccgagtatggagtggaccggatgaactcctggaaggccttcaccacctgcttggtggcttcggggatgtgcacggtgtcaaacggggctgccacagcacacgtcccgcccttgtacttgccgagccgacagcccacggtgttatcctccccatccaccccgacgccaaccagaaactcacacttattacgatactcagtctgcagggagagagagctgcaccttaccctggctgcccagcgcttgggcctggaaaccctgatttccccacaggggctggcagtcaaacaagaggaacagctgacaactatgtgatgttaccagaagaaaacacaaagcagggagatcaacaggaagggtgagcaaaagcaaagtttttcaaaacccaggataggggtttgtggccaccgaagtctagtctgacctgctggggtgatggccc

SEQ ID NO: 89398 - DNA, 1255 bp, Homo sapiens
gtgtacttatttgaaccattgactgcgatcaatttataccactcactatcgagaatctgtccctaaagccccaattcgccacaatctggaacaattgcttgagcggacgcacgcttaatccctttagtgcgggttaatgcccaacttgacgctgtccccctgtgaacaaccttctcactggtaaaacgctcccccactgagcacctcatgacccccgcccctgcttgccggagaacaacccctttgactgtaattttccactacctacccaactcctataaaatggccccacccctatgtccctttgctgactctttttggactcagcctgcctgcacccaggtgaaataaacagctttattgctcacacaaagcctgtttggtggtctcttcacacggacgcgcatgaaatttggtgtcgaaacatttggtgccgtgactcggatcgggggacctcccttgggagatcaatcccctgtcctcctgctctttgctccgtgagaaagatccacctacgacctcaggtcctcagaccgaccagcccaagaaacatctcaccaatttcaaatccggagcttgctacatgtgccggaaatctggccactgggccaaggaacgcccgcagcccgggattcctcctaagccgcgtcccatctgtgtgggaccccactgaaaatcggactgttcaactcacctggcagccactcccagagcccctggaactctggcccaaggctctctgactgactccttcccagatcttctcggcttagcggctgaagactgacactgcccgatcgccttggaagccctatagaccatcacggatgccgagcttcgggtaactctcacagtggaaggtaagcccgtccccttcttaatcaatacggaggctacccactccacattaccttcttttcaagggcctgtttcccttgcctccataactgttgtgggtattgacgggccaggctttctaaacctcttaaaactccccaacgtctggtgccaacattagacaatacgtcgttttaagcactcctttttagttatccccatcgtgccaggttcccttattaggctgaggacactttaactaaattatctgcttccctgactattcctggactacagctgtatctcattgccacccttcttcccaatccaaagcctcctttgtgtcctcctcttgtataccccaacttaacccacaagtataagatatctctactccctccttgacgaccgattcatg

SEQ ID NO: 89399 - DNA, 1495 bp, Homo sapiens
ggaattcgggggctggggcctggctggcctgcaaggtgaatgttatggggatgtagggcaaaggcatgctgggggcccagactctctgacctcgttgcttccctctccccacagcgggaatgcatatcagtccacgtgggccaagcgggagttcagattggcaatgcctgctgggagctcttctgcctggaacacggcatccaggcagacggcacttttgatgctcaagctagcaagatcaacgatgatgactccttcaccacctttttcagcgagactggcaatgggaagcatgtgccccgggccgtcatgatagatctggagcctactgtagtggatgaggttcgggcaggaacctaccgccagctcttccatccagagcagctgatcacaggaaaggaggatgcagccaacaactatgcccggggccactacacggtgggcaaggagagcattgacctggtgctggaccgcatacggaagctgacagatgcttgctctggcctgcagggcttcctgattttccacagttttggtgggggcactggctccggcttcacttctctgctgatggaacgcctctccctggattatggcaagaaatccaagctggagtttgccatctacccagccccccaggtctctactgcagtggtggagccctacaactccatcctgaccacccacaccacactggaacattcagattgtgctttcatggtggacaacgaagccatctatgacatctgccgcaggaaccttgacattgagcgccctacctataccaacctcaaccgcctcatcagtcagattgtgtcctcaatcactgcttctctccgctttgacggggccctcaatgtggacctcactgagttccagaccaacctggtgccctacccccgcatccacttcccgctggtcacctacgcgcccatcatctctgccgagaaagcctatcacgaacagctctctgtggccgagataaccagctcctgctttgagcccaacagccagatggtgaagtgcgacccgagacatggcaagtacatggcctgctgcatgctctaccggggcgacgtggtgcccaaggatgtgaatgtcgctattgctgccatcaagaccaagaggaccatccagtttgtagactggtgtcccacaggcttcaaggtgggcatcaactaccagcccccgaccgtggtccccgggggagacctggccaaggtgcagcgggccgtctgcatgctcagcaacaccacggccattgcggaggcctgggcccgcctcgaccacaagttcgacctcatgtacgccaagcgggcctttgtgcattggtatgtgggagaggggatggaagaaggagaattttcttgaaggccaggggaagacttagcttgccctggaagaaggattatgaagaagtggggactgattcgtttgaagaagaaaatgaaggggaggaattttaaatatataccttccccttgaaaaaaaaaat

SEQ ID NO: 89400 - DNA, 5378 bp, Homo sapiens
ttagcttgctcgaggaaactatggacgaagattcttcgttgagagagtatactgtaagcttggactctgacatggatgatgcatccaaatgtcttcaggagtatgatagtggaactggcaacaccagggaagctttgaggccttgtccaagaactgtaagcaccaaggctcagccaggcaggagtgcttcttctagctctggagataaaacgaccagctttgctgaacaaaaaatcaggaaactgaatcataccgatggagaaagtagtggaagcagttctcaaaaaactacaccagaaggctctgaacttaatattcctcatgcgggtgcttgggcacaaattccagaagaaacagggcttccacagggacgggacactacccagctgttggcctctgaaatggtgcatcttatgatgaaacctaaaagaaaagagggcgggctatataagcccagaaaaagaaaatggaagctgcttttaccaaacagagacagaaaatgggaaggacagcattccttactgtagtgaaaaagaaaggggatgggatatctcctctacgagaggaagcggcgggtgcagaagatgagaaagtatatactgatcgagcaaaagaaaaggaatcacaaaaaactgatggacaaaggagcaagtcactggcagatataaaagagagcatggagaatcctcaagccaaatggctaaagtctccaactacacctattgatcctgagaagcaggggaacctggcaagcccctcagaagaaactttaaatgaaggagagattttagaatataccaaatccattgaaaagttaaattcatccctgcattttctacaacaagaaatgcaacgcttgtcacttcagcaggagatgttaatgcagatgagagagcaacaatcttgggtgatttcacctccacaaccctctccacagaaacagattcgagattttaagccttctaagcaggcaggcctgtcatcagccattgcaccattctcctcagacttcccctcggtcctactcacccatcttccacaagtcttcttaacaggaaaagtgcatctttttctgttaaaagtcaaaggactcctaggccaaatgagttaaaaataacacctttgaatcgaaccttgacacctcctcggtctgtggatagccttcctcggttaaggaggttttcaccaagtcaagttcctattcaaactaggtcatttgtatgttttggggatgatggagaacctcagttaaaggaatccaaacctaaagaggaagttaaaaaggaggaattggaatccaaagggactttggaacagcgtggacataatccagaagaaaaggaaatcaaaccttttgagtcaacagtctctgaagtcctatcactgcctgtcacagagactgtatgtctgacaccaaatgaggaccaattgaatcaacccacagaaccccctcctaaacccgttttcccacccactgctccaaaaaatgttaatctgattgaagtttccctctcagatttgaaaccccctgaaaaggctgatgtacctgttgaaaaatatgatggagaaagtgataaagaacaatttgatgatgaccagaaagtatgctgtggattcttttttaaggatgatcaaaaagcagaaaatgatatggcaatgaaacgggcagctttgttggagaaaagattaagaagggaaaaggaaactcagctccggaaacaacagttggaagcagaaatggagcataagaaggaggaaacaaggcgtaaaactgaggaagaacgtcagaagaaagaagatgagagagcacgcagagaatttattaggcaagaatatatgaggcggaaacaactgaaactaatggaagatatggatacagtaattaaaccccgtcctcaagtagtaaaacaaaaaaaacagcgaccaaaatctattcacagagatcatattgaatcccccaaaacaccaataaagggtcctccagtctctagcctttctttggcatcgctgaacacgggtgataacgagagtgtacattcaggcaagaggacgccaagatcagagtctgtagaaggcttcttatctccaagtcgttgtggcagtcgaaatggagaaaaagactgggagaatgcatcaacaacttcttcagtggcttctggaacagaatatacaggaccaaagctctacaaagaacccagtgcaaaatccaataagcacataatacaaaatgctttagctcattgctgtttggctggaaaagtaaatgaaggtcagaagaaaaaaatactggaggaaatggagaaatcagatgccaacaacttcttaatcttgttccgggattcaggatgccagttcagatctttatacacttattgcccagaaactgaagaaatcaataaactgactgggataggccctaaatctatcactaaaaaaatgattgaaggactttacaaatataattctgacaggaaacagtttagccacatacccgctaaaactttatctgccagtgttgatgcaattaccattcatagccatttatggcagaccaaaagaccagtaacacccaaaaaacttttacccactaaggcatagaagttgggaaatacttgcttcagaacattcatggtaaatttgcacttcatctttcctgcctatagaaaatctttctaattgccaacaagacttttattaattaaaactggacattaagctctgttgtcatgaacaactggaatgtaaaccacagtattttggagtgcagaacattctcaacttaagtgataagtccaaatgatgaaggaaatgttttaattcacaaatggagatttgtatgtgttatcaggttcacctgcttgatattagatacattaaagcactggaattttcatgggatattagttggatttatcattgaaatatggttaagattacaaattatgtgttttatttgttgcttttttttaaccttttaatgtatattcttgtcttcagatggtttgctatttttctctcctgggggtttattctaagatacctttgtattttatttcatgtggagatcatgaaagtaggaaatatacctttagaagtaactcgcacctttcttatgatgttaagagaaacactagtgtttagttttacagtaaccctcatattttaatggtgttacagcatttgcaaaaattattctgctaagtatttacaactctatttattattcactcaagtattaacattctctattaaataagaggaggtgttgtaaagagctgctagtaggttcgctttaaaccacatgagcttaaccaagaatatgttatgagaagttgctgattaaatcagtgctgtttttacaccacttctggccaactcagaataatttagattgttcttttaacaaaaaaggctttctatctcttttaaagtaagtcactttataagttggcagaagtgaatgacactttgagagtagtctttcaatctgaagatgtaagacttcctgaaacaagttctcaagaagtctttacattatatttataactcatataaaaattatatttagaatttttaaacatgtacaaagggctacattttaattttaaaatagcttcacattattttacttatattgggtttttcttcattttaatccttttcaagtggaatggcttagattaagtatacacttgaaatctcctctacatgatctttgttctttaacagtgtataccagagggttagttggggaaaaacttcattctcaggaaaagacttgaatgattatgtgaccctgttatatttcagtgttgtgacaaatgtgtaaactagcgggggaagacagtattgtatcataaatgagatgcgtagtttgttttctttcatgggaagtagagataaaaatatatacatttctctaattgagttgtttagagaaagaactaatgtctcatatgatgtatttacttattttaaaaaaaagaataggaatgagatgtccctgagctgtacttttctattattataaggcctttaggcatcagtgcatctgggttatcaacattttctcaaatgctgtcaatattttactgtaatttatgttcttatatttatgtatatttgttaaaactgtaaaaaaatttcacagatttttttccaatacctgtgcaagatacatgtgtagctcaaaactatttgtgatctactgtttgcatgtaagagaccaggatatgtaactcttatattttaagtgtatacatattgtgtatataacatatggatattaaaaatggggaattgcacattttaccttttggacagtaatttctatcacagttagaaggaaatgatagtcaaatacacgtttagattaaaactagtttaaaaaattataaatgaatctaatcaaaatgtgaatagtagtcaaaaggataatttaataagcattttacgttactaaatttgttcatttcaatattaactaaatttccctcatcaaagcaatctttgtgatattacttcgctattaaataaagaaaattggatgcaagacaatggagaaactttaaaactaaacaggaccaccctttattcttaaatttgtgtgtgtccaacagttgaattgaatgtctataaggtctaaaggtagaatgtgaatattgccacagagttcattgctctcagtataagattttactttattaatgcagaaggaatatggatatatttctttaagtctgcagatttttttattatggtgcagcttttttttaattatgtttttaaaattatacagttgaaaaatatgccatttcataaagtctgaggattttcgtcaaccttactgaaacacactggtgctttcatcatcagaggtcaaattattatgataactattccattaagtttgccaaacatttgtcgtggttaccagtgcagcctgtcaaattctgctatttgacacagctttggaaagatttagttcttggtttttccgttttgtattagaatgactgttacagttttatttggctgtttaaagccaaattcagctatttaattatggtttcatggacactgttgagcaatgtacagtgtatggtgtgcttacctgtccactctagagcattgcttacaggttttttgttttttaagatgctgtgctgtaaaatactgtcatacttgctatttcctggtacagtgtagtttttcccctttcatttgaataaaagcatggcaccaaatgactccttttctgtttcttgaataaaatgtagtttttggtaaaattatttgaacttgagataactcatacagtttttctatcccctaacctatgtttaaatttaataacttgaatattcataacaggcaac

SEQ ID NO: 89401 - DNA, 1174 bp, Homo sapiens
tttttttttttttgcgtgaacattagttcttattgatagtccccatcacctccaaagcagtgggccccccgccctccctcctaccagcccctccccagcacccagcccctcagtgcagcgccacctcgcaggggtggacggtgggcagcacgggcagcctcgtaggcacggcggaactcctggaatcgtggggcacagcccagcccgggcctccccaaagcggctccagcccatgaagaggaaggtgcctgggcccgggtggacgccacagcgcagtggggtacgaatggaggtcagcccctggtccccggatcgccccgcctggaacagcggcggtgtctggcggaggacacgggcggccaccacagtgatgacagactcctgcagctccacgtcatgggtgaccccatggatgatcccgtgaattactgtggggaggcatgtggctgcggtaggcattcaggggaaggcaggctccaggctccccccatggcggggacactcaccgaagtcgctggtgcatgcggccaggagcagctcagcgtcgctgcagggcctgcaggcaaccgtctacgccgagaccgtgggcctgcgggggctatctcggggcgcccgtcctcgcgcagctcaaagcggaaggcggccacgcggcggctgatgtcctggtgcggcgtggcctgcaggaagagggcccggcgctcgcggggaccccagcgcacgcagcggccccctgccgggcccgggccctcggccagcagcagctccagggcgccccctgcgcgctccgcgaagacctgggcgcccgcgaagggccgcaccggccgcagacaggcgatgccgggccgcgctctgggatcggggccgcccagggtcaggcgcagcgccccagccgggtacagccactcaaccgcgccctccgcacaggccagggccagctgccccacgctgccgggctcctgggtgaggccgctgcccctcccagctgcagcgctcctcggagtagccggcgcgggcagccggggccaggaggccgcagcacagcgcgcagagcagcgccgcggccgggaaccccatggcacggcgggcggcgtccggggagtcggggctctcaccaccgctgccccggcggggcgcgggtccgggcggcggcgggagcagccgggggcgccggccg

SEQ ID NO: 89402 - DNA, 1634 bp, Homo sapiens
aaaggggggaccctaccctcagaacatgagggaataatatttacgtggctcacaaagaccagtgagtacatcatatgcatctctcacaactccccagaagagggcctccagcacgagtctaggctcagccttttctgtccctccgagaactctatgaattgctgccaagtgttttaattttcctcagaatttctttgtaatgttattgagggttggaggtccttttacaaattttggaaataagtaaatcaaatgagaagaccatgcttccaaacaatcattctgtttaacagatccccttgatttaatgcaattatgaatgcgttagtggtagtgtagtttaagatctttcccttgaatgtacaggctttaaagaaacgaacctaggagtgtatttcctatcaagcaaatgggttctaagactttacgctttacacatcattgattatagcgctgtgcttttcccgtgctaggcaatggatcacttggagtcctttattgctgaatgtgatcggagaactgagctcgccaagaagcggctggcagaaacacaggaggaaatcagtgcggaagtttctgcaaaggcagaaaaagtacatgagttaaatgaagaaataggaaaactccttgctaaagccgaacagctaggggctgaaggtaatgtggatgaatcccagaagattcttatggaagtggaaaaagttcgtgcgaagaaaaaagaagctgagaaaactgtcgctgaaaagcaggagaagagaaatcaggatcgcttgaggaggagagaggagagggaacgggaggagcgtctgagcaggaggtcgggatcaagaaccagagatcgcaggaggtcacgctcccgggatcggcgtcggaggcggtcaagatctacctcccgagagcgacggaaattgtcccggtcccggtcccgagatagacatcggcgccaccgcagccgttcccggagccacagccggggacatcgtcgggcttcccgggaccgaagtgcgaaatacaagttctccagagagcgggcatccagagaggagtcctgggagagcgggcggagcgagcgagggcccccggactggaggcttgagagctccaacgggaagatggcttcacggaggtcagaagagaaggaggccggcgagatctgaacccgtctcccgggtgctgtaaatagtctgataaacgttcacacagtctaaaattaccctttatatttgctgaatacaactcatcttttgtagtttaaaatttctattgttttggagctagctgtgagtttctagaagtgtacagagttgctcctgtgttcccgggtcatgttgagtaggaataaataaatctgatgctgcctcctgaggctgcggggggtttctgctgtcctctgcgtagaggcttttcactgtgaccctgtgccagtgccaccagcacctcacagaaaccgtgacttactcgtgggtcacgtcttgtcttctggcatccagtagatggcagggcacttcctgtcccctgcatctgactgacgggacccaggtgtgcatgggtgtttgtttgctcgctcccacacaaccttctgagtgtctgagctgcccatctcccatggggaaggagggaggggtccccattct

SEQ ID NO: 89403 - DNA, 440 bp, Homo sapiens
  misc_feature (1)...(440): n = a,t,c or g
aaaatatatgttcccaaaagaacttatataagaatgttcatataaagccaaaaatagaaacagcccaaatatccatcaactgaagaatgaataaattattacagtggaatactgctgagtaataaaaaagaatgaactactgttaacaaccatatggatggagctgaagaacagaaggacataccctatgaatgcatttagataaaatccaagaacggatgagaccactctatggtgatcaaaagtgttttcttaagagtagggaggggaattaaccggaaagaggcaaggaaggttttgggtggtggaagtgtaggctcactcccattttgggtagtgattacgtgtttatacacttcttaaaactcatccagcagatgaagatctatacattttattgtatgttaattataccttaattaanaatatatttaaaaccc

SEQ ID NO: 89404 - DNA, 2097 bp, Homo sapiens
tttccgactactttatgcagctcagccatcagtaactgggattgggaactgccaagaatatgaaaatgtaaatcttttattgatttatatccttccttaccttttttgacatggaaaatgccaaagacactggtcaagtttactctcagctccctacctccagtgagggggcctcttattaggaatgaaatatccaagagatgggcggtgctgcaggggagaccaaaactcagaggaggcattcaaacacttctagcaggttgtctactccatccaactcaaaacctattcaatatgaaggcccgagggaatgtgctcacaactccctattaagggaaatcaatataaacccgcccccaccaaccaaaaaaaaaaaaaagaaagaaaactctccctttttaatgtcttctttccccaggctcctggtactttgtcagcaacatactgctttcattcttaaaggtttcattggctgttaaatgagtccttttgcatactcactggagagaggaaatgctttaagttgtcctaagataacatctgcacacagagagtttatctgattccttatcaaccatgatctctatctgaggtcctgtatagtgggatcatttagagatgggggttagggagagtaggagtaactctagagaaaattgtggctcctaaaggaggcagatctttccaaggtggaaaggtaatgaattaaatatatgacatgtaatactgaaaaaatagaaaaatgactaagatacagtctctgtcctctagaactagggcagcctggaaacatatggactataattattttagctatttaaaagaaatgaatgaagaggatcttgagacaggaccagagcattggaatggttgtagggactgaaagctgagttggaaggatcagatcaaagagaaagctgggttggacttacacaagaataccctgatctgatcgcagctgtgactccaaggttttcctttcccatagttgctgtgaccccattggtcaccagagcaactgcatgtcttcaggctgggtattagggctggctgggtctgatgattctacccattttgtgccatctgaggagcatgcgagggttctttctccaaggcactttcggccttccttcttctccccttccgccatctccactggacataagccaatgcctgctctcttctcaccacattcacctggacaaatctgaactaattccttgagacttcaaattagcccttctgagcaagtgggcaggttctgaaacctgtgtgttttgtagcctaatgaattgatggaatgcacatgaacccatcttcacagcatgtgaaagaaccaacctgcctggcagaggtgcagaaatttccagaggactggcctagctataaacaccagcaacatctgcaacacaaaagcccttgaacttctaggcaaggactcatgctaacctagcagtactccagattgagaacgcagatggacaggtgtctcttgagcctgtgttccaagatgtctgtggaaaggattgcaactgtcatcctttggcacactcagtggaacctgtgtgagctacatgttctgctgcattatgggaactcatcaaagggccagattgacatcttgccagaaaaaccagtgttttgaggagcaaaagttttgtgtacttcagtaattgtcacatgtgtcttccacctccttgacatttatttgttaatcatatgatcattttttttttcactttcctttttttctttctcagaagtacttctggggctttgattgcattatttctcttttaatgtatcatttcagtgttggaaagaaaaatctggatctttatgtggggacctattttacatgtagatagttattcagtagatagtaaattatttctcttaagagatatttccttttatttctgtacaataatatgtatgaactcagttactaggggactgtattgtgacattatcaacctttattgctatttaaaaatgatagtttgtagaactgaagatttccattgatgtgaagcccaatttaatgaataagttaaaatattaaactgttgtgatgtcaagagcaaaaaaaaaaaa

SEQ ID NO: 89405 - DNA, 3679 bp, Homo sapiens; identical to SEQ ID NO: 61605

SEQ ID NO: 89406 - DNA, 1950 bp, Homo sapiens
  misc_feature (1)...(1950): n = a,t,c or g
ccgggaggcgctgccgctctgggcagacggttccgggagccgcacggtcccctctccttccccatcctctcccctcccctctccgggttcccccacccacaggagccttgggccgaccactcccccgatggcctcagccacggaggaccccgttctggagcgttatttcaaaggccacaaagctgcgatcacctccttggacctcagccccaacggcaagcaacttgctactgcttcttgggatacctttctcatgctatggaatttcaagccacatgctagagcttacagatatgtgggtcacaaggatgttgtaaccagcgtgcagttttctccacatggaaacttattggcgtctgcctcacgagacagaaccgtgagactctggattcctgataagagaggaaaattctcagaatttaaagctcatacagctccagttcgaagtgtagacttttcacctgatggccagtttctagctacagcttctgaagacaaatccataaaagtatggagcatgtatcgccagcgcttcctgtattccttgtatcgacatacacactgggtacgctgtgcccaatttncacccgatggaagactaattgtgtcatgtagtgaggataaaactattaaaatttgggataccacaaataagcaatgtgttaataacttctcagattccgttggatttgcaaattttgtggactttaaccctagtggtacatgcatagcttcagcaggttctgatcaaactgtgaaagtctgggatgtaagagtgaacaaattactacagcattaccaagttcacagcggtggagttaattgcatatcattccatccttcgggtaactatctcatcacagcttcttcagatggtacccttaagattctggacctcttaaaaggaaggctcatctatacacttcaaggacatacgggacctgtctttactgtttcattttcaaaaggtggagagctatttgcatcaggaggtgcagacacacaggtcttattatggaggactaactttgatgaattgcattgtaaaggtcttaccaaaagaaatctcaaaagattacattttgattcaccaccacatcttcttgatatctacccaagaacaccacatccccatgaggaaaaagttgagactgtagaagatttttttcttcatcttttgagattaatccaaagcttgaggtaatcgatttgcagatctctactccccctgttatggatatcctttcttttgattctaccacaacaacagaaaccagtggtaggactctgccagacaagggtgaagaggcctgtggatatttcttgaacccttccttaatgtcaccagaatgtttgccaacaaccacgaaaaagaaaacagaagacatgagtgacctcccctgtgaaagtcaaaggagcatacctctcgctgtgactgatgctttagagcatattatggaacaactcaatgttttgacacagactgtttcaatcttggagcagcgactgactttgacagaggataagctgaaagactgccttgaaaatcagcaaaagcttttcagtgctgtccaacagaaaagctgaataaaaaattcattttcatttgttgggcagaggcccaataaatgaacaaatgtacatacactcaggaaggtagtacaagatactccatacaacacaaccatgtgctatttatcatggcatttcttaaaagggtgagcaacagaacaaaaggcagaaaaggcatacctaaggactaatttaaacacatatcaatgtgaaggactaatttaaattactatcatttatgattgcagtaataaagtgataagcattcaagcaactctgtattttccccatattaatttanatgtccattntcatttataggccanatcctgccaagaaaagaacccagatctctggatttcactgttaagtcattta

SEQ ID NO: 89407 - DNA, 422 bp, Homo sapiens
cggacgcgtggggaaatgcctcccctgcccacctttcacaaaccaaattatgcccctcctcttaacacattcatccattttgcctggttttttttccttcctagaactcactacagcttgtacttgtgcatgtgtgtgtctgtgcagtgattatgtctgcaactagtacttcaatctcctgatggtagaagctatgtttgttttttcatcaccaagaacccgcacacctgcctagtacactgcaaatgatcaacaaatagttgttttttttaaaaaatgaatagatacatgaatgaacgaatgaatgaatgaatgatttaatatagaagagtattatcttcagaatcctagaagagatattttacatttattaagagttatgaagcccttaatacatggtatcttaactgtttctttatttt

SEQ ID NO: 89408 - DNA, 875 bp, Homo sapiens
ctaatttttgttcttttagtagagatggggtttcaccatgtagtccaggctggtctcgaactcctgacctcaggtgatttgcccccaacttggcctcccaaagtgctaggattataggcatgagctactgcgcctggccagtagtgaactattttaaataatgttattggtgaacaccctttcatgtatacattttggcatacctgacgtatttttcttaacatgcctagaagcagaattacagagtcaaagagtatgtacttttgggggacttttggatacagagtgccagataaacccgcagtagtgttccagtttataatgcctatagccatgtgaaaataccaagatggtgacattttaatatctaaaatagacagtgccatcggatacagccattagttctaagttgaacttctgaattgcttttggttgccaacttcagtattatattcaaagattctagcatattacgaaaatatcctttgctgtttttcatctcttgatccttctaagataaattggtgtgtgatttgttgatagtatctttgtgtgaggattgtttttcaaaaatttaagcttgaggtgttttgttttgctttttaacaacttttgggtggctgtttttgccaacagtacaggatttgccttctttatattttggctaactggaagctaggaacagaagggtaattaggattggggcccgacccccccccagggatcttattttgtcttctgcaaggcccacctttcgcttcttaaccaaatgacaccttctggggtgtgggccatacgcttttcccgggagcgagaggggcctcgaaatcctttcccaaaggcctacaacccgggcgggaaggaggctcccctct

SEQ ID NO: 89409 - DNA, 473 bp, Homo sapiens
ttttaaatgatggttgtgaccaactacagttcacatttttcactagtggatcacactctgcagcattaaaatcaccgtgaaatagattaattagaataaatgaagtgttcttttttcattctgtttgtacagtagatattattggattattttataaaatacccattttataaattggatggtatgttataaatggatagtaggatttttcctttcttcattttgtaccaagagaataaaaaacactcctgttcagtacatctctagcaagcctatttcaacatccaatgtctcaaataattaatttttctatactttagtcacccttacacctaaacgttacagtgcttcagtataacttctatgtaaacattattaatcccatttacagatgggaaccagagtgttgggagacaggtcatggatttctcatgttcctgcacagtctaagtgttctaaggtcgacgcggccg

SEQ ID NO: 89410 - DNA, 1105 bp, Homo sapiens
ttttttttttttagacatatccccaattttattccctttgtccaacattccgagagggaacggggcaaatgagtcaatgttgcccctcaaaaccatcaagtaggggcctttgggggtcttcagttgatcaaccagggtgatagacccctaccccttcctcatggtcctggcttgtcacaattaatgggggaaagttttccagaaggggattccgggcttctcaccgctcatcagggcaccttcccaaaacgttctcagcaaaaagtctgcacttctcagagttaaatacaggagaggggagactccttgaggagccagaagtgggtatgttctcaggggtcaagagaagggcgtctcaggctctccctgtccaccgggggtcgtcctggctccccgtaccttcgggcaagtagctcttggcttgacactgtccagcccgccagcgtcccaggccgccccaagccctcatgggggaggagcaccgacctgtctccaagcatcggaaaaggcgggcctcccttgccgtccatcacggggctctctaggccccctgcgtcgccaaggaggagtctctgacatccccaattcgtcaagctagtctcttaagacctctcaccttaggcgggttccccagtccccccatgcagtcaggcgagcctcctggctccaccacgccatcgagcgagttcggctcttcgcctgtcaccgtccgtcggggcgggtctccggtgcccccgtgctgtcgtgggggttccttggactgtcgccgtcgtcaggctgggaacccatcgctgccaggctccccggtcggggcccgcgggcgtacgaaggcgcccatggcggtggcgtggcccgagcgtagcagctgcacgcttgcgccgcccgcggcggtacaggtactcgatgcgcagcacgtcggaccgcggcaggcccgcatgctgccggaactctgcccgcatcatcgcctcggcgcccggcttcccacgcccggcgcgcagcagatcgcggtacaggctcagaacctgcctctgcagccggctgtgccggctcatgaccgcggctaagcagagacgctcagcgaacgacctgcgaaccgggagccgcc

SEQ ID NO: 89411 - DNA, 9654 bp, Homo sapiens
cagcgactcctctggctcccgagaagtggatccggtcgcggccactacgatgccgggagccgccggggtcctcctccttctgctgctctccggaggcctcgggggcgtacaggcgcagcggccgcagcagcagcggcagtcacaggcacatcagcaaagaggtttattccctgctgtcctgaatcttgcttctaatgctcttatcacgaccaatgcaacatgtggagaaaaaggacctgaaatgtactgcaaattggtagaacatgtccctgggcagcctgtgaggaacccgcagtgtcgaatctgcaatcaaaacagcagcaatccaaaccagagacacccgattacaaatgctattgatggaaagaacacttggtggcagagtcccagtattaagaatggaatcgaataccattatgtgacaattacactggatttacagcaggcgttccagatcgcgtatgtgattgtgaaggcagctaactccccccggcctggaaactggattttggaacgctctcttgatgatgttgaatacaagccctggcagtaacatggctgttacagaacacggaagccctaacgccttaaccaaattaatccccggaattggggcaccgtcaaaatgcccaagattgagtaggtcatctgcacttcattttactccaagatacaccccttagaaaatggagagattcacatctctttaatcaatgggagaccaagtgccgatgatccttctccagaactgctagaatttacctccgctcgctatattcgcctgagatttcagaggatccgcacactgaatgctgacttgatgatgtttgctcacaaagacccaagagaaattgaccccattgtcaccagaagatattactactcggtcaaggatatttcagttggagggatgtgcatctgctatggtcatgccagggcttgtccacttgatccagcgacaaataaatctcgctgtgagtgtgagcataacacatgtggcgatagctgtgatcagtgctgtccaggattccatcagaaaccctggagagctggaacttttctaactaaaactgaatgggaagcatgcaattgtcatggaaaagctgaagaatgctattatgatgaaaatgttgccagaagaaatctgagtttgaatatacgtggaaagtacattggagggggtgtctgcattaattgtacccaaaacactgctggtataaactgcgagacatgtactgaaggcttcttcagacccaaaggggtatctccaaattatccaaggccatgccagccatgtcattgcgatccaattggttccttaaatgaagtctgtgtcaaggatgagaaacatgctcgacgaggtttggcacctggatcctgtcattgcaaaactggttttggaggtgtgagctgtgatcggtgtgccaggggctacactggctacccggactgcaaagcctgtaactgcagtgggttagggagcaaaaatgaggatccttgttttggcccctgtatctgcaaggaaaatgttgaaggaggagactgtagtcgttgcaaatccggcttcttcaatttgcaagaggataattggaaaggctgcgatgagtgtttctgttcaggggtttcaaacagatgtcagagttcctactggacctatggcaaaatacaagatatgagtggctggtatctgactgaccttcctggccgcattcgagtggctccccagcaggacgacttggactcacctcagcagatcagcatcagtaacgcggaggcccggcaagccctgccgcacagctactactggagcgcgccgcgtccctatctgggaaacaaactcccagcagtaggaggacagttgacatttaccatatcatatgaccttgaagaagaggaagaagatacagaacgtgttctccagcttatgattatcttagagggtaatgacttgagcatcagcacagcccaagatgaggtgtacctgcacccatctgaagaacatactaatgtattgttacttaaagaagaatcatttaccatacatggcacacattttccagtccgtagaaaggaatttatgacagtgcttgcgaatttgaagagagtcctcctacaaatcacatacagctttgggatggatgccatcttcaggttgagctctgttaaccttgaatccgctgtctcctatcctactgatggaagcattgcagcagctgtagaagtgtgtcagtgcccaccagggtatactggctcctcttgtgaatcttgttggcctaggcacaggcgagttaacggcactatttttggtggcatctgtgacccatgtcagtgctttggtcatgcggagtcctgtgatgacgtcactggagaatgcctgaactgtaaggatcacacaggtggcccatattgtgataaatgtcttcctggtttctatggcgagcctactaaaggaacctctgaagactgtcaaccctgtgcctgtccactcaatatcccatccaataactttagcccaacgtgccatttagaccggagtcttggattgatctgtgatggatgccctgtcgggtacacaggaccacgctgtgagaggtgtgcagaaggctattttggacaaccctctgtacctggaggatcatgtcagccatgccaatgcaatgacaaccttgacttctccatccctggcagctgtgacagcttgtctggctcctgtctgatatgtaaaccaggtacaacaggccggtactgtgagctctgtgctgatggatattttggagatgcagttgatgcgaagaactgtcagccctgtcgctgtaatgccggtggctctttctctgaggtttgccacagtcagactggacagtgtgagtgcagagccaacgttcagggtcagagatgtgacaaatgcaaggctgggacctttggcctacaatcagcaaggggctgtgttccctgcaactgcaattcttttgggtctaagtcattcgactgtgaagagagtggacaatgttggtgccaacctggagtcacagggaagaaatgtgaccgctgtgcccacggctatttcaacttccaagaaggaggctgcacagcttgtgaatgttctcatctgggtaataattgtgacccaaagactgggcgatgcatttgcccacccaataccattggagagaaatgttctaaatgtgcacccaatacctggggccacagcattaccactggttgtaaggcttgtaactgcagcacagtgggatccttggatttccaatgcaatgtaaatacaggccaatgcaactgtcatccaaaattctctggtgcaaaatgtacagagtgcagtcgaggtcactggaactaccctcgctgcaatctctgtgactgcttcctccctgggacagatgccacaacctgtgattcagagactaaaaaatgctcctgtagtgatcaaactgggcagtgcacttgtaaggtgaatgtggaaggcatccactgtgacagatgccggcctggcaaattcggactcgatgccaagaatccacttggctgcagcagctgctattgcttcggcactactacccagtgctctgaagcaaaaggactgatccggacgtgggtgactctgaaggctgagcagaccattctacccctggtagatgaggctctgcagcacacgaccaccaagggcattgtttttcaacatccagagattgttgcccacatggacctgatgagagaagatctccatttggaacctttttattggaaacttccagaacaatttgaaggaaagaagttgatggcctatgggggcaaactcaagtatgcaatctatttcgaggctcgggaagaaacaggtttctctacatataatcctcaagtgatcattcgaggtgggacacctactcatgctagaattatcgtcaggcatatggctgctcctctgattggccaattgacaaggcatgaaattgaaatgacagagaaagaatggaaatattatggggatgatcctcgagtccatagaactgtgacccgagaagacttcttggatatactatatgatattcattacattcttatcaaagctacttatggaaatttcatgcgacaaagcaggatttctgaaatctcaatggaggtagctgaacaaggacgtggaacaacaatgactcctccagctgacttgattgaaaaatgtgattgtcccctgggctattctggcctgtcctgtgaggcatgcttgccgggattttatcgactgcgttctcaaccaggtggccgcacccctggaccaaccctgggcacctgtgttccatgtcaatgtaatggacacagcagcctgtgtgaccctgaaacatcgatatgccagaattgtcaacatcacactgctggtgacttctgtgaacgatgtgctcttggatactatggaattgtcaagggattgccaaatgactgtcagcaatgtgcctgccctctgatttcttccagtaacaatttcagcccctcttgtgtcgcagaaggacttgacgactaccgctgcacggcttgtccacggggatatgaaggccagtactgtgaaaggtgtgcccctggctatactggcagtccaggcaaccctggaggctcctgccaagaatgtgagtgtgatccctatggctcactgcctgtgccctgtgaccctgtcacaggattctgcacgtgccgacctggagccacgggaaggaagtgtgacggctgcaagcactggcatgcacgcgagggctgggagtgtgttttttgtggagatgagtgcactggccttcttctcggtgacttggctcgcctggagcagatggtcatgagcatcaacctcactggtccgctgcctgcgccatataaaatgctgtatggtcttgaaaatatgactcaggagctaaagcacttgctgtcacctcagcgggccccagagaggcttattcagctggcagagggcaatctgaatacactcgtgaccgaaatgaacgagctgctgaccagggctaccaaagtgacagcagatggcgagcagaccggacaggatgctgagaggaccaacacaagagcaaagtccctgggagaattcattaaggagcttgcccgggatgcagaagctgtaaatgaaaaagctataaaactaaatgaaactctaggaactcgagacgaggcctttgagagaaatttggaagggcttcagaaagagattgaccagatgattaaagaactgaggaggaaaaatctagagacacaaaaggaaattgctgaagatgagttggtagctgcagaagcccttctgaaaaaagtgaagaagctgtttggagagtcccggggggaaaatgaagaaatggagaaggatctccgggaaaaactggctgactacaaaaacaaagttgatgatgcttgggaccttttgagagaagccacagataaaatcagagaagctaatcgcctatttgcagtaaatcagaaaaacatgactgcattggagaaaaagaaggaggctgttgaaagcggcaaacgacaaattgagaacactttaaaagagggcaatgacatactcgatgaagccaaccgtcttgcagatgaaatcaactccatcatagactatgttgaagacatccaaactaaattgccacctatgtctgaggagcttaatgataaaatagatgacctctcccaagaaataaaggacaggaagcttgctgagaaggtgtcccaggctgagagccacgcagctcagttgaatgactcatctgctgtccttgatggaatccttgatgaggctaaaaacatctccttcaatgccactgcagccttcaaagcttacagcaatattaaggactatattgatgaagctgagaaagttgccaaagaagccaaagatcttgcacatgaagctacaaaactggcaacaggtcctcggggtttattaaaggaagatgccaaaggctgtcttcagaaaagcttcaggattcttaacgaagccaagaagttagcaaatgatgtaaaagaaaatgaagaccatctaaatggcttaaaaaccaggatagaaaatgctgatgctagaaatggggatctcttgagaactttgaatgacactttgggaaagttatcagctattccaaatgatacagctgctaaactgcaagctgttaaggacaaagccagacaagccaacgacacagctaaagatgtactggcacagattacagagctccaccagaacctcgatggcctgaagaagaattacaataaactagcagacagcgtcgccaaaacgaatgctgtggttaaagatccttccaagaacaaaatcattgccgatgcagatgccactgtcaaaaatttagaacaggaagctgaccggctaatagataaactcaaacccatcaaggaacttgaggataacctaaagaaaaacatctctgagataaaggaattgataaaccaagctcggaaacaagccaattctatcaaagtatctgtgtcttcaggaggtgactgcattcgaacatacaaaccagaaatcaagaaaggaagttacaataatattgttgtcaacgtaaagacagctgttgctgataacctcctcttttatcttggaagtgccaaatttattgactttctggctatagaaatgcgtaaaggcaaagtcagcttcctctgggatgttggatctggagttggacgtgtagagtacccagatttgactattgatgactcatattggtaccgtatcgtagcatcaagaactgggagaaatggaactatttctgtgagagccctggatggacccaaagccagcattgtgcccagcacacaccattcgacgtctcctccagggtacacgattctagatgtggatgcaaatgcaatgctgtttgttggtggcctgactgggaaattaaagaaggctgatgctgtacgtgtgattacattcactggctgcatgggagaaacatactttgacaacaaacctataggtttgtggaatttccgagaaaaagaaggtgactgcaaagggatgcactgtcagtcctcaggtggaagatagtgaggggactattcaatttgatggagaaggttatgccattggtcaagcccgtcccattcgctggtaccccaacatctccactgtcatgttcaagttcagaacattttcttcgagtgctcttctgatgtatcttgccacacgagacctgagagatttcatgagtgtggagctcactgatgggcacataaaagtcagttacgatctgggctcaggaatggcttccgttgtcagcaatcaaaaccataatgatgggaaatggaaatcattcactctgtcaagaattcaaaaacaagccaatatatcaattgtagatatagatactaatcaggaggagaatatagcaacttcgtcttctggaaacaactttggtcttgacttgaaagcagatgacaaaatatattttggtggcctgccaacgctgagaaacttgagtatgaaagcaaggccagaagtaaatctgaagaaatattccggctgcctcaaagatattgaaatttcaagaactccgtacaatatactcagtagtcccgattatgttggtgttaccaaaggatgttccctggagaatgtttacacagttagctttcctaagcctggttttgtggagctctcccctgtgccaattgatgtaggaacagaaatcaacctgtcattcagcaccaagaatgagtccggcatcattcttttgggaagtggagggacaccagcaccacctaggagaaaacgaaggcagactggacaggcctattatgtaatactcctcaacaggggccgtctggaagtgcatctctccacaggggcacgaacaatgaggaaaattgtcatcagaccagagccgaatctgtttcatgatggaagagaacattccgttcatgtagagcgaactagaggcatctttacagttcaagtggatgaaaacagaagatacatgcaaaacctgacagttgaacagcctatcgaagttaaaaagcttttcgttgggggtgctccacctgaatttcaaccttccccactcagaaatattcctccttttgaaggctgcatatggaatcttgttattaactctgtccccatggactttgcaaggcctgtgtccttcaaaaatgctgacattggtcgctgtgcccatcagaaactccgtgaagatgaagatggagcagctccagctgaaatagttatccagcctgagccagttcccaccccagcctttcctacgcccaccccagttctgacacatggtccttgtgctgcagaatcagaaccagctcttttgatagggagcaagcagttcgggctttcaagaaacagtcacattgcaattgcatttgatgacaccaaagttaaaaaccgtctcacaattgagttggaagtaagaaccgaagctgaatccggcttgcttttttacatggctcgcatcaatcatgctgattttgcaacagttcagctgagaaatggattgccctacttcagctatgacttggggagtggggacacccacaccatgatccccaccaaaatcaatgatggccagtggcacaagattaagataatgagaagtaagcaagaaggaattctttatgtagatggggcttccaacagaaccatcagtcccaaaaaagccgacatcctggatgtcgtgggaatgctgtatgttggtgggttacccatcaactacactacccgaagaattggtccagtgacctatagcattgatggctgcgtcaggaatctccacatggcagaggcccctgccgatctggaacaacccacctccagcttccatgttgggacatgttttgcaaatgctcagaggggaacatattttgacggaaccggttttgccaaagcagttggtggattcaaagtgggattggaccttcttgtagaatttgaattccgcacaactacaacgactggagttcttctggggatcagtagtcaaaaaatggatggaatgggtattgaaatgattgatgaaaagttgatgtttcatgtggacaatggtgcgggcagattcactgctgtctatgatgctggggttccagggcatttgtgtgatggacaatggcataaagtcactgccaacaagatcaaacaccgcattgagctcacagtcgatgggaaccaggtggaagcccaaagcccaaacccagcatctacatcagctgacacaaatgaccctgtgtttgttggaggcttcccagatgacctcaagcagtttggcctaacaaccagtattccgttccgaggttgcatcagatccctgaagctcaccaaaggcacaggcaagccactggaggttaattttgccaaggccctggaactgaggggcgttcaacctgtatcatgcccagccaactaataaaaataagtgtaaccccaggaagagtctgtcaaaacaagtatatcaagtaaaacaaacaaatatattttacctatatatgttaattaaactaatttgtgcatgtacatagaattctttctgtattcagatggtgctaattcagactccagactgaattttaattcaagttctttctcaagtctataaataatattaaactgattatttcattctaaaaaaaaaa

SEQ ID NO: 89412 - DNA, 1846 bp, Homo sapiens
ttttttttttttaaatttctgttgtttatttttttaaaaaaattaggtaaggtagcaagatatattagcatacaaaatcagtagcttttatatagagagcaataaccagttagaagacataatggcagaggaaatctcatttactagcaaataaattaaatacttagggataagcttagcaagaaatgcacaaaacctacacaaggataattttaaaacactgctaaaaggcacaaaatagacttgaataaatggaaatacatctcctattcttggataggatgacaccacattttaaagatgttagttctctctaaatcagttaatatcatataatatcaataaaataccaatgtacccttaaaaaatgaatttagacaagttggatacttaaagttcacatggaaaaacaaacatgtatgaatagccagaagcacaataggaaaaattataaggggggactagcccttgccagttgttaaaacatactataaagtctctataattaaaacagtgtgggtaccctgccacaagtagaccagtggaacagaaaacccagaaagaccccaagtacatatggaccccggattgaataccgaacccagaaaaacaacattactgggaaaacagcctacaattcaaataaagtatgtagttaataggattgtgccaatgttaatttcctagtttcaataattgtacccattggtatgtaagttaccattagaagaagctgagagaagggcacacaggaaatctatttttgcagattttctgttaagtctaaaattattttttttaaaaaaggttttggatcaagagcccctgagaatgtgaagagggggctctgtgtcaggctaacatggaacaccagagggaataaatcgccactgctcacattccctgagctggcctcactttatctctggctggtgagcttttgcttggattctataaaatacacgtctttacaataaattccattccatgctttaaaatgtaaaataaaaaattggtgttacaaaaagtttctgttaattctccaaatgcatttctttgttttcattgggtctttaaaagtatttagtctgtcatgctaattgaaatacttacttcatttcttctatgacaattgttatattagatttcttttgatgtcattttttggcaaactataccttcctggaaaattatccatttaatccaagtttttaaattgtttgcatacagttgagcaaagaatattttatgactcttacctattcaatacttggtaattcttattttgtgtttgtcttctcttgtaatgttagctaaaatgttacatattttactacatattttaaaaattagctttgtttcctcatttttctaattaatttttcttgattcttttagcctgcctttaaaagattccttttcctaatattttgagttatatgacatttatcttattttttaatacataaattttagggcaatgaattttcctctgagcactgttttatttgtatctcagaggaacaagtttatattttagatatgaaatgtttttttaatactttgcatttcctaatcaacccaagaatagttgaagagcttaaaaacattttggattgcagatgagcagtgttttctggctttaatttattgcatttttttttctgaccacctatcctcaaattctaagtttattgcatttttatcagcaaatgccatctgttgttccttttttctgttctgaaacttatgttttctgtacgctctaatacacagtcaaatggggaaatgtttcatggatactttgaagtgtagttaccacttttagggtaaagtctaatatgca

SEQ ID NO: 89413 - DNA, 5701 bp, Homo sapiens
ggtctacgaagaccaagtgggcaagtttgattggagacagcaatatgttgggaaggtcaagtttgcctccttggaattttcccctggatccaaaaaattggttgtaacccacagaacaacaatgtgattgcagcattcaaattccccgaaactggggagatcttgtggcgcccatgttgaacaagggcacggcagaaggggctgtggatgcccatgctgctgcacggacaggatgtgatcactgtgtccaatggaggccgaatcatgcgttcctggggagactaacatcgggggcctgaactgggagataaccctgggacagtggcagtttccagggcacttgggctcggttggcctgcaggagtctgtaaggtacatccgcagtcctgaagaagactacacttgccctccatcacctctccagtgggcacctcaagtgggtggaacatcttcccagaaagttgacagcttccattaccagatggtgtaatcttaacggctctggggtggtgtgggcccctcggagttgttcccttcagcccatgtgaacattgtcaagtttaatgtggaagatggagagattgttcagcaggttagggtttcaactccgtggctgcagcacctgtctggagcctgtggtgtggtggatgaggctgtcctggtgtgtcctgacccgagctcacgttccctccaaactttggctctggagacggaatgggagttgagacagatcccactgcagtctctcgacttagaatttggaagtggattccaaccccgggtcctgcctacccagcccaacccagtggacgcttcccgggcccagttcttcctgcacttgtccccaagccactatgctctgctgcagtaccattatggaacgctgagtttgcttaaaaacttcccacagactgccctagtgagctttgccaccactggggagaagacggtggctgcagtcatggcctgtcggaatgaagtgcagaaaagtagcagttctgaagatgggtcaatggggagcttttcggagaagtctagttcaaaggactctctggcttgcttcaatcagacctacaccattaacctatacctcgtggagacaggtcggcggctgctggacaccacgataacatttagcctggaacagagcggcactcggcctgagcggctgtatatccaggtgttcttgaagaaggatgactcagtgggctaccgggctttggtgcagacagaggatcatctgctacttttcctgcagcagttggcagggaaggtggtgctgtggagccgtgaggagtccctggcagaagtggtgtgcctagagatggtggacctccccctgactggggcacaggccgagctggaaggagaatttggcaaaaaggcagcaattcaagatggcttgctggggatgttcctgaaacgcctctcgtctcagcttatcctgctgcaagcatggacttcccacctctggaaaatgttttatgatgctcggaagccccggagtcagattaagaatgagatcaacattgacaccctggccagagatgaattcaacctccagaagatgatggtgatggtaacagcctcaggcaagctttttggcattgagagcagctctggcaccatcctgtggaaacagtatctacccaatgtcaagccagactcctcctttaaactgatggtccagagaactactgctcatttcccccatcccccacagtgcaccctgctggtgaaggacaaggagtcgggaatgagttctctgtatgtcttcaatcccatttttgggaagtggagtcaggtagctcccccagtgctgaagcgccccatcttgcagtccttgcttctcccagtcatggatcaagactacgccaaggtgttgctgttgatagatgatgaatacaaggtcacagcttttccagccactcggaatgtcttgcgacagctacatgagcttgccccttccatcttcttctatttggtggatgcagagcagggacggctgtgtggatatcggcttcgaaaggatctcaccactgagctgagttgggagctgaccattcccccagaagtacagcggatcgtcaaggtgaaggggaaacgcagcagtgagcacgttcattcccagggccgtgtgatgggggaccgcagtgtgctctacaagagcctgaaccccaacctgctggccgtggtgacagagagcacagacgcgcaccatgagcgcacctttattggcatcttcctcattgatggcgtcactgggcgtatcattcactcctctgtgcagaagaaagccaaaggccctgtccatatcgtgcattcagagaactgggtggtgtaccagtactggaacaccaaggctcggcgcaacgagtttaccgtactggagctctatgagggcactgagcaatacaacgccaccgccttcagctccctggaccgcccccagctgccccaggtcctccagcagtcctatatcttcccgtcctccatcagtgccatggaggccaccatcaccgaacggggcatcaccagccgacacctgctgattggactaccttctggagcaattctttcccttcctaaggctttgctggatccccgccgccccgagatcccaacagaacaaagcagagaggagaacttaatcccgtattctccagatgtacagatacacgcagagcgattcatcaactataaccagacagtttctcgaatgcgaggtatctacacagctccctcgggtctggagtccacttgtttggttgtggcctatggtttggacatttaccaaactcgagtctacccatccaagcagtttgacgttctgaaggatgactatgactacgtgttaatcagcagcgtcctctttggcctggtttttgccaccatgatcactaagagactggcacaggtgaagctcctgaatcgggcctggcgataaagaacaaagactgtgcctaaaagtggagagccaggggagtgtgggtcagataagcagctacagctgcagtttggtggattggtggagtatgtgtgtgtgtcagtgctcagctaagaactgtagggaagatggatgaccttcacgcagaactcctttttgggatatacatgaatgcagaaaggatccttacatgggagagaagacagaactctctcaagctgacactctcagagattcctgatgggcctttctctttgaagtccaaagggcgtctgcattgcttcctttctttgcccatccatgaatgttctgttttgttttgttttttttaataagaattccggctgatttttgtgaggcctgtttaaattgactttactttgccttttgtgtttctcaattttatctagaaatctttctgactttttccatctcttgcttcaaagtaagaggggaactctccttgccgactccaccttataggtacatttggtgttttgcactgggaagaaataggatccatccttagctgaggcttgaggactgatccagcctctcatggcttccctccaaagtaacttagggttgagggatctatatgtgatgtcaaaacttactttaaacctctagtttcgtgctgtcatttattaggctgggccaccaaatctttgtttcaatttatcagaagccaagtgcatactagcgtcttgtttgttgcccattgcctatacttttcacctgagatgtgtgagttggggccttttaaaaactactgaattgtctgagccttgaagacatttccagggagaagagataatctctcatttcacccacaggctggtctaatcataacctagttaaagatgtccttgtttaagaaccccattatttatttttagtttttaatataaattaacatgtgggtcattatatttctccttaaatgaggaaattttaaattttattgatctaacctttgaagctttaaaaaaggagaaagagggtaggggtgggaaactggcatactgtgtgtatagcactgccgattggctaggccactgtgtctctgctacaaattaaagaaatcctaaaagttttccttggtcatagagttggggaatgacagaatttttctttgttgtgaaatgtatgtacagagtagaccattctctaggccctgtgggtggaaagaggtacactcgaatgtttgcataaagcaagtgacaaatgacactgtttaagtcctcttttgtgtcttagaagatcattttgaggctattttcacattagaggggataaaagcagtgaagacatggagtaagtgtattttattttagtaaggaaaggtcagtttaatcatatatgggttggttaggttatctaaaaatttgtcatctttctatggtcatatgctgatggtagattatggcagagaaggaagaggaaatgacaaccattttattaattgtcagtttgatattgagtgactgaatgtctaagaatctccagaaaaaaacaggcatctatcatcctgacccaaggcatattttaacataacctgggagaagagagttaagtacaagttaaaaaaaattctgccctagttttgagaaagcctggctggaattctgactgtcttacatacatatgtgcaaggttagcctgcaagattctagtttttatttaccagtgtgccagaatctgaaacaagctactgggagggaaggtatttgtcctttagtaaaattccctgtatttcagctgtaatcaaagttacctcaaagcaggtgctttttttttttttgagaccctggctcaaaaacaaaaacaaaaactagtttgttttagtattcattaattacgtatatgagcactggtagtctagtgtttgttcttgtatacagtgttttcttaaatgagatgatgctatttaattctgttacttgttttttcaactaatggatcttttaaagttttttatttaaattttttgtgggtacatattaggtacatatacttatggggtacatgagatgtttttataaaggctcagctaatgtatcttgaatatcatgtattcataaagatgactgaaatagtttctggaacaaagtctgatagaaaaaatactcaattcctaatttaagtgttagagactttaatgtaagctatctaatctgaactagtttcattatttgtgtgtgggtacatgttatgtgctccgtaaggcatctttcaatttgaaaatttcataattgtaatttcactgcctttataaattgctttttttttggaggcagggtctctgtcacccaggctggagagcagtggcacagtcatagctcactgcagcctcgaacacctgggctgaagtgatcctccctccttagcctcccaaagtgccgggattacaggcatgagctactgcacctggcccataaattgtcatacttttaaagagcctattacacaaagtatcatcagaatcatcccaagactcatttcctgattcctaattatttaaaattttgcttttaggcgaggcatggtggctcgggcctataatcccagcactttgggaggccagggcaggcggatcatttggggtcgggagtttaggaccagcctggccaacatggtgaaacctgaagccccatctctaccaaaaaaataaaggaatttagccgggtgtggtggtgcatgcctgtagtcccggctacttgggaggctgaggcaggagaatcgaacccagga

SEQ ID NO: 89414 - DNA, 738 bp, Homo sapiens
ggcacgaggggagaagtgaggctttccttgtgttctgaaatcactatatttcatgcctgaattagcctgtctgagctggaattcagagtgaatctttggatccatgttttaaagggacaactatagagactcccattgctttttctatgcacatagtttttgtgtggtttttactggaatcttattacagttacagttaccatcccatggaccaacatggtccatcgagggccttgcagtgagagggtcagtccatagatgctggagccacatgacgtgggttcaaatttcaactctcccacttattagtgtgtgaccttggacaggctgcttcactgctccggccctcagttttctaatttgcaaaatgggggagattaatactacctatctccagaggtttgatgggaggattaaataataggcctaaaacacctagagcagtgtctggcactgagtaccccattagctggaatttatttcaattgcatgtttgaaaaaatttaaaccctttagaaattttattttaacaataatagcatgacaagtcactttaagcccctctattcttccacttttaacccccactccttttttcccccagggccaactcgttcaacaggccacttttgccccacattcatttccaaaagtctccgccttttcgttcaccccctcctcccgcctcttaccaacccgagagtttaccctgccctcgtgtgccctcacttcggaact

SEQ ID NO: 89415 - DNA, 1402 bp, Homo sapiens
  misc_feature (1)...(1402): n = a,t,c or g
tttcgagagcttttctgcatatttttgaaaaacatagtacatcagtgtgtagaaaaaaattatttgaactaaatcagtttgttgacaatggtgtatttatatacaatgactaaatcagtggtgtatttatgtgtaatactagaaactgcacatgtcaacaaccccactacaacctgataataaatatcttacatgatgtgacagttaacgtaaagggttgtcttaccaaagtaacgaaatgtttaatgggaacatattttaaaatgcatcaatacttaaaataattaattgtagtagtcatagtatgtcagcttttaataatcttgggagtggctactatattgtacggcgcaggtcttattgtcattttctcgactttggcccaaattgataaagaaggtgtgattgaaccagacactgatgctcctcaagaaatgggagatgaaaatgcggaggtaagttcggggacttgatttcctgcttgttctaagaaatgtgaaaggtcctgctgttgcaatgattttatgacacgattcttccaggaaaagcgcatagtaaatctttctctgacttcaggcgttttaggcaagcattgtattttactacttaaaatactaatgaaaataaatactgttactttctgttttatctgttttttaagtttgcatctggtgtgactgcttgcactgtaacgcanaattcacttaaaatacatacctattagtggagttgctcttgatggaatatctaatgccaaattgtattacagaatggtttgtcataacaggccctcaagggagtgaaaattggttcttgggaggagggcttaaaaaaaattctatatattacaatggttagtggtcctccaaagactcatagaatattaatatgtagtgtatctgtggtattaaaattggggatatggaaatgaggaaaagatgtctaaaaaggctccttagtgtctgataaaaatttgagaaacactctaatatagtaatagcagttttaaaagattggtttttatcctcaaaacttgatattatcagatttcatctttgccaagtattgtgggaaatggtatctttttgtggcttttaatttgcattttcctggccaaacagggggggtcccgcctgtaattccagccctttgggaggccgaggggggggggtcatttaaggtccggagttttaggccagcctggccaacatggggaaaccccctttttttttataattcaaaaataagcccggccttatggggcccgcccgtaatcccgtctgctttggggggtgaggcgggaaaatccctttagccccggaggcaaaggttccaaagaggtgggattgcccccctgccctccagggtgaggggcagagcaaaactttttttaaaaaaaaaa

SEQ ID NO: 89416 - DNA, 1378 bp, Homo sapiens
  misc_feature (1)...(1378): n = a,t,c or g
tttttttttttggtgagataaccaaggactcttttttactcttctcacacctttgaagtgggagcctcttgagtcaaatcagtaagaatgcggctcttgcagctgagggtctggggggctgttggggctgcccaaggcagagaggggctgtgacaagccctgcgggatgataactttaaaagggcatctcctgctggcttctcacttgggcaacttaacaccggcaaggaaaaaaaaggggaagggttctgttctctcctgcgtgctttggagagcttggggggctataaaaagaggcggcactgggcagctgggagacagggacagacgtaggccaagagaggggaaccagaagaggaaccagaggggagagacagagcagcaagcagctggacttgctccttgaacgacgccagcatgagcttccttcttccaccaccaccgtggagctttcctccttttactggcaattccaggctcctagggtcaagaccagagcttaatccattggtcaaatgccgtgtccaacgcagaccctactggatttaaaagaattgactggaccattttggaagaaaagatgcctttaggaggtgaaggtcgtgcccccacaagtgcttcagtgagccgaattgaagaagcgggggctgcttctcagccccttcctttgaggtgcctccctggaccggggaagtcaagcccagccccagagagatggaggtgccctcggggcaggggnccctgggaattccttctgattcgattttggccctcctaaaaaagcaaacttgaagggcgctgctcaattggcccctcggaagcctgcggagatccagctgcttcgggggccaggatggacaggatttgaagcccagaagcggactgggctgtaacagcttccggtaccgaagataacagccagggaggacaagcagggctgggcctagggacagactgcaagaggctcctgtcccctggggtctctgctgcatttgtgtcatcttgttgccatggagttgtgatcatcccatctaagctgcagcttcctgtcaacacttctcacatcttatgctaactgtagataaagtggtttgatggtgacttcctcgcctctcccaccccatgcattaaattttaaggtagaacctcacctgttactgaaagtggtttgaaagtgaataaacttcagcaccatggacagaagacaaatgcctgcgttggtgtgctttctttcttcttgggaagagaattcaggccgatattcctgtcgttttactctttgtcagaggaaagaattctgagtttttcttcttcctttcatttcaccctccttttttggtaggtggttgggaggcctaattcatctagtgggtttttt

SEQ ID NO: 89417 - DNA, 1308 bp, Homo sapiens
atgtaccaattgttaacacttttgccacattggctgaaccatttgaaaagccttttgtcttcctggagtcagtggtgaggctggtgatggatgagggttatctgatggggaatggacctcccataagggaagtagtatcagaaaagtattcttgtgaggaaaacacagaggagaacaaagagagcaggttgatggttctaaccttggagagtgtggaggaaaacagggcactgacagcagcagagggcatgacatactcctttgcaggatttcttcgtttccaagcaaataccctgtacatcctggactggtggagccagcgagaggctggagctggagcctatcggctgggccccgcctcgcctcaggggacactgctcggagacaaagcccggggccctggccaagggcaccgcggaggcgccttcccagacgcggatgacgtggctgtcctgactgacgggaaggaaaatggctgctcgcccagctccatcaccagcagcggcttgtggacaactcgcccacgcatccctggtggcggtccctgaagcccccgcggggtcaggagcacgagcacttgccaggggacgcctggggcgcccctcctcccagaagctcccgcggaagactggagcaggccacctggctgcggataatgggaaccacagagtgagagaactccacatcggcctgaaggaagagcatgtgaaggaagactcagaaacagagcctcatcaggaagaggaagaggaggaagaagaagaagaagaggaagaggaagaggaggaggaggaggaggaagaaaagaagaagaagaagaaacagtttctccactggagacacaccttgagttcagggagacatctctccacacttggaccatcttcacagaccctggcagcagtcgatgggcaaagctgtgtaacagtgatggccgtttaccattgcctggtattcattgtccagcacgatgatgtggagctcaaatactctgccatcctcagcgggcatattgttggatctctcctcacacttccaggcccacactcatggctgttcatgatcacccaatggccaaagtacactcagaaatggaaggcgatgtctgagtgctcatcgtccccctgtggaaatgcacctgcagctgtgggttgttgatgaaagggaggattggtgtccctctctcatgcaagaaccagtagacaaagacacaggccatgtgtggggcatgggcaacagtgatactgttgtctccctctgggcagctcctatgaattgtgaccagtcttctccatggttacttctaag

SEQ ID NO: 89418 - DNA, 1959 bp, Homo sapiens
ttttttttttttgcaaaacattcttttattaaaagaacaagtgctgtttacgaactgcccttcgtacaaataacatccgttatacaaagatacaagatccgggttatgcacaattccaggcttggaggtggcaggggggcatcgcctttgggctgaggatatcaaggttttagaaagaatgaaaaaggagcccctgggtttgcaatctgtggcttcccctccctgctccctaggaagggtctgctacatggaaacaggttgggatagaaagggggcgggacgggagcaggggtgaggtctccagtcccaccacccaagtcccaagttgagctggagaaagtgaacaaaggggaatgaaggcacccctcagttcccaacttttcagtaggtcaagacaaagtggtcgggagctagacacactctcaatcctgatggacatggtgggagagagccaaggctacttgcccaccttccttggaattcccagttgaagttacctcaatccctctaggcacctctccccaggaaaataagttgagataaaggagaactgggtgcaagctgcctacccctaactggcccattgcacaccaaggaagatcctagaagctggcagggggagcctgtgcctttgaaaacctgtcttcatttccaatttgggagagagaagcgtggaggttaccctttctcggagctggcccctggcttgggctcctctcatttctctagacccttcctaagagtctggggtgagcacctccctagaactcagtatgggggaaacaggcaggggtcccctcatcagcctcaaggtcaggacaccttgaggcagcagcagacccaggagcctgagggggaaaataccccacaaataggaaaaacaaaccaagacaatccttaaagtgtcattgtccatggagaggatccaccagctctgagctaagacagtcagtgccacatagacaccctcccaccccgggcacagccctgcactcacaccgtgtgtcacacacacacagggacagccagccagccagccatgtggagaccatgttgtggggcaggggaaccaagggccaggaggccacagtcctgagggcttgtcctggccctgtcactgagccccttctaggcttggagctgtcatctgtgatgggaggagctggctgaaatgacccctaaagacaggtccctttggcgctggcatgcaccagttgtgaccccacagcaggcactgcctctatatgcacccccactcacacctcctcactgagggtgggaacacccaactccacatgctcacccactcacacctcctcactgagggtgggaacacacgaagctctgctctcatgcgtttccaaactctgcttccgctctgcaaaccacatccttcccctcccccagacaaagagatctacaaatctgggtcccttcccaccctccaccattcactctcaaaaaagggactgaggttaggagacggtgagatcgttacagccatccccctgcgttggtattctgctcctcctgaagctttcgagacctttcccattgaagctccctgagaaggaaatgccactacctctctcatgagagatgtgggggggaagaggagaagagggctgcacccgttcatacccagcctgggccccgtcttcaaatctaacctaaccgccacagtagtccagtctggggaatgcaagcggcttgggaaagttggagaacagccacttggagatgagaaccccagcctttggtttgggctgagggagggaagaagtgttctgggtggggtgtcttggtttcaatgcacagaatcacttggacctctcactcttcaacatggcaacctcggggtagacttacttctcttcccatccagacaaaagttaagtttcgctttaagtgggccagccttgggcaagggcgtgggtgtgaatgagcaactcttctaag

SEQ ID NO: 89419 - DNA, 1930 bp, Homo sapiens
tggacctggaaatgagaactgatagatcttgaatacgcccagcttggcacgagggatgttcaacatagaaagggattgtgactgtacccctcatccaagcttgaacctaggggacatgcattctctgtggatgcagttaccctgaagtattccagaaaggctgtctacaggtgcatccatgctgagctcccatgggggaagcctcagctatgtcgatagtggatgaagaggagaagaaatcaccttctccaagacccttcatgggcaccagggctgactggctgttggggtagagccacagacgttttctgctgagccaagcattgcaactgtgcctctgctaaaagaaacttcccagaaatgggaagttctgggacttaaggcctgccatcttgtgttttttgtttcatgggagtgctcccttgatgtcatgtacttcttcttccctttaggagtagaaatccctgaaagtccagactactgtgaatgcaactcttatctgggtctagctgcctagtggggctgccacactccagggtggtgctgggggatgtctccaaggaatccagtgatgtgacctgtcctcaagtatcccagcagtgggtaccagcaccagttctgatggggatggcaggggagtgctgtgagattccttggtcatgaaaagccttagtgtgttggttttctcaagtactggttgtagtagtagatgaactggtcacatggacagactcaggatctcttggttagccagggtgttgcaggcaatagtgattgctgaggtcacacatgacttttctccttcctgcatgttgtcttcttctgcctgaagatgctaatctcctatgtcagttggcctccaaccagaaggtggtgcttgcaaaagagtaccagctgtggtggtggtaggatttatgctttgccttatgtacccaggggaagtactctggtgtctcaggcaattggtggggctatagagctccgaaaagtttctgttctttttattaagctaccagggtaggattgaggggcaaagccaggtgagggctgggtcaggcaagtctgtgctctagctctccatatgtgggcaaaagtagaggtcccagtggggatcagaaggcagttttctgactgctggggtatattgaaggaaaaagcacagctgcttctgctgcaccaaagagtctgcatggagaatggggagtagcaggtagcagcaagccctacgcagctttcatgcacttggcaaggcaaatctcatagccacagtgtaccactagcagcagctagctgggtttcagacagttgacactcagaactcaaaactgccccaggccattagcctttgcatggccttcaggccacatttctcttggtctccctacacagcaggggcacccctgtgctctcttatggctgcagcacacttcccacttgcccctcagttctggccaagggagcttgttcccactcatatcgtgaatctcagttgagcttctctcaacctgtgattgctgtctgaagttagctggctgacttccacaaggtcccctgtgaggtaggatcagcagtggcttccctctgtccttgctggagactgggagtgcactgaaagcatgtccagtgctactccttctcatatactccccacggctcactgaatcagctttagtgctgggtagggttgagggcttcccttgtggcctggattgcccaggttccccagtaggagtgcatatcctagaggtagtttatcctcctctcacactctagggacttagagttttccatctgcctcgtagtaagtttctgggttttttcctgaaaaaaaaattcacagtgtgaatctctccacactattttgtctttccaagtggtagaggcatgctcacagtgcctccaatccactctcttggggattaaaaaaaaa

SEQ ID NO: 89420 - DNA, 2276 bp, Homo sapiens; identical to SEQ ID NO: 61451

SEQ ID NO: 89421 - DNA, 648 bp, Homo sapiens
cgcgtcgacccacgcgtccgggtttgtcatgcagctgttaagtcaggtgcagctgaggctggaacgtgtgtgatgctttgttttgttttctttcttttttttaaggacacctcgagaccgttgagtaagtgctttgttgtagtcaggtggcaactggggctggaagatgtgtggtgctttggagggtatggctaagagtctgggctcagctgggcaactgcacctccctctccttgtagcctttttgtgtagtctccagtagagtagccagatttcaagcacctccaaaagtacaaaacatgagcctgccaggcctggaattgtcacattatcacctgctgcattctatttattaagtcatagggccagttagggagcgtggttcattgggagccatttttggaaacggtctgcacattataattaatgtttctatctaccatgttgctctaccatgtatgtagttgtcagatttagacactggaaatgtataaatagacagttacaaattcctgtctcagcctcccgagtagttgggactacaggcgtgtccaccacacctggctaatttttgtatttttagtagagacggtttcaccattttggccaggatagtcttgatctcttgacctcatgatctgcctgcct

SEQ ID NO: 89422 - DNA, 1025 bp, Homo sapiens
cggccgcgtcgactttttttttttgattgacaatgagaatatttattgagggtttattgagtgcagggacgaagggcttgatgccttggggtgggaggagagaccccctcccctgggaacctgcagctccaggctcccgtggtgggggggtgagggttgagaacctatgaacattctggtaggggccactgtcttctccaacggtgctcccttcatgcgtgacctgggcagctgtaagcttctgtgggaacttccactgctcaggcgtcaggctcaggtagctagctgctggccgcgtacttgttgttgcctttgtttggagggtgtgggggggtctccacttcccgctttgacgggggctgctatctgcgctttccagggcaactgtcacgtgctcccggggtagaaagtcacttatggagacacaccagttgtggccattgttgggcttgaaagctcctcagaggaagggtgggaacagagttgacccgaggggagcagccttgggctgaccttaggagcggtgcagctttggtcccctccgccgaataccccccaaccacgcaggctgtcatcccatgctgcacagtaatagtcatccctcatccatagcctggagtcccgctgatggtcaaagtggctgttgttccagagttggagccatagaatcgtttatggatccctgagggtcgcttatcattgtcataaatgaggagtttgggggctgttcctgggagctgttggtaccagttaacattattacttccgacgttggagcggcttccagaacaagagatggtgaccctctgcccgggggtcccagacgctgagggtggctgagtcagcacagactgggcccaggaccctgcacagtgagtgaggagggtgaggaggagagggaagctggccatgctggagattgtcctgagtcctgtcttctctacccacagctgaagctgagcttcccccagatctctccctctcttcatactctgagagggggagagtccatccatgcaaatcag

SEQ ID NO: 89423 - DNA, 1291 bp, Homo sapiens
ttttttttttttggaaataaacaagctttattttcagtttcaacaggtaaggcgatacctgcttcatcgtgtgcttttacgtaaatgccaaatagcaaaataacagctagaaaataaacagtttgtcagtttggagatcaagtactttatctatcttgagtgttatctgtcttggaatttagccaggcctaaaagtagcggaagtatcaggaaatgctatagagagccagtctccagctgcaggttggtgggcctgggcactgaccagattggggtggctcaaagcactgagcgatgcaggcgccgtttctgcattgcctgcagcctcttctgcctctcggcaaagttgttcttcggggtctgcttcagtgcgggcaggatggcacgctccgccacaggtgggctcaggcatttcttggagaggctcttggtggagaccttggggaaatgcgtggcttcttggtccctgggaaagctagcttcctccggggctgcctggggcctctggctcccttccaggagggacttgaggtgccgcagctcttgggtctgcaggaggttggtattccacagctcgcggatgagcacttcgcactgcctaagtgtggtgggctttcgcaggggaaggggcaggatcattggggggtgtgcccccgcccccatctgcctgccctggtgctggctgttccccatacaggcagctcctgcattagaggcctctgctttctcctttctgaaacagtcattgcagcagccagaggtgacctgcccaggtgcgtctaaccacccacccagcatacctccccaggcagcgcccaggccaatgtggggaagagggcctggttcccctctcccactgagcagggtgctctgggcaccaggtgggggtctctgggactggggcctgtccctttctcccctctgaaggtgccctaagggtcagatgggcttcagtgggtgaccagctagctgccaggctgctcttgatcgtgaccccacacccagtggggcatcttgctccaggcctggtcttgggatgtgcagatgcaggagcctgtcctgctggttgcgctgctgaaagtgtgcgctctgtagcatctcagggcagtcccgcaaactcagggatcaccagaacctgttcctactctgacctgctggcctagtgccctccaaaggcaggctgtggccaggggcagcaagccttctcttggtaagaatattactttacttttctctgaggaagtgggaattccgccacacggaatgagcattcataatcaagaaccacttc

SEQ ID NO: 89424 - DNA, 1944 bp, Homo sapiens
tactctagcaccattggccgatcaatatttaatgcttggagattctgactctgcgggagtcatgtcaggggaccttgggagccaatctgcttgagcttctgagtgataattattcatgggctcctgcctcttgctctttctctagcacggtcccactctgcagactcagggccttattcagtcttctctctcgctctctccgctgctgtagccggaccctttgccttcgccactgctcagcgtctgcacatccctacaatggctaaaacagcaatggcctacaaggaaaaaatgaaggagctgtccatgctgtcactgatctgctcttgcttttacccggaacctcgcaacatcaacatctatacttacgatgatatggaagtgaagcaaatcaacaaacgtgcctctggccaggcttttgagctgatcttgaagccaccatctcctatctcagaaggcttttggaggagaacaacccaacttcagccaagatggcggaggaaaagctgatccctgaaaatggaacaaattaaggaaaaccgtgaggtctaatcctagctggctattattgaacgtctgcaggaaaaggagaggcatgtctgcggaggtgcgcaggaacaaggaactaccaggttgaactgtctggctgaagcaagggagggtttggcccgcccccccaatagtaaatccccccgcctatattataatggatcatgcgatatcaggatggggaatgtatgacatggtttaaaaagaactcattataaaaaaaaaaaaacaaaaaaaatcaaaaattaaaaaaaatcaatgcggtctctttgcagaatgttttgcttgatgtttaaaaaataccttggatcttattttgtaaatacttacatttttgttaaaaaatacaagtattgcattatgcaagttatttcataatcttacatgtcctgtaacaggcttttgatgttgtgtctttccactcaaatgaatttgctaggtctgttctttttgaagctccccatgtctaactccattccaaaagaaaaatgaggtcagtagacagtctatggtgctagaaacccaccattgcctaatgacctaaaaggctttgttgtctctgagcttgactaagaccatacctagatcacaggtattatgactccacatgaaccttcacatttgttcgctcataatctacttactgcctaaaaactacaaaaccaggctaagaaataccaccagtcatagcatttacttctgcttctcctggattatgtgctacaaatgtgctttggctttagaaagggatggatgagaagacagacctgagaccaatctgggtagaagcaaaaagttgaaccttttaaagtgctgaacacaaatccaaattcgaatggttcaagcagccgtgaaatcgctcttcataaagtgggcttaattctctagtttaagttcttttgatggaatgaattaattaatgtgtcaggtggcttatttgtggatgccatgattgatgatgttcattttaagctcttacctatagtacaagtacatgatgctactgaatatttttccacttggaaactgtgagctggttgttgcattaaaacacacatacaaacaaaatcaaaaacactgcggactttcactcaagctggtctttcttccccagtgtaaggcaatcctgcctactaacaacaccaacaacaaaacactccatctgtgaagctgacgcagttaagggggctaggcagggcatttgtgccaactaagaatcaccagatacccaccataagtacctatcgcagttttgaagtcgtttctccccaactcccaactcctgaaggttgctgcctgcatatttactcttcattagtgctattttcctgtatgtcattgtgagcaagctgtgattaataaagaattggagttctgtgaacgagaaaaaaaaaa

SEQ ID NO: 89425 - DNA, 1755 bp, Homo sapiens
ttttttttttttgattttattttattttatttcatttaaatttaacttaaatagcgacacttggataggggcaaccatactgtacagctcagtcccagagctttcttcctacagggacagcctcaccagctgaaccccaagcacgtttaattttcaaacaattcagttgaaagcagggccacaaagtacgtgtttctaaagtacaaattcagtttattcatctgtttatgacacagtacacaggaggcaaagtgtttcacatcatagacttcacttccaactccttggaatgttcatttctttggcttacaggagagactagacaggaaggccaggcaatgcttaggcaactaaaatgaggttgggggtaatgctaacgtcaccctcacagggatggccacggggactgttattcgcaagctggttttctagacctgttagctggaagcatggtgagcaccatttctggacgctcaggccgtgtcgggcttcagtcatctccaccacacaggtacagcagcgctttctggtagtcgcccttagtgtcttgctggatataatagtacagggacttgccgtactttctcttgaattcagacctaattttcaacatgtccacttcactgcgggagaccatgattctgatcaggaccttatctcgcgtccccttgcccttctgggagtcataccagccgaatcagcaaaaatacagggggctttgttcttgaatgcaactgaacccaggtttcaggaaaagcatttttccagggttcccctttaaacctctttccctgatgcttttccaaacatgtcattaaagggcttgtaaactcttggtacctaatcaaaatacttttctgggaggtgggggccacgctcccgctcgggtcatgatagctgaatcaacttggggaacattcagttccttttcctctttcacttccagcgtcaatagagattccgaggcatctttggtcaatcaagttcataatcaatggacagagccaatccctctgctccttcctaaccctttccccagggcaacccatcaggcttgcggaaagtcacccagatgtgtcccgaaataatgtccttctcccagaatcaagtcttggtacatttccctggaagaatccgtttattttcctgcagctccctggttggtttctggagcaagatgaatctcaatgagagagtccctcgtccggttccccaagcccccttcaatgggaagctttttagcctcagaaaccgtcaaaactgaagcaaggtgtcttcaaataggccccaaaaatcaccgtctccccagggtggcccaagataaggctgactttcaagtgctgatgacaagttcctttttggtccttcctctggtaggcggaaggcaatatcctgtctctgtgcattgctgcgggttggtcaaaatgttgacaatggtgacctcatccacacctttggtcttgatggctgtttcaatgttcaaagcattcccgctcatgcattcaaagttagtataggctttgacagacccatatgcacttgggggtgtagagtgatcaccctctcaagctgagcttgcacaggattttcgtgaacagtagacattttgaaggaagcattcctaacttaatgaatatcgattcaatctgctagtctctagctggatgcaggtccgccgaaatgggaaggaggaaggaatgcagcgtaactggaccggcctggatggctgttgtaatgcgtcacggaagagccaga

SEQ ID NO: 89426 - DNA, 8225 bp, Homo sapiens
  misc_feature (1)...(8225): n = a,t,c or g
cggctgtgctgcacagggggaggagagggaaccccaggcgcgagcgggaagaggggacctgcagccacaacttctctggtcctctgcatcccttctgtccctccacccgtccccttccccaccctctggcccccaccttcttggaggcgacaacccccgggaggcattagaagggatttttcccgcaggttgcgaagggaagcaaacttggtggcaacttgcctcccggtgcgggcgtctctcccccaccgtctcaacatgcttaggggtccggggcccgggctgctgctgctggccgtcctgtgcctggggacagcggtgccctccacgggagcctcgaagagcaagaggcaggctcagcaaatggttcagccccagtccccggtggctgtcagtcaaagcaagcccggttgttatgacaatggaaaacactatcagataaatcaacagtgggagcggacctacctaggcaatgcgttggtttgtacttgttatggaggaagccgaggttttaactgcgagagtaaacctgaagctgaagagacttgctttgacaagtacactgggaacacttaccgagtgggtgacacttatgagcgtcctaaagactccatgatctgggactgtacctgcatcggggctgggcgagggagaataagctgtaccatcgcaaaccgctgccatgaagggggtcagtcctacaagattggtgacacctggaggagaccacatgagactggtggttacatgttagagtgtgtgtgtcttggtaatggaaaaggagaatggacctgcaagcccatagctgagaagtgttttgatcatgctgctgggacttcctatgtggtcggagaaacgtgggagaagccctaccaaggctggatgatggtagattgtacttgcctgggagaaggcagcggacgcatcacttgcacttctagaaatagatgcaacgatcaggacacaaggacatcctatagaattggagacacctggagcaagaaggataatcgaggaaacctgctccagtgcatctgcacaggcaacggccgaggagagtggaagtgtgagaggcacacctctgtgcagaccacatcgagcggatctggccccttcaccgatgttcgtgcagctgtttaccaaccgcagcctcacccccagcctcctccctatggccactgtgtcacagacagtggtgtggtctactctgtggggatgcagttggcttgaaagacacaaggaaataagcaaatgctttgcacgtgcctgggcaacggagtcagctgccaagagacagctgtaacccagacttacggtggcaactcaaatggagagccatgtgtcttaccattcacctacaatggcaggacgttctactcctgcaccacagaagggcgacaggacggacatctttggtgcagcacaacttcgaattatgagcaggaccagaaatactctttctgcacagaccacactgttttggttcagactcgaggaggaaattccaatggtgccttgtgccacttccccttcctatacaacaaccacaattacactgattgcacttctgagggcagaagagacaacatgaagtggtgtgggaccacacagaactatgatgccgaccagaagtttgggttctgccccatggctgcccacgaggaaatctgcacaaccaatgaaggggtcatgtaccgcattggagatcagtgggattaagcagcatgacatgggttcacatgatgaggtgcacgtgtgttgggaatggtcgtggggaatggacatgcattgcctactcgcagcttcgagatcagtgcattgttgatgacatcacttacaatgtgaacgacacattccacaagcgtcatgaagaggggcacatgctgaactgtacatgcttcggtcagggtcggggcaggtggaagtgtgatcccgtcgaccaatgccaggattcagagactgggacgttttatcaaattggagattcatgggagaagtatgtgcatggtgtcagataccagtgctactgctatggccgtggcattggggagtggcattgccaacctttacagacctatccaagctcaagtggtcctgtcgaagtatttatcactgagactccgagtcagcccaactcccaccccatccagtggaatgcaccacagccatctcacatttccaagtacattctcaggtggagacctaaaaattctgtaggccgttggaaggaagctaccataccaggccacttaaactcctacaccatcaaaggcctgaagcctggtgtggtatacgagggccagctcatcagcatccagcagtacggccaccaagaagtgactcgctttgacttcaccaccaccagcaccagcacacctgtgaccagcaacacccgtgacaggagagacgactcccttttctcctcttgtggccacttctgaatctgtgaccgaaatcacagccagtagctttgtggtctcctgggtctcagcttccgacaccgtgtcgggattccgggtggaatatgagctgagtgaggagggagatgagccacagtacctggatcttccaagcacagccacttctgtggaacatccctggacctgcttcctggccgaaaatacattgtaaatgtctatcagatatctgaggatggggagcagagtttgatcctgtctacttcacaaacaacagcgcctgatgccccacctgacccgactgtggaccaagttgatgacacctcaattgttgttcgctggagcagaccccaggctcccatcacagggtacagaatagtctattcgccatcagtagaaggtagcagcacagaactcaaccttcctgaaactgcaaactccgtcaccctcagtgacttgcaacctggtgttcagtataacatcactatctatgctgtggaagaaaatcaagaaagtacacctgttgtcattcaacaagaaaccactggcaccccacgctcagatacagtgccctctcccagggacctgcagtttgtggaagtgacagacgtgaaggtcaccatcatgtggacaccgcctgagagtgcagtgaccggctaccgtgtggatgtgatccccgtcaacctgcctggcgagcacgggcagaggctgcccatcagcaggaacacctttcgcagaaaacaccggactgtcccctggggtcacctattacttcaaagtctttgcagtgagccatgggagggagagcaagcctctgactgctcaacagacaaccaaactggatgctcccactaacctccagtttgtcaatgaaactgattctactgtcctgcgtgagatggactccacctcgggcccagataacaggataccgactgaccgtgggccttacccgaagaggacagcccaggcagtacaatgtgggtccctctgtctccaagtacccactgaggaatctgcagcctgcatctgagtacaccgtatccctcgtggccataaagggcaaccaagagagccccaaagccactggagtctctaccacactgcagcctgggagctctattccaccttacaacaccgaggtgactgagaccaccattgtgatcacatggacgcctgctccaagaattggttttaagctgggtgtacgaccaagccagggaggagaggcaccacgagaagtgacttcagactcaggaagcattcgttgtgtccggctttgacttccagggagtagaatacgtctacaccatccaagtcctgagagatggacaggaaagagatgcgcccaattgtaaacaaaagtgggtgacaccattgtctccaccaacaaacttgcatctggaggcaaaccctgacactggagtgctcacagttttcctgggagaggagcaccacccagaacattactggtatagaaattaccacaacccctacaaacggccagcagggaaattctttggaagaagtggtccatgctgatcagagctcctgcactttttgataaccttgaagtcccgggcctggagtacaatgtcagtgtttacactgtcaaggatgacaaggaaagtgtccctatctctgataccatcatcccagctgttcctcctcccactgacctgcgattcaccaacattggtccagacaccatgcgtgtcacctggggttcaacccccatccattgatttaaccaacttcctggtgcgttactcacctgtgaaaaatgagggaaggatgttgcagagtttgtcaattttcttcctttcagacaatggcagtggtcttaacaaatctcctgcctggtacagaatatgtagtgagtgtctccagtgtctacgaacaacatgagagcacacctcttagaggaagacagaaaacaggtcttgattcccccaactggcattgacttttcctgatattactgcccaactcyttttacttgtgcactgggattgctcctcgagcccacccatcactggctacaggatccgcccatcatcccgagcacttcaagtgggagacctcgagaagatcggggtgccccactctcggaattccatcaccctcaccaacctcactccaggcacagagtatgtggtcagcatcgttgctcttaatggcagagaggaaagtcccttattgattggccaacaatcaacagtttctgatgttccgagggacctggaagttgttgctgcgacccccaccagcctactgatcaagctgggatgctcctgctgtcacagtgagattattacaggatcacttacggagaaacaggaggaaatagccctgtccaggagtttcactgtgcctgggggcaagtctaacagctaccatcagcggccttaaacctggggttgattataccatcactgtgtatgcttgtcactggccgtggagacagccccgcaagcagcaagccaatttccattaattcaccgaacagaaattgacaaaccatcccagatgcaagtgaccgatgttcaggacaacagcattagtgtcaagtggctgccttcaagttcccctgttactggttacagagtaaccaccacttcccaaaaatgggaccaggagccaacaaaaactaaaaactgcaggtccagatcaaacagaaatgactattgaaggcttgcagcccacagtggagtatgtggttagtgtctatgctcagaatccaagcggagagagtcagcctctggttcagactgcagtaaccaacattgatcgccctaaaggactggcattcactgatgtggatgtcgattccatcaaaattgcttgggaaagcccacaggggcaagtttccaggtacagggtgacctactcgagccctgaggatggaatccatgagctattccctgcacctgatggtgaagaagacactgcagagctgcaaggcctcagaccgggttctgagtacacagtcagtgtggttgccttgcacgatgatatggagagccagcccctgattggaacccagtccacagctattcctgcaccaactgacctgaagttcactcaggtcacacccacaagcctgagcgcccagtggacaccacccaatgttcagctcactggatatcgagtgcgggtgacccccaaggagaagaccggaccaatgaaagaaatcaaccttgctcctgacagctcatccgtggttgtatcaggacttatggtggccaccaaatatgaagtgagtgtctatgctcttaaggacactttgacaagcagaccagctcagggagttgtcaccactctggagaatgtcagcccaccaagaagggctcgtgtgacagatgctactgagaccaccatcaccattagctggagaaccaagactgagacgatcactggcttccaagttgatgccgttccagccaatggccagactccaatccagagaaccatcaagccagatgtcagaagctacaccatcacaggtttacaaccaggcactgactacaagatctacctgtacaccttgaatgacaatgctcggagctcccctgtggtcatcgacgcctccactgccattgatgcaccatccaacctgcgtttcctggccaccacacccaattccttgctggtatcatggcagccgccacgtgccaggattaccggctacatcatcaagtatgagaagcctgggtctcctcccagagaagtggtccctcggccccgccctggtgtcacagaggctactattactggcctggaaccgggaaccgaatatacaatttatgtcattgccctgaagaataatcagaagagcgagcccctgattggaaggaaaaagacagacgagcttccccaactggtaacccttccacaccccaatcttcatggaccagagatcttggatgttccttccacagttcaaaagacccctttcgtcacccaccctgggtatgacactggaaatggtattcagcttcctggcacttctggtcagcaacccagtgttgggcaacaaatgatctttgaggaacatggttttaggcggaccacaccgcccacaacggccacccccataaggcataggccaagaccatacccgccgaatgtaggacaagaagctctctctcagacaaccatctcatgggccccattccaggacacttctgagtacatcatttcatgtcatcctgttggcactgatgaagaacccttacagttcagggttcctggaacttctaccagtgccactctgacaggcctcaccagaggtgccacctacaacatcatagtggaggcactgaaagaccagcagaggcataaggttcgggaagaggttgttaccgtgggcaactctgtcaacgaaggcttgaaccaacctacggatgactcgtgctttgacccctacacagtttcccattatgccgttggagatgagtgggaacgaatgtctgaatcaggctttaaactgttgtgccagtgcttaggctttggaaagtgggtcattttcaagatgtgaattcatctaggatgggtgccatggacaatggtgttgaactacaagattggaggagaagtggggacccttcagggaggaaaatgtgccagatgatgaagctgcacatgtcttgggaacggaaaaggagaattcaagtgtgaccctcatgaggcaacgtgttantgatgatgggaagacatacccacgtagggaggaaccagtgggcagaaggaatatctcgggtgccatttgctcctgcacatgctttggaggccagcggggctcgtcttggtgacaacttgccgcagacctggggggtgaaccccagtcccggaaggcactactgggccagtcctacaaccagtattctcaagagataccatcagagaacaacccacaattttaaattgccccaattgagtgcttcatgccttttagatgtacgggctggacagagaaagattcccggagagtaaaatcatctttccaattccagaggaacaagacatgtctctctggccaagattccctcttaaactgggagttgatgtttaggcagacccagtttaggagttcttctttctttcttaagcccctttgctcttgagggaagttctcccagcttcagctccaacttcacaggcttctcccaaggcatcacccctggggagttttcctgaagggtttttctccataaatgaggggctgcaccattggcccttgtttcttgctttcggaaagtatttcaatacccgctcaagtattttaaaatgaaggtgattcttaaggatttgggtttggggatccaatagggaaaggcatatggcaggccaaccaaggatggcaaatgtttttgaaaatggatatggacccaaaatttttaaggtaggaaacgtcaccccaaacactttctggcttttcacttaaaagtgtctgggcccgccaatacttgtagggaaccaggcatggatcttgtttactgtggatatttttaaataatcccacagtactcacttttttcccaatggatccttagttaattgcctaggaaatatctttcttctttacctgtttattttatccaatttttccccagtattttttttacgggaaaaaattgtattgaaaacaccttaggtatgcagttgcataaggagggaatttgggtataattatgggtggggtgattatttttttatactggtatgtgcccaaaggcttttactactgtggggaaaggaccaactgttttaataaaagatttacattccacaacttgaaaaaaaaaa

SEQ ID NO: 89427 - DNA, 1051 bp, Homo sapiens
ctgtgcctactcaacagattctagcttttcctgagcaaacaaacaccaaagactggacagtgacacctgagcacgtcttgcctgagtcccagagcttgttgacatttgaagaagtggccatgtatttttcccaggaagaatgggagttattggatcccactcagaaggccctctacaatgatgtaatgcaggaaaactatgagactgtcatctctctagcattgtttgtgctccccaaacctaaagtgatctcctgtctagagcaaggggaagagccatgggttcaagtatccccggagtttaaggatagtgccggaaaatctcctacagggttaaagctcaaaaacgacactgaaaatcatcagcctgtgtctctttctgacttagaaatacaagcatcagcaggcgtcatatcaaaaaaggccaaagtaaaagttccccagaaaacagcaggcaaagaaaatcattttgatatgcacagagtgggaaaatggcaccaagattttccagtgaagaaaagaaagaaactttcaacctggaaacaagagctgctcaaacttatggatcgtcacaagaaagattgtgcaagagagaagccttttaaatgtcaggaatgtgggaaaaccttcagagttagctcctgacctttattaagcaccaaagaattcacactgaagagaaaccctataaatgtcaacagtgtgataagaggtttagatggagttcagatcttaataagcacttaacaacacaccaaggaataaaaccatataaatgttcatggggggggaaaagcttcagtcaaaatacaaatttacatacacaccaaagaactcatacaggagaaaagcccttcacatgtcatgaatgtggaaaaaaattcagtcagaactcccaccttattaaacaccggagaacccacacaggtgagcagccatatacttgtagcatatgcaggagaaacttcagcaggcggtcaagccttcttagacaccagaaactccacctgtgaagagaagcttgtccagtgtcccatttctggaagacattc

SEQ ID NO: 89428 - DNA, 471 bp, Homo sapiens
  misc_feature (1)...(471): n = a,t,c or g
ttttttttttttactcaaagactttcttttattagtacatgggctgggattgatgggaagggacagatgtagttggcaaccatggttagcatcggatgcccatcccaatggccatgaatgtgccaaaggtgccgccactctgcatcatggttttcccaatgccgcccatcagctctcgaccccgcattccgatcctgaggaggaaaccaagatggagctgagacaggaaaaggtgccgaagagcgccccggccgccatgcccacggcgcaacccatcacgaagcccattttgacacggtcgaagcagcttggctgggactgtccgtagggacccacggccaccggcatctcacctcgctcgcgggctgggtcgctcagctctacgtctctcacggaaaacgacggggagggcgctcgcgcagntngaatcgcttccggagcgccggcagcacttccgggagcctggggcca

SEQ ID NO: 89429 - DNA, 8526 bp, Homo sapiens
  misc_feature (1)...(8526): n = a,t,c or g
tttttttttcagaactactaaacatttattgaatgtgtaaggtattaaaaacatttacaattttgttaataaaatgatgttttatattaatgtatgtattatgctttggaatatgctaagtcatgtagataactttacatttctttcaataactttattctttacaaaatatacaaataaattaaanaaaacaattcaacttttaaaagggattacccatatgcaagaagaaggtattgctatcacccattctaaattcccccaatgcattcatttcctgttcccttatctttcaactctagtggcaaagtaaagactgaattgaaattaagctggcactacaacatcattaccagggatagacacataaacaaagtcatttccacataaggaatgctggatctccagagaagtggacaaagaggagtctactgagttttgcacttcggcacatccttgccctgnaggaggcgtgcccaaggacctgggctgagaatccacactctctgctcctgcattttgcacctctggacaaaggcctaaacttgagttatcaaaatagcgaactggatgaggtgatggtaaagactttgatcggctatcaaaaaaacaagattttggtgattcctttggcacaggatcttgtaaattccgttccttgcattgagagggtgtaatttgtttctttttagaagctgttccagtcactttaggagactttggagaattctcacaagttacttgtttgtgagcctctcttttaagggttctttccttccaagttttgacctcattggaaagatgctgattattgcttaacaattcattcttttgttttattagctgttcattttgctgctttaacttagaaatttctttttctagccttatatgttcacttttcaaaataagagcttttgtgttttgtacaatgccgctgccacctccacaagttaagggtttatttgaaggctgaggatcagtatgttctgatatcactgaggtatcttgggcctgttgacttcttctgagattttctctcaatagccttataacttccttttgatattctacagtggcttttgtagcactgatttccttttcaaattctttggcatttttcattttctctaggtctattttcccaagcttcattttgagatcttcaatttcttctttatatggcttagctcctaaagcaactttgtcctgaagtacttgaattgtctcttttgttttttcaaggcatttatttgattcatgaactttggcttgaagttttgctattatgtcattagtcacctcaagttctttctgcatctttataatcttgctttccttatgcatagcactttctttagcttcatgcagtgaattttccagctctcgaattttctctgtggttaactgtgtagctcttgatgtaacatgaggattcttattgtcttgtgtggtaggattaacctgggcaccagatgccaaggaagtcttcaatgtttggtagtttttaaatagtttttcatttttctctttcagtgatttcaggtcctgttcccactctttggatatggtagcacttctttcctcaaactctgttgattcattcattatggcaattattctgttattaaagaagttattcacttgacaaatcctatcattttctttctggatgccatttttaagcttttctatatcaaaacgagtatttaaccactcttccaaaaactgtgtcatttctttcctattacttagtacttgttgaaattcagtctttatgctagggaactcactttctgagaaatctttgagaatttcctcaatatgtagatccatattctggttcaatttgagatcccttaattctctggatggtacatcacaatcttgttgaaggtgctgtattttaattagcaattccttttgcttttccacttcatcaataaaatccatttcaaatttattgatgcattcatgttgttcttcttttatttttgtaacatagcttaacacatacttcagtttcttcatgattctgtggaattcaatttccttctccaagtcaagagacaatctattcaagcactcataatgatcatccatctctgagtatctcttcaaaagctcttttattctagagcacttttctctcaggctttccataaggtgctgttgtccatcacttagtaaccttttttcaggttttacttggtggttctgtcggtctctagctatcatttcccttaaggttgctatgaattggtccctttccattttgagagattcttttatcctccttagctcatctctttctttagctacaattcttatttcttcaaggctttcatgaagtttcttagtcaactggaagttatccatctcacacttgcatagatagtttggctcaaattgcttcttcaactgttccatttcattaatttttttatgactcatattgacatcttctttcactctaagcagttgaagttcttttttctgaagttcttggatctttttctgtaattcatcttttgatttatctaaatccttttgaatgtctgaaatttgaattgtcttttctgaaattttttctctaagtttatcaacagtttctttgtgttcttttgatagcatacgagcagtttttagttcctgttgtatttccagatctctagctttggtttcttgcaggctttccttgagttggtctctctccagtttgagtgtctcctctactcttcttagattatctctttctttcattacagatttcatttcttcaaggttttcatgaagtttctgagccaaatttaaattctctatttctaatttactcagagttaagctttggtcttttatttgtttctttagttgctccatttcagacacttttttctgtgtctcattgacatctttttttaacgtaataagttgatgttcatttgccttaagttcttgaatcttttcttgtaatttagcatttgaattttctaaatctttttgcatatttgatagtttatctgtcttctcagaaacaattcctctgagtttgtcaatagtttcctgctgctctttcagatgcatgtgagcaattcttagttcctcttgtattttcagatcctgtgcttttaaggcatcatttgagtgttctaagtccttttgcatatttgatatttcatttgttttctctgaaacaatccctcttagtttatcaatagtttcttggtgctccttcagatgcatgtgaacaatttttagctcctcttgtttttctaggtctctagttatagtttctctaaggttttccttgagctggtctctctctactttgagagtctcctccacactcctaaggtcatctctttcttttgttacagatctcatttcttcaaggttttcatgtagtatctgagtcaaccttatattctccgtttctatgttttccaggtttaacttctgggtctcaaattgctccttcaagtgttctatttcacacattttctcctgagtctcattgacagctgtcatcttaagaaactgatattctttttcttgagattctttcattttagctacaatttctttagtgttttctttcagttggtctctctctatctgaagggcctcctgtactcttttcatttcctctttttccttaatcataatttgtatttcttcttgactttcttgaagtctgttggtcaactcgagcatcttactttctatactttgtagtgctgaatccttggctttgcgatgctccttgaattgtttcagttcattcactttttcctgaacctcactaatttgttttatattaagttgttcctctttctcataaatctcttggatcttgttctgtaatttatcattgattgcttctaactgcttttgaatggttgatatttcagtttccttctctgaaagattcactcttaactcattaatagtttcctcttgttctttcaggcaacaatgagcaactttaagttcctcttcagtttccaggtgtttagctacaatttcttttatgttttctttgagctggtcactttcagattgaagaacttcttgcagcctctgtaggtcatctttctccttagctacagatttcatttcatcatgactttcttgaagtcttttggacaatccgagcatttctatttctatccttagtagtgctgaatctttgggtttgaattgctccatctcactcacgattttggtagtttcattgtctttttctttcatatttaaggactgttcttgtttgctttgagactcctggattttagccaaagtttctctaatatgttctttcagctggtcatgtttaacttcaagggcttcttttatcgttttaaggttgtctctttccttggttagagattttatctcttcctgactttcttgaaatttttcattcaacctgagcctttccatttctattcttgccagtgttgttgagtccttggttgtggactgttctgttaataactccagttcattcattgtttcctgagtctcactgacttttttcacattaggcagtaactcttgttcctcatgaagcactgggatctcttcttgtaatttggtatgggatttttctaagtcctgagtatttattatttgagctgtcttctcagatacgcttcttcttagttcatcaatagtttcttggtgttcttttaggtgaatatgagcaatttttagttcttctttggtttgtaggcctgtagcttcaatttctcttatatatcctctaaggtggtctctctctgtttcaaatgacttctgtaattcctttagaacttttctttctttggttatagatttcacttcctcataattttcattaagtttctgagccaactcaagcctctctgtttccatatgttccaatgtcaattctttgttctttaattcattctttaaattctctatttcattaatctttttctgcatctcactcatctcttcttgtacattaagaagttgttgctgtttttcttggagttgctggctcttttcctttagtttttcttcaacttctgccagtctgtcacaggtcctagaaagctctccttctttctttatggcatggttcttttcttgtgcaactatctcttgttgctttttaagttcatccccaagaagtcttaattcttcctggttttcaatggtcatttcaatattttcctttaggtcagtcttcaattgttccttttctgctataacactctctaacatttgttggagttcatttttctcctgtattaaagaaaatatcttcctttgttgctcaattatctcattatccttaacatctgcagttagtgtttgggtatttttagcttccaaatcctgttttttatctatgccaaccatcttttgctgaaattcatctttagtttctcctgtattttcctccatatgcaaattcctggaaacttcctcagaaattttcgattttagtgtattaattgtttcttgatgttgtttcagagactcaagagcatttcgtaattgttcttgagtatctatattcatgttaacagtatcgtgaatatcacttttgagttggtccctctcaatttgcaagctttcttggagttgttttagatcatctttttcttgagttaaagtttttacttcttctaaagtttgctgcagtttctcagtaatcagtgttttctccctttctacagtttgcagcggagaatctctattttctaattgttccttcagctgttccatctcatttagtctttcttgaacctcacgtgttttctcctgaagttcttgggtcttgtaagaaagctcggtcttcaaagcacccaaactcgaatcaaatttttgggcttctttagagagattaactatttcctgattcattctctcattctcctcaaggaccatcttatacttttgctcaaagtccatatgaagggttttgaaattttggaattcttgatcagtgcttttataattcgactgtgtagttgctaggtcatcttttgttttcccaatttcttcaagtaaaccttgaactctactctccttatgaactacttcagaaaacaatttatctttttctgatgttattatatggagctcttcagatttgtcttgtatctctttcctcagcctttctacttcagaaggtaaagatttcaattctgaaagcaaaatgacttcttcccgcaaagcttcattttcttcaacttctttatttagttctttctgaagatcagtaatctttccttccaattccaaattacagagcaaatcttttggaactttgccatctataagggaggtgagttttgttatctcattaaaagcagattgtaattctttctccagatcaacttgcattttcttttttgcctccaattggctttgatataactgaatatcattttccatttgcttgtatgtagttgcaagttctttcattttctccttcaactccagattttcacttctaagaaaggctgattctctcttggcatcaagggctacagtttcagcatcaaacagagtctgcttcatttgttttgggtcttcaatgctttccaatgagtatgacaagtccatttttatattttctagcttttgagagtctatgtattcctgtagcttcttaatctggtcttccttttctctaagcagctctacttttgaactgagttcattctcaagatcttgattatatacttctcgatgcttaactaaattctttaagttcgaaatttcatgaattagttgcatctcttgatcttttttagtttttctttctagagcctcaaattcatccaaatcattcttttcttttaatttcaattccatttcttctttttctgttcgtagttgttcatagtctaataccagattatcatagtcagcacgaagtgagttcaactcactttctatattctcctgatttagtagctttgttgctggattccattctatctcacttaatgtatcaagagtgttactgaaaacatcagactctgaacagacagattcatcaatttctcgtaataaatttatagaaagcttatgtgtttttgttgttatatttgttggtatattaaattgatctgcatagtttgagttcttcattttgttaattttgccaaggcaccaagtaactcttcgttttcttttagcctttaattcctgttgcaacgtgagggaagaagaggtcaccagcatccgtgttaagttttcaattttctcattctgtactttctgaagcaaatctttttcttccaaaagttgggccaattggtctttttccattgcctgagcccgcgtctctaaagaaacctcctctaattgttttttaagatccattatttcttttctataccttttcaggagagcttcatcagttgatacctcattaacataaggagtattcttcatatatttagcagtactggcaaactggagagcagtaagagtttcatcaaaagatactggagtaattgtgcagataatacgtgtctttggatttcctcccaaggaattctgaagaattcgtgttaacttgctatctcgataatttatgaaaccaccaacttgtccatcactaagtttcttgatcacttgtcccaaaataaataagcttcgatttatattacagccttccttgagccgcacacctgcagcgcctgtttgagcagctctttcactgcctgcaagatcaaccaaattcaaatgggataccttaacagatccttcacaattagaaggttcacccttctctctgctttccaaaatcatcctaaagatggtatgagaacgactgcttctttgattcatttttgtttctccataatgcctgctcttttctccctttgtaatccatttcaaagccatttctgatgtatatacaacttcttctgtgagatcagcaacatacacattcctattgacatcttctcgaataattaaaggtttcattttttgagtgccacagagtaaatctgtaatggtttcattgtatatttccatgtaagatacacgtaagagaaattccctatccaggaaaacttcttaaattttttgggaaaaatgtccatgaaattgcccctggggtataactcccaaatgatcttctgaacccatcatggtatatgtttttcctgaagccagtctgtccatagggcaaatatagtaccattgtagccttgtatggcagaatcgatgattggtgctgctattggcttcatacacatttttgggagtttcattaccatgaaggacacgatcaaaattgaaggatttacttccatcaactggataaatgacattattgtgggttttccagtaaacttgggcagtttctccaagtgattcttctctgctgttcagcggccgcactcgcacgcagacggccacggctccttcctccgccatcctatcaggctgaactggtcccaccaaaatggccaggaccctccgcggccggcacttcagggctcacaggccgccccgcctttaaattta

SEQ ID NO: 89430 - DNA, 970 bp, Homo sapiens; identical to SEQ ID NO: 89368

SEQ ID NO: 89431 - DNA, 407 bp, Homo sapiens
cccacgcgtccggcagaactgatttagcacagctaggaaattctaatgagacaaaacttgtggttaggatctcaccaactacatcttcccctggcagccattccccatggattaatgaatgggccttggagatggtatccctgtgttttggggatgcagttgatgctctgagggctgtgcttgtgcatgcccctcactttttgcttcactttttgcttagtttacaatggtgcatttataagagaaaatgaaaactcaagcctggtgttgtgttcctaaaatctttgactcaatttcgaacttggctgtcagccatgatgtaaagatgataagcatcctcaataaggattttgcaaataagaagtagactttcactggtgcttttgtggctcagtttctgaatttct

SEQ ID NO: 89432 - DNA, 607 bp, Homo sapiens
  misc_feature (1)...(607): n = a,t,c or g
gtgtgctacntcgctctacttgcgtcacgcgtcttaaactctttcgagtgttactgacgttactacgtatgtgctgtntgtgatgactcnaaactcaccagatacacactgccggagngnnnnnnnnntttganttcgataggcatggcccggaannncgggncgacccacgcgnccggggcaanngaacaaaaccaagnnggataatnnctagaaatgcaatttctagtttaacattggaaaagccaggcggggtgattcactgaattaacaccatgaaagataaaaatcgctgacatctcaataggttaaaaaatatttaattaaattcaacacctattcatgaaaaaagactaagaactaggaaaggaagataatttctttaatttcatcagggccatataaaaagccagcatcataataaatggtgaaatgttgaatgctttctctctgagactaggaataagccaagtatgcccagaatcaccacttcttcacagtattctaatggaaatcctagtaattacaacaataacagaaattaaaccaagggtataaggaatagaaaaactatgatcgtttgcaaatgttatttacatatgcaaag

SEQ ID NO: 89433 - DNA, 1729 bp, Homo sapiens
ttttttttttttgaagttcatcatctttagacttaaggaattaacaagggtcagggagactacaccaggctgagggcttcttggttcctggagacatgcccagctacagcaaacacagggaaacacgaagggggcagctggaagatttggtcttgaacttggggggtgggtaagtgatgatccccacgactggagcagcaggaagaagttgtgtctgaggaagtgctgggccgcccagagggacagccctgccctggagcttgtcgccgggagggaagggaaacaagccccctccctcagtgctgaggaaaaggcacttggctgggtctcctcctgccctctccccatccgtgggagagacggggtccttgcctccttgcccctttcagccgcccagaagccggtcctggttcagcctctggaagaagcttttgccgaactcataggtgctgatcatgatggcacaggagggggcagccttgatgatccgaggaaggaagcctgcaaagagtcccttggtgcccgactcggcccggatcctccgcagcagcagccaggtggagtccacatgcagggggttcactctcacagcctccatcgctcccagagcgacctggcgttgggtctttaccacgtcaaagggtagagtcagcactgcagccaccgtccctgagatgccaccagccacaaagctcatgcccacagaagtctggtccttcggcctgagcccattgagccagctcttcaccagctcatagttgaaccagtacagggcttggggtgggggatgcactgagaagggcacatctcgaagggcagtggggccccagcccagccacagtgagcgccagccaccctgagccactgcagttcgaacacaggcacccagctcccggtacgacacatgctgagcctgcagctttgtccgcataagctccagggggctgatcacagtcacggtgcccactgtgtggggattgggggtgacaatggggagaagtgagatcacaggtcttacatggcatcacctacctgctgtcccaggtctggggacctagaacacccccctatccctaggctggcagaggttggggctgggagctgggactgactgggtttgggcagaggtggggacagagggaggtcaaaggcccaagactatgctcacggcgggccagcgcgccagccaccatgggtgcgtagaggtcagaggtcagggctcgaccacacaggaaggccttcagttggtcataggcagtgaagtagatggcggtagctggcacagtcatcaccagggtggcggggaggccgctccagagggtcctggtgccctcgtgcctcacgatcttcacgaaggcatccatggtgccagtgaagcgggtagggtcttgaaaccaggtggcacagcgggcaccatttgggcacaggtacagaggctccaggacaccattgcaatacaggagggcacttccctgtggattggagagaggagggcaatttggtataggagaggctccacagtctggaggaaggcatcagctcgctggccatggagggccgctgagactgcaggcgaaccttcaccacgtccaggggtgtcatgaagagagaggtaaccacagccccggtcctgaggccaccatttgctggaggggctgatgccgcagggtcctggtcagccatcttgaagcttcagtcctggctctaggctggtgctcgtcgcgcgcgg

SEQ ID NO: 89434 - DNA, 326 bp, Homo sapiens
  misc_feature (1)...(326): n = a,t,c or g
cttgaagaagcataggccaggcacaaataagaccaccccactaggaactatgttaaaaaaattttcaagaaagaatttaaaggagattacggtgttactgtgacactaggaaaacttagaactttgtgtgaaatagactggccagcattagaggtgggttggccatcagaaggaagcttggacaggtaggtcccttgtttcaaaggtatgacacaaggtaacctgtaagccaaggcacccagaccagtttccgtacatagacagttacagctggttttagacccacttccccggcccctaacagtagttaagagaacagcagcatn

SEQ ID NO: 89435 - DNA, 1911 bp, Homo sapiens
cggccgcgtagcccgcgcgcggagcgtaccctgctgcggccgttggccgttagcgcggcttcggcggttgtcttggagaagcaagatggcggcgacggcggccgcagtggtggccgaggaggacacggagctgcgggacctgctggtgcagacgctggagaacagcggggtcctgaaccgcatcaaggctgaactccgagcagctgtgtttttagcactagaggagcaagaaaaagtagagaacaaaactcctttagttaatgagagcctgaaaaagtttttaaataccaaagacggtcgtttagtggctagtcttgttgcagaatttcttcagttttttaaccttgactttactttggctgtttttcaacctgaaactagcacatattttaacttcttttctagctgcaaggtctcgaaggtcgagagaatttagcccgagatttaggtataattgaagcagaaggtactgtgggtggacccttattaattagaagtgatcaggcgctgtcaacagaaagaaaaagggccaaccactggggaaggtgcacttgatctatctgatgtacattctccaccaaagtcaccagagggaaaaacaagtgcacagacaacaccaagtaagataccaaggtataaaggacaaggtaagaagaagacaagcgggcagaaggctggtgacaagaaggccaatgatgaggccaatcagagtgatacaagtgtctccttgtcagaacccaagagcaaaagcagccttcacttactgtcccatgaaacaaaaattgtatcttttctaagcaacagaactttagatggcaaagacaaagctggcctttgtccagatgaagatgatatggaaggagattctttctttgatgatcccattcctaagccagagaaaacttacggtttgaggaaggaacctaggaagcaagcaggaagtctggcctcgctctcggatgcaccccccttaaaaagtggactcagctccctggcgggagccccttctttaaaagactctgagagtaaaaggggaaatacagttttgaaagatctgaaattgatcagtgataaaattggatcacttggattaggaactggagaagatgatgactatgttgatgattttaatagtaccagccatcgctcagagaaaagtgagataagtattggtgaagagatagaagaagacctttctgtggaaatagatgacatcaataccagtgataagcttgatgacctcacacaagatctgactgtatcccagctcagtgatgttgcggattatctggaagatgttgcatagacacgaagaaggaagtattctaattaacaaggacagaggactgaccggttccatttttttttttttccaaacaatcactcagctggaagggcggctctctattggggccttgcatttcaaaaaccctgcagattttttttaaaagaaattttcattttactaaacaaaatacttcctatttgagcccatggggggaaaatttaatattcttaatttaactgtacatttctttatggaaatggattatctacactcagtttcattacagggaaggaacccatgaaaacatcagtgttaagagcatgatgaaaggtgtcaataaagccgtaggatcgcgcaaccctttgtgtgtgtggctgctggtacgtgtgatctttgaaaaccttggctttagccctctggaatcagagcttacccaccatagtatattttgatattaggtggttctacacatagttggcaaaatgacttggtaaatttgtaatgctgaagtatattagtataagttaaatttgatgtgtcaactttattttgtatttccttccatttggaaggtttgttagaccattaaggttatattaaagtactcttgtgtgtgctaaaaa

SEQ ID NO: 89436 - DNA, 1781 bp, Homo sapiens; identical to SEQ ID NO: 61711

SEQ ID NO: 89437 - DNA, 656 bp, Homo sapiens
caaaaatcaatagtgtagtgcagaaatatattaatatcttctcagccgtgtggctgagatgaagtgtagtatttgtatatctgatgcttccgctatccaaggacaatctgttaaatggatttttggagcagggagattgaataggaccttgctccatctgctgtatgcattgacctggtagtgcagtaactccaggaactgtgcaccccctcaggaagaaaagaagaaatacactatacactacccatgaattatcccaaaaatgaaattaacatttataattgcataaaaattattaggaataaatttaatgaaagaaatgcaaaacctaaactctgaaaaccataaaacatgggaagaatataaagatactaaataaattatgtcggatttttatggataggcacttaatgttattaaaatggcagcgctccccaaattaatgtacagattcagtgccacccttgtcaaaattccagcaacatttttacagaaagtgacaaattgatcctaaaactcatatggaaatggaagggaaccagaatggcccaaacagtgttgaaaaagaaaagcaaagttgggactcaaactagaaagcaacattgatgaagacactgtgaagacagaggcataaatgaatggaatggaattgagaa

SEQ ID NO: 89438 - DNA, 531 bp, Homo sapiens
attctttccccaagtctctatggtagcgtcagcgtcggaggcggtagtgacggtggcgtttccttgaggaagagtgagggttccaacttttctgcttatctgggaggtgttgggcgcggacagtcgagatgtcagagaaaaagcagccggtagacttaggtctgttagaggaagacgacgagtttgaagagttccctgccgaagactgggctggcttagatgaagatgaagatgcacatgtctgggaggataattgggatgatgacaatgtagaggatgacttctctaatcagttacgtgatgttctttctgttttatcttagagctgaactagagaaacatggttataagatggagacttcatagcatccagaagaagtgttgaagtaacctaaacttgacctgcttaatacattctagggcagagaacccaggatgggacactaaaaaaatgtgtttatttcattatctgcttggatttatttgtgtttttgtaacacaaaaaataaatgttttgatataaaaaaaaaa

SEQ ID NO: 89439 - DNA, 2524 bp, Homo sapiens
aatttccggttcgacgatcccgtcccctggcggagccggcgcgcccggggtgccgctccctgcctggcgcgctccgcacctggaggtgccttgcccctctcctgcccacctcggaatttccctgtggctcctttgatccttcgagtctccagctcctctcccttccacctgtttcccccaagaaaggcaggatcctggtccctgctacgtttctggggccatggctggtctgggccccggcgtaggcgattcagaggggggaccccggcccctgttttgcagaaagggggctctgaggcagaaggtggtccacgaagtcaagagccacaagttcaccgctcgcttcttcaagcagcccaccttctgcagccactgcaccgacttcatctggggtatcggaaagcagggcctgcaatgtcaagtctgcagctttgtggttcatcgacgatgccacgaatttgtgaccttcgagtgtccaggcgctgggaagggcccccagacggacgacccccggaacaaacacaagttccgcctgcatagctacagcagccccaccttctgcgaccactgtggctccctcctctacgggcttgtgcaccagggcatgaaatgctcctgctgcgagatgaacgtgcaccggcgctgtgtgcgtagcgtgccctccctgtgcggtgtggaccacaccgagcgccgcgggcgcctgcagctggagatccgggctcccacagcagatgagatccacgtaactgttggcgaggcccgtaacctaattcctatggaccccaatggtctctctgatccctatgtgaaactgaagctcatcccagaccctcggaacctgacgaaacagaagacccgaacggtgaaagccacgctaaaccctgtgtggaatgagacctttgtgttcaacctgaagccaggggatgtggagcgccggctcagcgtggaggtgtgggactgggaccggacctcccgcaacgacttcatgggggccatgtcctttggcgtctcggagctgctcaaggcgcccgtggatggctggtacaagttactgaaccaggaggagggcgagtattacaatgtgccggtggccgatgctgacaactgcagcctcctccagaagtttgaggcttgtaactaccccctggaattgtatgagcgggtgcggatgggcccctcttcctctcccatcccctccccttcccctagtcccaccgaccccaagcgctgcttcttcggggcgagtccaggacgcttgcacatctccgacttcagcttcctcatggttctaggaaaaggcagttttgggaaggtgatgctggccgagcgcaggggctctgatgagctctacgccatcaagatcttgaaaaaggacgtgatcgtccaggacgacgatgtggactgcacgctggtggagaaacgtgtgctggcgctggggggccggggtcctggcggccggccccacttcctcacccagctccactccaccttccagaccccggaccgcctgtatttcgtgatggagtacgtcaccgggggagacttgatgtaccacattcaacagctgggcaagtttaaggagccccatgcagcgttctacgcggcagaaatcgctatcggcctcttcttccttcacaatcagggcatcatctacagggacctgaagctggacaatgtgatgctggatgctgagggacacatcaagatcactgactttggcatgtgtaaggagaacgtcttccccgggacgacaacccgcaccttctgcgggaccccggactacatagccccggagatcattgcctaccagccctatgggaagtctgtcgattggtggtcctttggagttctgctgtatgagatgttggcaggacagcctcccttcgatggggaggacgaggaggagctgtttcaggccatcatggaacaaactgtcacctaccccaagtcgctttcccgggaagccgtggccatctgcaaggggttcctgaccaagcacccaggggaagcgcctggggcttcagggccttgatgggggaacctaaccatccgtgcacatgggttttttccgctgggatttgactgggagcggctggaacgattgggagatccccgcctccttttcaagaccccgcccgtgtggcccgcagcggcgaggaatttttgacaagttcttcacgcgggcggcgccagcgcatgacccctccagcccgcctagtcctggacagcatcgaccaggccgatttccagggcttcacctacgtgaaccccgacttcgtgcagccggatgcccgcagccccaccagcacagtgcatgtgcccgtcatgtaatctcaaccgccgccactaggtgtccccaacgtcccctccgccgtgccggcggcagccccacttcaccaccaacttcaccaccccctgtcccattgtagatcctgcaccccagcattccagctctgcccccgcgggttctagacgcccctcccaagcgaaaaagaacttctgatctccatacagcccatgtatt

SEQ ID NO: 89440 - DNA, 913 bp, Homo sapiens
acgctcacgggcgcgcggactatcgggcggctaggctctctgaggaggctgccacagtgaagcagccgtgacaagtggtgcccgaccagggacctgaacgaggaaggtctgccagagcagagaaagtgaaactgatcagacgaactacgaacccctggacgggagagtctgccggcggagaatataaggtgtgtgtgaccatggaacgggagaccggagggatccatggtattcaaccgtgggcctgttacctccagtacgagccatgagccagcggaatctgaatgcaaagacagaacaagggccgaccggagtcacaatgacatccaaccccataacatggggacagatcaagaaaacgacacaagaagctgagaaactactggagcgccagggtcaggcaaaaacccctgactccatgttcttggccatgctagctgtagtgtcctgtgcgtctataggatcgggtgaaccaccaaccggcaattgaaagctgcacagcctgaaattacctttattcaattaatgcaaaaacaaaaggggagatgttggaggccgaaggaatgagggtcgtgaccaactcagtataccactggaggctctgtgagcaaacagcaaactgttctcatgaaagcaggatgttggcgaactgacaaactctgtctgccgccagaaggaatgctgggggcagtcatgtcccaggtcccgtgctccttgaggttatccacaggaacatccagaacctgttgaacaaagaaaggaatcatgtgggcctgtgttaaatcaaatagctgaccgacagttatcccttcctcccttttcactctacctaataaatatgaagggctgtaaaagctcaggtccctgttccctagaatcaaggagccccctgaccccttctttcaaacagaaa

SEQ ID NO: 89441 - DNA, 3775 bp, Homo sapiens; identical to SEQ ID NO: 74990

SEQ ID NO: 89442 - DNA, 1383 bp, Homo sapiens
ttagattgacatcttgaccatcgatacgccaagcttggcacgaggcggggctgtgagaagccaggcgcatctcaaaccgagctggcagctccaggctccggagccatgccctgcacggaccctcgtctttaccacgctcctgaggaatgaaaggaacccagggaccctcagaaggcagcagtgatgcggaccaaccccccggagcctgcacccttccgagggccataggcgacccagggaactggagagagctccagaaaggaaatcccagctttcccaaagtccctgtggatgctgacaaaaggagacctgaatttttggaagagcctgtactaggttacccggctgcagagtgattttcccctccggcactgactctccccctccaacccccagccgtccagagtaccatgaagaattatgaggatgtgtgacagaggtatccagatgttgatcaccactgtaggagcctttgccgcttttagtttaatgaccattgcagtgggcacggactactggttatattccagaggtgtgtgcaggactaaatctacaagtgataatgaaaccagcaggaagaatgaagaagtaatgacccattcggggctgtggaggacctgctgcctagaaggggctttccgaggcgtgtgcaagaaaatcgatcacttccctgaagatgctgactacgaacaggacacagccgaatatctcctgcgagctgtgagggcctccagtgtcttccccatcctcagtgtcacgctgctgttcttcggcgggctctgcgtggcagccagtgagttccaccgcagcagacacaacgtcattctcagcgcgggcatcttttttgtctctgcagggttaagcaacatcattggcatcatagtttatatatcaggccaacgccgggaggaccccggggcagcgtggactccaaaaaaagttactcctatggttggtccttttattttcgggagccttctctttcatcatcggcaggaaatttgttagggagtgggtttgccgtggcacatctatattgaaaaacatcagcagttacgagccaaatcccactcggagttcctgaagaaatctacttttgcccgcctcccaccctacaggtatcgattccggaggcggtcaagttctcgctccaccgagcccagatcccgagacctgtcccccatcagcaaaggcttccacaccatcccttccactgacatctcgatgttcaccctctcccgggacccctcaaagatcaccatggggaccctcctcaactccgaccgggaccacgcttttctacagttccacaattccacacccaaagagttcaaagagtcactgcataataatccggccaacaggcgcaccacgcccgtctga

SEQ ID NO: 89443 - DNA, 1651 bp, Homo sapiens
aaacgccgggcagttaattgaatttaggggccctaataaaaaagctattacgttgcaagcacgcgttagtaaacttggatcctttaaaacggccgccctttttttttttttttattattaaataaaatcattttatcatatggctttcaaaagacaatgagtgaaaacttaaggcaatacaataagtcatatttatgagtacgttcaagaattcacaaaaaagggtacaattctggcttctctttaatcattaaatttcagtttttacaaataattcaggttcaggttttgagggggaaacagttcttgtattattacatgctcatttttcttctgtaaatgactctattggctagatttacaaacattgtcacagaaacaaattttttaagccatagatcactgcatttatatttacaaaaaaagccataaacatgcatttctcctttattaggacttaaatagatgcttgaatattaaggcagtgatgattctaaaacataatgaaattctaagttaaggctttatgtttcttttgaaacccacactcataggcaactgtgaccaaaccaaactcttacctactaggttgagctcatctgcccgggatatgttatttatccattaccaacacttcttttgtgtcaaatgtatgggataggaattagtagcaaaaccatcaatttactttaatgaatcattggtccccttactaggttttgaggatttagctttcagtaatacaggcatgtgccacagaaaggagcatgtcgtgtgtgtgtgtgtgtgtgtgtgtgtgtgtgtgtcaatgtggagaacttacaggctgcactgattcctacttgactggaacttagccaacaattaagaatccaggatctcctaaatacagaaaatccccaaagcatacttgatcatgctcctacctcaaaacacacaaagcattcttgattattgaagcaataggtcttcaccttgttttctttgaagactggtattattcacttaagaaaaaaaaccaaaatgcagaataccatattttagatgaatctatcctataattgctagcctcaaggcacaagtaatatccttgctagatactttttcttattcaaagaaaagataaagaatggtgaatggaaggaaattcactttaaaataattgtagattgcactcctgccctatcaagcttagtagaagtgcaaagtattgaaacctaatgggggatgcccttttcccactttttttcttgtttaattttagagtgacaaaactcagatccagcttgtggatgcacttggggaaacagctcccagagccccccaactctcgccctactgtggagacccagaaaggatcttcataggacacaccccaagatgaagtcaataggcacgtttccataactccctgttcccaaggtttggataacctacgctcatttagcaggacccttcccctccggggttgttgctgggggccttttttttttttgagatagggtcttgccctgttacccaggttggagtacagtgccaagaccatggctcatggcagccccaatctcctcgagtgatcctctcacctcagccttccaagtagctgggatcacaggcgcatgcccctgtgcctgggtaattaaaaaaaaaa

SEQ ID NO: 89444 - DNA, 1078 bp, Homo sapiens
  misc_feature (1)...(1078): n = a,t,c or g
tttgcggactcgcagacgggaagctaacacgtgtggggccgctcccgcctggcgggtcagttgtccgcgtcggtcaccagcggggccaggtagtccgagtgccggatcccgaaactccagccgcggggcttccggtgctgatccacgttgtaggccgcgggccctggcttccgagtgttgtcttgggggagcgaagtccgcgccagaatcgtgaactggggggcccgggacttgtagacccctggactcacgacctgataggcgcaggggcccggggtcttgctgaggtcctcgaagaaactgccagccgccgggttgaatcctccgggcggactgcgcggaccccacccgtttacctcttaacggtttcacgccctcttgaactctctcttcaaagttcttttcaactttcccttacggtacttgttgactatcggtctcgtgccggtatttagccttagatggagtttaccacccgctttgggctgcattcccaagcaacccgactccgggaagacccgggcccggcgcgccgggggccgctaccggcctcacaccgtccacgggctgggcctcgatcagaaggacttgggccccccacgagcggcgccggggagcgggtcttccgtacgccacatgtcccgcgccccgccgcggggcggggattcggcgctgggctcttccctgttcactcgccgttactgagggaatcctggttagtttcttctcctccgctgactaatatgcttaaattcagcgggtcgccacgtctgatctgagagctctggaatgtctgcttagaattctgagaggcaggaactgctctgtctttgtaactactcaaggccaactgtcacatgaaggaatgaataaagagtttttactgannnnnnnnnnnnnnnnnnnnnnnnnnnnnnnnnnnnnnnnnnngggggggggccttttttaaaatcccttgggggggccccatttttccgggggggggaaagaaatattttttccctttaggggggggcttttaaaccccccgtggggtttttggaaaaaaacccctcttgtggggaggagaaaaaaagga

SEQ ID NO: 89445 - DNA, 1482 bp, Homo sapiens
  misc_feature (1)...(1482): n = a,t,c or g
tcgcggacgcgtgggatctggaatacggtctaggcattgttcaccgcgcctctgaggattaagggggggacacaggaggtgtccagcatcctgtggtcaaagccggcttctctcccaggacactgcccgtggcttttgtccttgggtcggcctgcctggctgccgtggccacagctgagggcctgggaggaggctgtgaggccgtgtggctgaccgagtcacatcttggggtaaaggggctgtggctgcgggccaagacctgtctgccctctgtatttcccgccaggaaataggacaaagttgcagtaactttggtttctggtgctaccactacagacctgaatctggggccaagagggagcagctttcacccccttcgtcccctccactccctactccacgaggtgcagagatgtaggagctacccggaaggccggctgcccacgggggtgagaattgttagaaagacttcagtcctccccggaagaggtccctgcaggctaaggaacttgctgagcatccccgcagcaagctggccttggcggtcatgaagcgactagagtacctgaaccctgcgaggccttctgtcacccactagccagggaaggaataggaatccgggctgtccacctgttcagtatctcactgtggccccaccatgggggaagggcccgatgtttggcagatgtaagctggctgcagtcactcattccagnagactgggcaggtgcagtctagtagacccaccagcaccctgtgcgtggacactcactggagggtcgaacactgagagctgcggggactgcttttacctcactcactgctttccttaaaatccgggtgtcctcagcttgggccaagtactgagcctcaaacagggcaatgtcttcttccagttgctgggctcgagtggtgagctggtccacatacaggtcctgctttttcttctcgatttctgcccggatcctctccgtctcggccttctttaccacttgtgtcatcacgcggatgtcgtcacgcatgtcctggtcgatgttctgcatgtagaagagatgcagggccaagttctccatctcagtctgcagagccgccacctttttgcgctcctcgttggcggctgcgcaggtcttggtgtagagagcgcgggcggcctgcagctcctcctccttcgtgcctgcgctcgctcgaggccattgcgtggcggtcgtgactcttctccagcagcttctgcaggtgtaccaggtgctgctgcacctcatagagattcacccccagctcctgccgctgggctcggctctgcttggtagccacaaccagctcttggaggtccagcttcaacttttcgatctgtcggttcaggtagttcttcagggcagcctggactcttaccatcagggggtggtctgcgtccacaaccaccagcgaattccnccgcactggactaggatctcgagtttcaatnnnnnggggccatggcagggc

SEQ ID NO: 89446 - DNA, 4593 bp, Homo sapiens; identical to SEQ ID NO: 74719

SEQ ID NO: 89447 - DNA, 612 bp, Homo sapiens
actgaggttgtttatgagagccaccaggtgttggtgttcccacatgctggtatgggccaccctgagagaggaatctatttgtgggggagttggaatggtggatggtgaatctcgtgttctgcagtggatcttgtaaagcttgtcatgtttgctgcacaaatggagacatatcaagtaagcagctgggcacacaagcctgaagcccagaaaagggttgtcctgaaatcctttagtcaagcctgatgttttgaactaaaatgagaacttatgagttctatagcattgctctgacagtaagagaggctgcttcaccactccatcaaagccacagcatccttattctgttgaggtagactcccatttttgactccacaacagagttaaagaacttcataaagtcacacagcatttgggggaaccacaatgcggggcaactggaagtggtgtcctgtcccctgcctccgagcccatatcttatccccagcaaggtgctgcttctccaactttatctgttgcaggagggaacaaaaactgggatcaagattttatgtagtgtgaaagtaagtgaaaagaaagaattgaaagagcatcaggctggaggtttcaaatact

SEQ ID NO: 89448 - DNA, 1366 bp, Homo sapiens
cgggttgtggtcaatatgttttttagaaataaagacggaaagctctcgcagtgcatagtatataaggacactgtcttgtgatacttgatgtatgtatgtatcgctcgcacctacctccacttactcacaaatacacaaacatacacaatgaattccacagatattggattgtgatgtaatctttatttcttactctgagctccagttagaaaagtttgacaatcattgttatagagctatgttcagaaagtggagactttctgactcactgtgagctctgctgtatctatgcgctccctggagagggagcaacttgctaaggtacagtcctggccattggcatggatatttattgttccacatgttgggaaaaccatgtgcaataaaaatcaaacatatgaaacaatggctgtcattgtaccacagtatacattgtatcttggtgaaggttcttaaattactccttggagtttcctaattcacttcaggaaggatttgttgtgttccgtctttatgctgtcacttgcaaacacttttgctttgctagttcttgtattagatcttcatatacttgcaaaaagaggtcctcttcagattttgttccatccaggtacacaacttcccatgtgatgtcctgcatttcttgtctgtactttagatacatgggccacacatggccatcaaagtatcccggagagtctggaggctgatagacccttgtactcctcctccttttacattcttcatatggaatagtcaggaaatagcttctattccatatagtgtcaaggggcttataattaaaaagaagaaaaccttcgatgattaaaatgggaatttcctcagcactttcctggtctgttgataccacagagtgtcttgcgctttccatccagcaggaaatggctgacatcattttttccatgttaagtgcttcaagcacatcgtactgcaaaaatccatttttatctgtctctatctcagactctggcttgaagaaatcatcctgagatatgacactgcaatttgggaggtgtttctgcaaattcttagccagtgttgttttgccactgtttgtcacaccactgattccaatgataaatgttttcataattagctttgaaaatcacagcttcctaatatttcctggcgccagttcgagtcctcccaaacacagcggcagaggcgacagccaagcgcgcgcctgtacccagtgcgccgctacccgcagctcgctccccgagaggcccacagcccctttccccacgctcctcctgggttagagggatgccaggtaggggcggtcaccagaggccccttttctctactctcggcgccgggttccagcccccgttggggcacgaaa

SEQ ID NO: 89449 - DNA, 423 bp, Homo sapiens
cccacgcgtgcggtgatatttacatcattaatgacaaaaattctagagctatataaggaaaatcactaattaatgtaaaaattagacacaggatgcaattaaactgtttaacaagaggaatttgaatggacaagtctttgaagagagtcttctcagcattgcttttaggtagagagtaacatttaaattaccatgcaatctctttcttcttcattttaaccacgtcttaccattagactttcaggatcaagctatctgttgctaagaaacaaaagcaaaattgcctttttctcaacagatttaagtgaaaatcagtagtcagttcaggtgtgactctaagaagacacattggagagtatgctgggcttacatgaactagccacgtgtgttggctcacacatctatcttgcattggttccacgt

SEQ ID NO: 89450 - DNA, 936 bp, Homo sapiens
ttgctgttaacaaggataatttattcaagaaaggaggtcaacaaatttctaaaaatctgttttagagagaatacatgattttggcatttggttattttttagcagcagatattaaaaatttttttattgacataatgacaggtagaatgcattcagtgctaccatgaaaccattctggggaatgtatcttggtagttttgttgctgttccatgcatttcagaggaaaattacacactagaaaacccaagtcacttcctcattgccccacacccaggacactgcacagtataaggcagccggaaagaatgctgtgtttcacctctgagcagaagtcattggagacacgatttcagggtttcatgtgccacccagccatgtttacactgatcacaagtcctcaggttaatcttccctggctgaaaacattcacatgtgcagtttaccagtgtgcaacggatggcctgttgggacattctgaataagaggttagtatcagcgttttgccatgtccccatgaaccctggttcagccgtagtcgttctggttccgaactgcatggagttgtcagtacaggagtctcttaaagtcaagtctcttgccctctttggctctctgtctctctgtgtctctctttctctcacatccacttctgcctcttctgactatcattagccaggcatggtggcaggcactggtaatcccagctactcaggaggctgaggcaaaagaatcgcatgaacttgggaggtggaagttgcagtgagccgagatcacgccactgcactccagcctgggcaaaaagagggaaactccatctcaatttgagatgtatcaaccccacaacatgggaccgtgaaatatgctggccagtcttgctcactaagcctgtcctctgatttgtaattaaggctacgaaatcgtcgacccgggaattc

SEQ ID NO: 89451 - DNA, 1620 bp, Homo sapiens
aattcggaatgtggtacagagagagagaaagagatgggattttattattttaagaagtgttgctatgcattttgataataatttttctttggtgtttgtcttgagggacggcggtaaacatttcaattgcctttaagtatgcttgcatgctggaatgatggttctttgaatgcggcatcaaactggcattgggccacatggcagccagcatgagcctttatgccacatttataaaacatgaatgtcatgagcccactctcagggaccttacaatttggagggttatgtcagatccacaaatctcttctatctcatcataaaggaaacctggcgtgtagcaggagatggtgtgataacaataacatattgcatgatcaatatttgtatcttcttagcaatattaaactttttgaccccctccattgtgtcatcaatttgcttaatacagtttcttcctcagcgtcggtttttaggcctggcataagctgtttgaaacccaggcacataccccacccatcatctttggcctagttaacacctcccctccgtgtgtggtggtttggagaacctgctttttcctcatcccactgatcccaaacccaggacaccccacagctgctgaccaggattaaacctaatggagatttaatgccattaaatcagaagaaattctgattctcagggactgacattcattcacttacatacttacagagtcagccaggtgtggtggctcacacctgtaatcccagcactttgggaggccaaggtgggtggatcacgaggtcaggagttcgagaccagcctggccaacatggtgaagccccatctctactaaaaatacaaaaattaactgatgtagcagtgcgtgcctgtagtcccagctgctcaggaggctgaggcaggggatttgcttgaacctgggaggtggaggttgcagtgagccaagattatcccattgcactccagcctgggcagcagagcgagactctgtctcaaaaaacaaaaaacccaaaaacttgcagagtgaatttaggaaaccatgtagtctacagtttgatgcaatgtcttccttttcctctttctcaaatattttgagccaggtactatcctagattgtcttgtgatatttacaatctaggagaaggcaggagagagaactaagaacagagagcatgttctgagatgtctgctgtgtttgcaggtaccttccctcaatttccctactcattggccatgctggaaagcaggtcttggcgccatatttgtaccatggtacttcccctccctatactcaattggttggccagaagcccaattgtcattctctctctctctctctccctctccctctctccctctccctccctccctctccaagatatccagtaactgactgatcagctggtggtgggttctgctggctgccatgatgggccaccagcaaaaagggaaaattggttgtgagtgagagaagcagagataagaaaggccacagggctgaaaagaaagaccatgggctgccgggcgctgtggctcaagcttgtaatcccagcactttgggaggccaagacgggcggatcatgaggtcaggagatcgagaccatcctggctcacacg

SEQ ID NO: 89452 - DNA, 1599 bp, Homo sapiens
ttttttttttttgtattcattatctgtgttctcttgtatctccctgagtttctttaataacattattctgaatttttttcaggcatttcatagattttcttttcattggatctgttgctggagaattattgtgcttctttggagatgttatgtttcctttttcatatttcttgcatccttatgtgactatctgtgcctctgacataacagtcatttcttccaattttatggattggcttttatatgggaaagaccttttcttatagctctatctacagtgttcattggatatcacactttggctttgattctgggtgggtacagtggtatagtctgcatatgattccttcagctgtaattggcatgagtggtgcctgtgagtcattcagtggcttagactgcagtgtttttttttgtggttgttgagatggagtctagctctgtcaccaaggctggagtacagtggcgtgatcttggctcactgcaacttctaggacctcccgggttcaagtgatcctcccacctcagcctcctgagtagctgggactataggcacgtacaaccatgcgcagctaatttttgtatttttagtagagatggggtttcactatgttggccaggctgctctcgaactcctgacctcgtgatctacccgcctcggcctctcaaagtgctgggattacaggcgtgagccaccacacttggccagactgtagttgttattggaggctgtggtgaggctttgctgaggatggggatgccaggaagtcttgtccttcagcatcagtggtagcggtggtggaccaggtgtgtcaatactagggactgtgggcagtgtttgtgggcactgatgatagcctgtctgcgtgggccaatccctgggcctccaggtggctcctttggttgctggcagtggcagcactgggccaagtgggcaggtgcaccactgggctcctgggtggtgtgcgtggcaggctgatctctagttctccaggtgacatatgcaggttctggtggtgggtaggcaggcatttcctcaggcctctcagtagtaagtgtgagcactagctctggaggcagatgagtcaatctccaggcccccagatggtacattcaggcaccagcatattcctatgcatttctagataaaagtatttttcagaaaacctgagcatatgtcctattaatacaacttaccctcatcagctctgcatgagaagaaggcgtaattccctcagtagaacagtcagaatggaatcacagacttgttttgagccagtcactggtgagggggggtaggataaaatgataagctcagaatctaaaccttagactagggaatggcaaactttttccataaagaggcaaacggtaatattttaggctttttgtgtagataacctcttttgtagtgacacagtggtgccatcgtagcctaaaaacgtatgtagacaatggataaatcaatggacttggttttattccagtaaaacttaatttatacagtcagagggccagatttggcccttggtctatagttggccaaccctgtttagagcagtcaaaatttattccctggggctgggccaactttttctt

SEQ ID NO: 89453 - DNA, 1015 bp, Homo sapiens
ttttttttttttcaactcatttttagctcattgctgttgggtgtaatagatgcagtttatctaatctacatttttattgactgtcatctaccaaaatattgacttaaatcctgtagctatttgatttcggactttaaattgatctggtgttccttgcggggcttcagttgcatctaaatagatgtgagagttgaaagacctataggggcttttctcgctttatgatgtcttcttcttattattattttttcctcttgttgatgaaatgtcagggtgaaagggatagccaaatggactaaagcacaagtgccactctagttactcggcagagtccccaataaaggtctaccacaataccaccacacatccgctttgggatgaacaagggctgactgagtgataagctcttgaaaattcttaagctcactgcatcccttcaggtctccaaggaattctaagtctcctccctgccatgagagacacgtagtaaaacttagtgttgggagatggaagctggatgggccttcgggggcttggacctggcagggactttgggatatagcagagagagagcttggcatcgacttattactccaggctatagaatcctggaaaagagctaccatgcagcccatgcctggcccgactggaggaccaccttagtggaagggggacaatcagggtctctggcctgccatgtgcacaagcatgctaattgcttttgtttaacctgcagatggaatatttgatccatttcaaccaggcatttgcatcttgggtatgctgtcttaattgccaaagtttgttttaagtccttaacttttatgatcctctagtaaaatgaatgcttcctttagcaccaatttttattagtttttagacaaaagaaagctaaacgctattttatatttactaatgcttcctgtatgacttttataccagataagctaaattttacctttatattagtgtgttattaatgttaaacttaattttaataaaaccttgtagacat

SEQ ID NO: 89454 - DNA, 2303 bp, Homo sapiens; identical to SEQ ID NO: 58793

SEQ ID NO: 89455 - DNA, 986 bp, Homo sapiens
  misc_feature (1)...(986): n = a,t,c or g
ttttttttttttgatctttacaaagataatctttattcataatcacaggccacaggggtgagacctgaggtttgggttctgtggtgaaggagaacccctgtcctcctgtcccttgccctgggcctctgctggctgaggagggacaaggtgagggggcccccatggtgctcagacaaccagagcctccctggcagggcaggagtgtgggtgccacagagacaagccccttgcagagctgacctggagcccaccatccccatagcctgtgtgagcatgaagcgaggacccccgggtgggctgtgccctgggcttgtcactgatgccagtggaggctggcacctgcccctctcggcacctgagacagtgagggaaggtagctgctgccgtgaagaacaaagatgctctgagcacacacttgctggggctgagctgaggggcacacggaggcaggccctgcctgtggtctggtcagctgtccctgccgccgctacttttctggtctggggctgtagccttggtcaggttcccagcttccctcttgcggacgctgagcaaagctctagaagctctccaggatcttgaggtaggtggcctccgtctccgcgatggtctggtagaacttactgcaagaggcaatcttgcgtgccaggttctcgttgacgcgggccagcttctcgttgacgcaggccagcttctctgtcagctgcctcacctcattctgcagccgctgtttcttgtcctcctcctgctggatctgccagcacagctcctcctgcttctggcatagctcctctatgcatttgaccagcttgttgtcgtagttctgcagcgccatgccctgctgggtcaacatctcctggggcccccaaaagtcaagctgtgactccacaaaaacaaagtgaacaccatctgtaggcaaaggtggctttcttaacttcagggacnccaatctcttcgaagtccncgncaattgcantgtactcaca

SEQ ID NO: 89456 - DNA, 659 bp, Homo sapiens
tttttttgagaagaattcagttagttttaattagtacaaatttaatcaattttaattaattttaactagctaattttaagtctttaattagttaagaaaggcagggtttcacataagaattacagatttcaagcttctcttgaaaagttggaagcaccaaacacccaagcccgggcgctggtggggagcagcgggggaggccgagctgctgacgagcgggtctggctcagagcagcgtccaccctcggccctcacaggccccgctgccctgccgccagggcttgagcttgcagtcttgggtccgcccggtctttctgtctgcggtggaggtagagacgctgacgtgctcagcttaggagtctcaggtctccccgggccgcaggccgtgaggacctctgctggtcatccccggggtggctgcagccaccctcttccggggactggaacgggagcgtccttgtggccaggaggggaccctgctggtggccgcccgatgctcaggcccctctttccacctctgtgtgccccaccccagcttctgttctcggctttgacctgtgacctccgaccttcagaggattagggcgggggtcttcctggaaacctcagaggatcgtctgtcccgtggtcactcgcgggagtagaccttgctgatgcgc

SEQ ID NO: 89457 - DNA, 477 bp, Homo sapiens
  misc_feature (1)...(477): n = a,t,c or g
ggggnatcgagacctctagtcactgtggnggaattcctctgctgtggcaggaaaaaagtttgagtcaagacagaacaacaattctgtgaatttaaagtggagggtaggatggttctggggcgcagttgaaggggaagaagtacacatcactgaatgaaggagtggaagcctatggtgaatggcagggtttggccatgaagcaaatcagatttggattttacggacggtcactcagtgaaactgacacgcctgcaaagcgggaaatggaggacgaataaacaggtgatgtgttccagcagcagacaggagggccttctaagaacacacctgctcctttacccaggacctcttcctacaactccagcagacattctcatgtagaaacccacaatgtgatttcatcacattctgactccacattctgacaccacattctgactccacattctggctgctgacattgcagtcccagtcaan

SEQ ID NO: 89458 - DNA, 561 bp, Homo sapiens
  misc_feature (1)...(561): n = a,t,c or g
cattcgctttcgatcactagtccagcgnggngcgaattcgaatggctgtggctntgctgcgctcgcctcttcccggcgctgcggtcagcgccaagtcaggagcccgcattcttccctcccctcctggcggcctaggttcccttaaagggacagtttcccggccgcctctggcctccgccgtctgaaccagcgctcggggcgcagaggtgggcgggagggattcagtttggctcctttctgacctctttcctcctccgcccccccaactgccgccgcccccctacccactcccgccacccttctttattgaatgtgaagtgtgcttcctctcccgcccccaagagggacctggctggaaaacagtccgcgcctcctggaaaaagaacggggtggggggcgcgtaatggtgaattcgcgttaaaagtgaggtcgagccccaaaacatccaggaagaggaaagcagacctgggtgcaggaattccttacctgcacgcgcgctccgcacagnncgcccgccaccgcaacttgcgaactgtcgcgggtagacagtctgcctttgtg

SEQ ID NO: 89459 - DNA, 1830 bp, Homo sapiens
  misc_feature (1)...(1830): n = a,t,c or g
ggaattcgcggcaagatggcggaccgtggcggcgtgggtgaagccgcagctgttggagcgtctcctgcatctgtccctggcctaaacccgacgctaggctggagggagcgactgcgggccgggctggcggggactggggcctcgttgtggttcgtggcggggctggggctgctttacgccctgaggatccctttgaggctgtgtgagaatttggcagcggtgactgtatttttaaattcattgacacccaaattctatgtggcacttacagggacctcttcattgatatcaggactaatatttatatttgaatggtggtacttccataagcatggcacatcttttattgagcaagtatctgtaagccatttgcaaccactgatgggaggaacagagagcagcatttcagaaccaggttctccttcgaggaacagagaaaatgaaaccagcagacagaatttgtcagaatgtaaggtatggagaaaccctctaaatcttttcagaggagcagaatataggagatacacttgggtgactggtaaagagccacttacatactatgacatgaacctgtcagctcaggaccatcagacctttttcacctgtgacacagattttttacgtccttcagacacagttatgcagaaggcttggagggaaagaaatcctccagctcgaatcaaagcagcctatcaagctttagaattaaacaatgactgtgccactgcatatgttctactggctgaggaagaagcaacaactattgtagatgctgaaaggttatttaaacaggcactcaaggcaggagaaacaatttataggcagtcacagcagtgccagcaccaaagtcctcagcatgaagctcaactgaggagagataccaatgtactggtatatattaattgaagattggcaatgtgtgcaagaaaattaggaagaataagagaagcagtaaaaataatgagagatttgatgaatgaatttcctcctcttaccatgttgaacatccatgaaaatctcttagaatcacttttagaattacaggcctatccagatgttcaggcagtcctagcaaaatatgatgatataagccttccaaagtcagcagcaatctgttacacagcagcactgttgaagacaaggactgtttcagaaaaattctctccagaaacagcctccacaagaggattaagcgcagcagaaattaatgccgtggatgcaattcatagagctgtggaatttaatcctcatgttccaaaatatttattagagatgaaaagtttaattttacctccagaacacattctgaaacggggtgatagtgaagcaattgcctatgctttctttcatcttcagcactggaaacgaatagaaggtgctcttaatctgttacagtgtacatgggaaggcagtaagtattcttttccaaaagtaacactaatctctctaactattcattgaattcacaggcagtctttttaaatgagattgtctgggtttccataaggatttgtcgttcagattggtttcaaatggaaattagtgatgagatatttggtttattggtagaaatgcataatgttatattgatcccacaaaagcagaatgagaaattgttatggtattctgccatatgttaatttaagttacatatttgtaaggaaagaaaatgaaaacttggccctttgacttacaactttttttgnnnnnnnnnngagacggagtctcactttgtcccccagagcaataaagtcagttggctttctctaaggnnnnnnnnnnntacaatatctttattcaaacaaaaataaaaaaaaagggggggctttt

SEQ ID NO: 89460 - DNA, 1663 bp, Homo sapiens
ttttttttttttttctagcgaaaaaaaactttaatagcttttaatctttatgctgcaacatatactcttgtatatgcacagaatgtatattctgtatataagacaccaaaatatatatttttgggggaaaggtgtcaggggctaaagtgaaagattcactttttactaactctcctcctataatggttgaatatttttaaaaccatgtgcacatattactttttaaagttaaaataacaaaaaataagctgctaaagatatctcaaaagaagctttttcctgagggacttactaatatggtaagtacagtagcactgtaaagccttttaacacttttggtcacataaaatttttgttgttaaaattcctgctgtgcaacaagtaagtccttacttgtcatctttcccttttgtctttttgtgcaccatctctcggaaactggctaaaatcttactttctctctttcgtctctcttcttggttaaaggatgcaagagctctcttctcatcagcactgtagatctggttctccttacgcagtcgtacagcctccattctgcgatgcctgctaccactcatgacataacctgagcattcaaaagaaccgatctcttcacttgtcaacccaatttcacctcttcgtgggattcgctttccagcttttacatactcagccatagctgcaccttcaccgggaagcaaagcatggccatacttcaaaggtttttcatcttgagaggtatgtattataggtgcttctggccctattaaatccatagtatctgccacatttggctgctccatccaggtagcttctgacaagtcctcttctgagtctttacagcttgagtcactggattcttttttggttttcttattcttctttttctttgttttgtgtttctttttcttctttttcttcttggctttaactctctttttatcatcatcagagtcagaatttgtgtcagactctgagttactgtcactatcagaatatttcctatgctttcttttagacgacttattctttctttttttcttgtttcttgaacgactggtcttctttttcctatgttcttccgagttggaatctgaactgctgcttttctgatgcgttacctcttcttcatcctcaactggggtatgttcgtcagaatctagctgagggaactttggagacggcccccacacttcaggcgctcccaattccccaatcctctctctctccttcagcctcctctgccgatggctctctcccttctgtcgtcttccgctgaactgccgttctttctgcatagcagtgacgatggtagcgatatccactatacgaggtcgaccaggaggacgcgaaggcgtagttgcggaatcttgggagccgccctcgcgacccagagcgactaaaggggtaaagagcgcccacgtccaactcactccaaggaggcctgaggccctcacggccgcgggagtgagagcgggaacagccatcccaagaggaacatctgctctgcggggatggtgggctccccgaggagctgcgtcgccttctccgagagcccacgatgtcctcggaatagctggaccgggatactgggggcatgagccgcgcctcaacgctgggcggttgctacagacccagaggctggctggtgattcgcggccac

SEQ ID NO: 89461 - DNA, 2941 bp, Homo sapiens
caccaatggccatattgactgagcacttattatatgccagacgttaaattaagcatttcacatggaatgttttatttaattctcacaataacccaatggatgaggcactgtttttacatttatttcataaaggagaaaatgtcaagattattttgcagacatcctatagactgccttacttctgtcagtattgctaactttacccctttcctaagtaaatgcttatggctaagcagaaatatgtttggtatttcaggaatcggtgactttcaaggatgtgatagtggactttacccaggaagaatggaaacagctggaccctggccagagagatttgttcagggatgtgacattggaaaattatacacacctggtctctataggactccaagtttctaaacctgatgtgatttcccagttagagcaagggacagagccatggatcatggagccaagcattccagtaggtacctgtgcagactgggagacaagacttgaaaatagtgtgtcagccccagagcctgacatttctgaagaagagctatctccagaggtaatagtggaaaaacacaaaagagatgattcttggagttccaacttgctagaaagttgggaatatgaaggcagtttagagagacagcaggcaaaccaacagacactgccaaaggaaataaaggtaaccgaaaagacaatacccagttgggaaaaaggccctgtaaataatgaatttgggaaaagtgtcaatgtgagttcaaaccttgtaacacaagaaccatctccagaagagacctctactaaaagaagcatcaaacagaattcaaacccagttaaaaaagagaaatcttgtaagtgcaatgaatgtgggaaagcctttagttattgttcagctcttattcgccatcagagaacacatactggagaaaaaccctacaaatgtaattgattgtggaaaaagccttcagccggagtgaaaaccttataaaccatcaaagaattcatactggagataaaccatataaatgtgatcagtgtggaaaaggcttcattgagggtccatctcttactcaacatcaaagaattcatactggagaaaaaccatataaatgtgatgaatgtgggaaagcctttagtcagaggacccatcttgttcagcatcagagaattcatactggcgagaagccatacacttgtaatgagtgtggaaaagcctttagccagagaggccactttatggaacatcagaaaattcatacgggagaaaaaccttttaaatgtgatgaatgtgataaaaccttcaccaggagcacacaccttactcaacatcaaaaaattcatactggagaaaaaacctataaatgtaatgaatgtggaaaggccttcaacgggccctcaacttttatccgtcatcatatgattcatactggggaaaaaccgtacgaatgcaatgaatgtgggaaagccttcagccagcactcaaacctcactcagcatcaaaaaactcatactggggagaaaccctatgattgtgcagaatgtggaaaatcttttagttactggtcatcccttgctcaacacctgaaaattcatactggagaaaaaccttacaaatgcaatgaatgtggaaaggccttcagttactgctcatcccttactcaacatcggagaattcacacgagagaaaagccctttgaatgcagtgaatgtggaaaggctttcagttatctctcaaaccttaatcagcatcagaaaactcatactcaagagaaagcttatgaatgtaaagaatgtgggaaagcttttattcggagttcatctcttgctaagcatgaaagaattcatactggagagaaaccctatcagtgtcatgaatgtgggaaaaccttcagttatggttcatcccttattcagcataggaagatccatactggagaacgaccttacaagtgtaatgagtgtgggagagcattcaaccagaacatacaccttacacagcataagagaattcatacaggagccaagccttatgagtgtgctgagtgtggtaaagcctttcgacattgttcatctcttgctcaacatcaaaaaactcacacagaagaaaaaccctaccagtgtaataaatgtgaaaagacctttagccagagctcccatctaactcagcatcaacgaattcacactggggagaagccctataagtgcaatgaatgtgacaaagcctttagccggagcactcatctgactgaacatcaaagaattcatactggagaaaaaccatataaatgtaatgaatgtgggaaagacttttagccagagcacatatctcattcagcaccagagaattcattcaggagagaagccttttggatgtaatgattgtggaaaatccttcagatatcgctctgctctcaacaaacatcagagactgcatcctggcatatgacaattctaggaacatcataaatttaggggagatatttactttagtttgtccttttgttaagtactgaagaatcagagtggatttagaaactgccttgaaatcttttaaattttcactatcatgttatggaatggaaagtaccattgggctgaactaatcccaattgttattaaagcccactctgtgacattagaaaactcctactgttttaagctttagttccctttatggaatgaaggctttggagtagattatttcaaaggtagtttgggaagttttataatcagttttgtatattcacaatattttcttgaatgggggtttactatacatcagcattttgctgtgttgcatctagaatgtgtatgtttatgcatgttttgccaatagaatttgtgcttcgagtaactagatcggggatctagtatgctcctggtctaatgcatttacattgtttaggtaactggttcctaataaaaagaattataaaataaaaaaaaa

SEQ ID NO: 89462 - DNA, 3912 bp, Homo sapiens
cacttctgtaatatgcttccccctgaacagatctctccctcccccctctccacccccaaaatgcttaaaaggtaacctgactctttgttctgggctcagtcctttggatattaatctgactgggttggctggtgcacctaaataatacatatatcctcctcaaccccatcggtctctctgattcctaaatcatccccaaacatttctggtggcccatatggggattggagataacagatttactgtctcctttgcccatgggactagggccctggggctgtggaagacctggcatccaaggcatgccatgggggagtttcacccggatggagactggctctccccgcatcctgcccagcagtgcaactgaacctgagatggggctgcaggatgacaccagcacttcaggaaccgcggtgtcacaccttggattcaccatagctggctgaaactagcagcagcagtgactcccgactatgaccagtggattaaccaacaagaccctgattgccccacccgaatagacctacggcgaatcccaaccaccagtaagaaggacaactgccctgctctgaccacactggaggctggtcagtctacacatggctgaagcttgaagatcttgcaagctcttgctcttagtcacatcctggaagctgactagtctacacacagccgaagctaagaggaccatctctagataagtaaatgtagataaaatttataagcctagttataattgttctgttgttacattattactgcaaatgctgcaaatgtccatgcccagaggaaggtttgccattcctgtgtgtagtgtaagcatgtttctattacatacactaatgttgttaccatttctgcctatactagaaggggagaaatctctagaaggatgcccacactgtgtacatactacctgggtaaggaataccatagttaaaactctactgtaccatacctacagtacaggaaccaagttaggaacctgcacatacaaccagaccacctattcggtctgtgacccaggaaataatcagctatatgtatgttatgaccctaagctcttaccctatgaattctggtttgaaatacatattaaatcagagggagaaaaagaaggagagttatagctcgaacaaaagaagcccctccctcctgtaaagggcctatttccttgtactttgatgcctgctatgctgcatatgttcacaatcctaaaaaaaaaccagaagccagtctgcaatggtgtaacacaagagaggcttagcaggagcagccctaagcatctgtacaaagaaccacaaatcggatgcccagactgtaacattcagtggtccacactaacacaactccaatatttatattcaggaaggagtgctctgctaagtagtatgttaaccaaaccaaactgtaagacaagaacatgcaatcctttacattttactatcttaaagccagagatacctttctggtctacaggacagacagcactataacgacttgatagactaggagcaggccttggagttccactactaattgtcaaaaagactaaaaggactcaaatgcatccaaccccgcaattctgggtccataatcattctataagcatttggataagccagtgcctgagcttcccccaccaaccaaaaacttatttgctcaactagctgaaaacatagctggcagcttaggaatttcctcatgctatgtacgtggaggaactaatatggggaaccagtggccatgggaggcaaaggaattaatgccacaagataacttcacttcgcttaaccctgccagtgaaccaacagcctcagccagtgtttggttgttaaaaacctccataattggaaagtaccgtatcgccgttgggaaaggctttcacagaggcagtaggagaaataacctgcctaggcaacagtattatgatgagactaaaaacaaaactctatggagaagcacccagaattactcctacttaccagatccaaatcctttatctccattctctaccctaagccacacttggcatcaactagaggttccaaatgcttcgaaagcaccctctggcctatattggatctgtggagcatgggcatattggcaactgccagctaaatggacaggagcatgtgtgtagtaacaatcaagccattcttctttctaattcctctaaagcaaggggaactcttatggtatccagttgatgatgaaaataaaagaagaactagaagagcataatcacaaaaatagacacaaatgtcaaaaaggatgtggacataggagactggaaagataatgaatggcctcctgaaagaataattaaatattattggccagctacctgggtgcaagatgggtcatggggttaccacaccccaatctatatgctcaactgcatcataaggttgcaggcagtctttgaaattataaccaatgaaacatcaagggcactagatttattggcaatacaagcaacacaaatgagaaatgctatatattgaaatagattggcattagattatcacttagcctctgaaggaagagtatgtggaaaatttaatttaaccaactgttgcctagaaattgctaataatggccgggttgtcatggaaatcagagctagaatgcacaagttggcccatgttccaattcagacttggtcctaatggtccctggattctttgtttggaggatggttctcaacctttggaggattcaaaaccctcactggtgggtttttgtttattcttggcatctgcctcatcctcccttaccttttacccctgtttattaggaggattcagtcaactatagaggcagtaataactcaacacactaccgcacagttgatggcattaaccaaatatcagccactgccagtagaagaagctcagctctgtgaagaggtggcaaatagtggtgctttctattaacacctttgttataaaaagcaacaaaggggggaaatggaacaggaattaaaagaaattaaagaatgcataagcaaaaactcaattgtatgtagggaaacccaattcctcctgaggaagagaaagaggtggagtcctttaaaaattcactgcctgtttttccgtctgtagctagtgagccttatctctccctttcccaggcattgtgaagaccctgtttctccagctgtgcagctgcatggtcactagacagataaactcaagttgtaaaacatgtttttccttgaaaagtaagaaatgatgtaatacatgtctcaactgaataactgtctttgtttctcacttctgtagtaagcttccccctgcacagatctcccctctcaccccatgaaatgcttaaaaggtaacctgactctttgttcagggttcagtcctttggatgttaatctgactgggctggtgcacctaaataataaatatctccctgaactccatcagtctctctgattccttaaaaatcccgctacattttgtgtaatgaactggcaacaagagaaagttggtcgaagaaaggcagaggaactgtgtcttgtaagaattagaatcgaggggctccataatcatctggcatccgttcaatgttgtatctatggttagaaatgtacatgataggaactccaggaatcttacggattcttcttttcaggtcccggtcaactgtggccacaatgtaacacttatgctgtaagagacatggagtgatgttcacactgaggtcactgagcacgcatagtgaatactggataatggcacaacgactgggggatcctctagagtaggcaaatcttaaagccttctttttcactttctttccagaatctggatctttttcttctttttccacttcagtgatgaagtaatcatccaggcttagaactctgggtgcaggtcctccaaattctacctccttatc

SEQ ID NO: 89463 - DNA, 458 bp, Homo sapiens
  misc_feature (1)...(458): n = a,t,c or g
natcgtagaccctaggccattgcgaggcattctttctccgctggatggagttttctgctgaaaagtctgctgatagttctgaagaagtttccattcatgtaatgagacacgtttctctggctgctttcataattctctttggctttcacttttgacaatttaattataatgtatctcagtgaaaacttaatgttcagcctatatggagttttttgggcctcatggatctggatgttcaattttcttcctagttttaggagtttttctgtcattattttttaaaataaactttctttcctttgtctctctactccttctgaatattttgtatgtgtatattggtttatgttgtgtgccataagtcaggtaggctttcttcactctttttcatttgtttctttgtcttttttgttcctctaactttataattttaaatgccctgtcttcaaatttgtgat

SEQ ID NO: 89464 - DNA, 1719 bp, Homo sapiens
  misc_feature (1)...(1719): n = a,t,c or g
gggtcttcagagagcagaccttttcatattcgaggatatttcatccttcagggatacttctcttattttctccaagagtgggcgaatcgcatggcgttgttgcaagcatcgtctgagaaccaaggtaacgaactgactgctgatccaaggcaggcactcaacggtaggattttaaggtccacagatatgggaatgaagaactccatagaagataatgatggannnnnnnnnnnnnnnnnnnnnnnnnnnnnnnnnnnnnnnnnnnnnnnnnnnnnnnnnnnnnnnnnnnnnnnnnnnnnnnnnnnnnnnnnnngacaggagagaaactaacaggaagttgggtggaagcagcgcggacccacggcgcaccgaacgcactccaacagaacccgacgcagacacgcgctttcaaccggcggagacactggcagggccagaaacgcgcgcagagggggcgggaggtcgccacgcagtccccttcctgcggcgtcctccacacccggggtctgctggtctccgcggatgtcacaggctcggcaaccgccctcctgtcggcggggagtcccgcgacgcccggaaatgctccgaagcctgtcgctcagctgccagatctgcgtctgtgtccggttccgtcactgaggtcgcccctgtccggcccttcctccctagttctcttcaccgtccgcccatcctgtcgcgcgccgggtcaggtccccattcggcatgtggcttgtcttccatcgtccccaccctcgcccctcttggcccctcagggcagccctgggattcggcagacgccagtcctccctgagatgcttccccgtccttccctccgccaggccctacgtctccgcaaaccccacgcttcggggtggccgcctcagacaggaccctgagtccgagactggggtaggggacctgcccgatcctgtaacaaccctcgtgcttctgcacaatcgcctcccactagcggtgactgttgggtgtctaccttcccggtgtcccactgagaagcgggctcttccttggcaggggcttcttcattgcctcgctgtggatgtcgaggtggggcaggagagtgaggagaaaacagagaggagggaggtagagccaacgagcgagaaaaggggagggaagtttagatgggaagtggatgggtctgaggaatttgaacaaacaccgacagtgaaggagagtgacctgagcaagcagtagtggggtaaatggaaatagacaaaatgggaatcagcagagatatggaggacagaatacaatgaggaggccttgaccgtcagtagcagagagggcagcagaagcctaattcccaaattccttagatggttttctgatttccaaattagtttcccttttaaatttattgtgtcaggttcagcttatgaggcctcaatacttttcagtcttaattgtatattgaaaatactttttgtttactaaatgctttttacattaattcagtgtgcacttcgtaaggataatgatgatttgagttagtttagtattcaacagcttcctctattcctttatatgatctctgtatttaatagctgtggcataaagtttccaactaagtataagtatcaagttttctttgtgatgttttctgcaaatattgaaggatgacctggattgtcctagaactttgttccaacagattacatgtgttcataacgaataaattgctcaaagataaaaaaaaaa

SEQ ID NO: 89465 - DNA, 1202 bp, Homo sapiens
atttttttttcccaaaaaggaagataatcttatctcttctacagatgactgcatattttattgccatccttttcaaagggagaaagctgcatttacctcttagcgtctacacttaaatgcttgaagaatctagcccaaccaacatattgtaagtgaactcttgaatgagctgatagccatgaattttgtgaggaatgcacatgccagaattaggaaagtacaaaatccccgcctccccgctaggctgtcttctctgttccctttgtttcttctgagggcttcgcagttttgcagaacagccttcttatctctctttccttttctccttgggacttgccttccacagacctcttcagacattcttgcagaattgttcccataagatctctattttcaattggctttataccttccagttttatggcccatccagaacagctcagttcactttctgaagaagaaatgagaaagtgcaaaatgttaccaaatctttcctcctgtgttttcaaaaaaccacatttgatgctttctattttatatgcttttacagaaattctctttaaaaatcaaatatatgcttatcattattttaataaaaacctctgctgagtaaatgaattttataggattgggggaaaaagtttgcaatgaatggtggatgatactgctattcaatagggagctcttaaaaatagagcaaatgcataagacattttttacagttttcaatttgtaagaaaatgatttcattagaggggaaaaaagagagagagaaaaccatcagtcaggatgtgggagaatgcaggctcctgatgagaccagcggagaagacaaactaagtgtatggatgcagattaggcctcagaagatgagggtgtaaaagggatttaatggtggggtggattatagaaatccatgtaacaatgttaaataattatagttccagccgagatcaaagcagtgctgattgaacgccctcaagctgttaacatgaagtatcttgaagggaaaaaaacctgcctcaaagattggtcagtctgggcaaacaatgtctgtgatctgtagaagttccaactgtattgaaagcaccaattctagggaatgaaaaatggaggaggcagcctgttagggaatttcttcttctggagctctcgatcttaaaacggactttttagctatttgtagtttgtttgaaaatgcta

SEQ ID NO: 89466 - DNA, 2895 bp, Homo sapiens
gacccacgcgtccgggggaagactgttaaccccatccacgccaccagaattagctctttcccttttggtttgcaagcactgcctgtaaagccctcgcatgagaggccagcctgctagggaaatccaggaatctgcaacaaaaacgatgacagtctgaaatactctctggtgccaacctccaaattctcgtctgtcacttcagacccccactagttgacagagcagcagaatttcaactccagtagacttgaatatgcctctgggcaaagaagcagagctaacgaggaaagggatttaaagagtttttcttgggtgtttgtcaaacttttattccctgtctgtgtgcagaggggattcaacttcaatttttctgcagtggctctgggtccagccccttacttaaagatctggaaagcatgaagactgggctttttttcctatgtctcttgggaactgcagctgcaatcccgacaaatgcaagattattatctgatcattccaaaccaactgctgaaacggtagcacccgacaacactgcaatccccagtttaagggctgaagctgaagaaaatgaaaaagaaacagcagtatccacagaagacgattcccaccataaggctgaaaaatcatcagtactaaagtcaaaagaggaaagccatgaacagtcagcagaacaggggcaagagttctaggccaagagctggggattgaaggattcaagagggacagtgatgggtcactttaagtgtggaatttgggagtatggcaccaacttgaagggtacattggacataaaagaagatatgagtgagcctcaggagaaaaaactctcagagaacactgattttttggctcctggtgttagttccttcacagattctaaccaacaagaaagtatcacaaagagagaggaaaaccaagaacaacctagaaattattcacatcatcagttgaacaggagcagtaaacatagccaaggcctaagggatcaaggaaaccaagagcaggatccaaatatttccaatggagaagaggaagaagaaaaagagccaggtgaagttggtacccacaatgataaccaagaaagaaagacagaaattgcccagggagcatgctaacagcaagcaggaggaagacaatacccaatctgatgatattttggaagagtctgatcaaccaactcaagtaagcaagatgcaggaggatgaatttgatcagggtaaccaagaacaagaagataactccaatgcagaaatggaagaggaaaatgcatcgaacgtcaataagcacattcaagaaactgaatggcagagtcaagagggtaaaactggcctagaagctatcagcaaccacaaagagacagaagaaaagactgtttctgaggctctgctcatggaacctactgatgatggtaataccacgcccagaaatcatggagttgatgatgatggcgatgatgatggcgatgatggcggcactgatggccccaggcacagtgcaaagtgatgactactttcatcccaagccaggccttttctgggaggccgagagagcttcattccattgcctattcaccttcaaaattgagggagcaaagagaaaaagtacatgaaaatgaaaatataggtaccactgagcctggagagcaccaagaggccaagaaagcagagaactcatcaaatgaggaggaaacgtcaagtgaaggcaacatgaggggtgcatgctgtggattcttgcatgagcttccagtgtaaaagagggcacatctgtaaggcagaccaacagggaaaaacctcacttgtgtcttgccaggatccagtgacttggtcctccaacaaaaccccttgatcaagtttgtggcactgacaatcagacctatgctagttcctgtcatctattcgctactaaatgcagactggaggggaccaaaaaggggcatcaactccagctggattattttggaagcctccaaatctattcctactttgtcgggactttgaagtgattcaagtttcctctacggatgagagactgggctcaagaatatcctcatgcagctttatgaagccaactctgaacacgctggttatctaaatgagaagccagagaaataaagtcaagaaaatttacctgggatgaaaagaggcttttggctggggaccatcccattgatcttctcttaagggactttaagaaaaactaccacatgtatgtgtatcctgtgcactggcagtttagtgaacttgaccaacaccctatggatagagtcttgacacattctgaacttgctcctctgcgagcatctctggtgcccatggaacactgcataacccgtttctttgaggagtgtgaccccaacaaggataagcacatcaccctgaaggagtggggccactgctttggaattaaagaagaggacatagatgaaaatctcttgttttgaacgaagattttaaagaactcaactttccagcatcctcctctgttctaaccacttcagaaatatatgcagctgtgatacttgtagatttatatttagcaaaatgttagcatgtatgacaagacaatgagagtaattgcttgacaacaacctatgcaccaggtatttaacattaactttggaaacaaaaatgtacaattaagtaaagtcaacatatgcaaaatactgtacattgtgaacagaagtttaattcatagtaatttcactctctgcattgacttatgagataattaatgattaaactattaatgataaaaataatgcatttgtattgttcataatatcatgtgcacttcaagaaaatggaatgctactcttttgtggtttacgtgtattattttcaatatcttaataccctaataaagagtccataaaaatccatctcaaaaaaaaaa

SEQ ID NO: 89467 - DNA, 448 bp, Homo sapiens
  misc_feature (1)...(448): n = a,t,c or g
tgagagggcggccannnnnnaattgactgcattcctcagagnggnggaattcatagtatgaaagcagtcttttaagtcaataatgactcaaaactcgaggaatcactgcggggggaagggagcccctgtggaaggggccccataggttgcaaattagcattgatagcctgtaagtcatgcagaactctccatttaccagactttatgggaatgacaaaaaatgggtgaattccaagggctgtctgctggttctatatggctggcttttaattgttcctcaattaattcatgggtttgttgtaatttctctccctttaaaggtcaccgttctacccaaattggatcttgagacagccatgtcaggggtaggggaggacttacaacagtggccactattagaaagggctctgcatagtgacccccccattgggctaataaggtcccattn

SEQ ID NO: 89468 - DNA, 688 bp, Homo sapiens
ttttttttttttaagaggcccaaactactgtttttatacatatgtgaaattgtacatataaggttaaacaacctgcaaccagttaacttttgaagatacagtttatcacagtgttgtaaattttcagaacaatattggcaggcatttggaaaaacaacaaatgagactcttgcaagagaatctaaatgatacgctaataacattgcttcatgaaaaggacatttgaaccatctgagtttctgccttaggttataactccaaaatggacgaacccccaatagtttatagcaggcagccccaagccacaaacaaatgtgtcagtgcagacctgagacctggagtgagtccccctcccccagggacatgagtgaatcctctaagacccctcttcctccaggccctccatccagtcatcagggagacaagaaagggtccacacagcactgaggcccaactatctcactgtcctcacctccatggacagagcccaggtgaaagccacccctgagcctcctccctcgtctcccacagcctcagcaccatcatctgccttgagtccaccaggactgagctcatcatgccttttccctgtttgtgtcagtcacactgggtcccccaaacaccctgcattcacatccccacaaggctctgcgaattccaccacatggactagggacgacggaacaaa

SEQ ID NO: 89469 - DNA, 3647 bp, Homo sapiens
tttttttgagacttgtgagtctccctctgttacccaggctggagtgcagtggcacgatctctgctcactgcaacctccatctcctgggttcaagagattctcacgcctcagcctcccaagtagctgggattaacaagcggccgccaaccacgcccggctaatttttgtattttagtagatgcggggttttgccatttttgccaggctggcctccaactcccgacctcaaaagatccgcccgtcttggcctcccaaagtgctgggattacaggcatgagccaccgtgcctggcctgcgagtttaattattttttcgggggtgggtgaacttctcgcagcggcccccttgtgggggtaacccggtggcgggtttcacttcggggtttggaggggaagttggagtctgtggggcgggtcccgcccggccccgaatgtcacggccgaggttctcggaagcagcagagtgaagttccttcctgccctgaccccaggtctatggcttaaaaatcagggtgcccaggctggggccgcgcagcccaggggccctctgtaaacatggcaggtgcagccagaaggggcttccgggaccccgggggacctgcggtgggcagggcagagggtcagggtgaccagagccatggagagggcaatgcccggaggacacgtagatatggggtgggggagttaggacccccaacatggagagagacaggggccaagaaagacagagaaaaggagacagagggagatctggagaatgggggagggaaggaaagagaaagagggtgagagaaccccaaacaagagccagagccggagaaatgaggacccctggatgtggctggtcttggtccgtggctcccgccgccgcagcctccggcgcagacgggcccaggggcggctctgcttggggcgggtcctcggtgctcagcgggcggcaggcggcgggccggggcccggggcgcgcactgggtgcgccagggtgacagtgagcgcgtcgttgtgctgcaccagcgaggcgtgctggtagtgcagcaccagctccttcagcgacccgtacaggttgtagggctccgcgaagccgaagccggtggccgtgcggtagatgacgcagtgcttggtgtcgccgtccactaccacggagcaggcgtagcagccccgctggctgctctcgcggatgaggaaggtgccatcccgcttgccgctcagcatctcctctgcctgcgtgcggttgatcttgcccacgtaccaagtgcgttcctcgtggtgcgggagatcgtcctcgtcctccatgagtgcgtactggtcctcagtctcatttttaatccccagccactcgttgattttcttctgccgggcgcctttctgggtgagccacacgaggtactggtctcggatcttgcgcagctgcatgaggtccggcttgaggcttgttcaatgcggcttgtcgaatctctcttgttgtccgaagccctgggcaccagcagctgctgctcccagcttcggtgcggctctcatggatctcgggcaatgcgggacttgagccgctcggagttcagcaggatcctttgcatctctttcgtcggttgccctcacgccggaagcgctccaggtattccttgctgcatttctcttgagtctggccctgctcttcaaagatcttgatagtctcattgaaggcctcaattgcagtacgcttcatctgcagctcctgggaggtccgtgtgtactcttcataaagctggtcatactcgcggctcttgtcctggtactgctggtgatagaccttaagctgggcgcccactgcctccacgctgtcctccttgacaatctggtcctgctggtatttggacacagggtagaggagccgtgtgtccagcttggcattgtactgggccagagactcgtggcggtagtgattgatgaggtccacaacggagcagaaggtgagtggctctgagaagccatagtgcccatctcggtggaagaccttgatcagcttattgttcccgcctttcctgagggtcagcgtgtactcgccctggatcttgctagaagcatctcggactaggaaggtgccatcgggagtgtcccggagtttctcgttcacctcctcccttgaaattgtccccccagtaccactcagcatcctagcagggagggtgggctccctccatttgggccagggactgtggaggccggctttggccttggggggtttaggcggcagcgctgggggcgcaacctcctgctcttccaagtgttcctgaagcagcttctccaccagcagcgccgggaagtcagggctgggctcactcccgtcgggagcgccccctggcggcggcgaggacggcggcggcggcgcgcgcagcagcagcggcccaaaggtggcgcccagggcccggaccgcgggacccagggccggggcgcggctggccacgcggcccaggtgctggagcaggaagcgcagcgtgagcgcgcggtgcagcggcagcgtcggtggctccagcgccggccccacgggccccgcggcctcccgcagggcccggcgcgcctcggccgaggcctcgggggtcacgagcggcgcgggcagtgccagcaggaagctcttaatgccgtcagccagggctgccgtgtcccactgatccacgtcgctcagggaccagtctgtacgcggtgcgggcagctccgggcggtagtgagattcgctgtccagccctgtcctttcaatggcctccacaagcttcaccagaagagggggagccacatcaggtggggagaactgctcgggcaagtcggggagtgtgaggcctggctcaggggccccatcacggggcctggcgggcagtgggcgggggccccgtgggcgagggccgggccgggccagggccacgggccccaggaactccacataggtgccagggaagtcacctcgctgccgtgtgcgctcgttgaggccgggcatccagcccacgctctgtgggcagcgctcgccaccctcggccacgcccagcgcctgcaaggccgcccggctcactaccagcacgtcgccgggcagcagctccaggtcctccggccgctcccggcggaacgggtacagagcgcggtactggaagccctcagggcccgccatggccgcgtgagtggggtggggtctggatggttaggtggctgcttggagccccactggccccattggttgaagcagggctgggagggtccgctgggttggcttggggtgctgggacctctatctccagcagtcacaggcgaccacaggggccgctcatgcctcgcttcaaattattccatgacccttacaagggccactcgtcactgggtccaccattcgtcagctggtgggagggagttggtggtgtggtgtcaggtcactgggccattgagtcctccatcagcaggtgaggctggggcaggccgctcacgccctcacacggagggccatgggcgcccaaggctggcggctctgctggctgcaccagacaagggagccaagggtgcaggctgccaccatgctcggccagctgaggacgccgacctggtcgcggccgccaccgccgccgcagccgccgtcacaccaagccaagcccgccccgtggctccaccgcggccaccgtcgccgcagccgcg

SEQ ID NO: 89470 - DNA, 514 bp, Homo sapiens
  misc_feature (1)...(514): n = a,t,c or g
aggtccgagtgccgnntnnnnnnnnaaattgataatagtaggncgtgncgnnggaaccctattactcaagataaagagagatattttataacgataagagggtcagtccgttaggaaaacatgaccgtcctgtctatgcacctaattacacagcttcaaaatacatgccaaagtgacagaattgaaaggaagaatggataaatttcacaattgtagtgggagattcctttctcagtgatgcataggagacaggaaatcagtaaggacattgaaaacttggataacactatcaaacaactcgatctaattgacatttttgaaataaatacccaacagtggcagaatatacattcttttcttacacatagaacatttattaatataaactatatactgtgtcataaaacaaatctcattacatttaaaaagattactgcttctctgacagtaactgaattaatttaggattcaatagcagaataaatatctgaaaaattcccaaatatgtggaaat

SEQ ID NO: 89471 - DNA, 1217 bp, Homo sapiens
ccctcagatattgaagcgaacctataaataacagcagaagctgaagaaaagataacggatcaaaaagcagaaggagaaagcttccctgtccccaaggacctgcccacagtcgtggatgagaagtcccttgataagtagggtctgaacccacgtgatcaaatgttagctctgtgaacctgtgccagtggctgtgtgtcagtagcccagggtgattcagaagctccatgaagcagccatctttcctggatctctggaatgtacacatttgctgagatcacaaagatgaagctggcagaacccgagtggatattcattattacgaacagaagaacagccaacaggagccgtgccatgtgcaaccccgagttgacagatgcctccccgcttcttctgtgtttgccagttgttacaaaatgatctagagaaaaactggaacttgatggagaaagcaatggcttacgattcagcaggctttcttggagagtttacctaaagtctatgtggacggtggctcagctcacctctgagaacaatacgatcttcacttttcaatctttctgcagctcttattagtgccgcagggaaccatggatgaaaatggcttctcgtgttgatatccatttggggaataggatggatgcagctgcttttgctcaagggcagagttttgacttcaaagaccctgaagagaacccagaaggaaaactctcagaggttaatggactatattctttacctgggggatcgttgacaccacagcagtaaaagcgaagtcagtgtcgtgctgtcttgaaattagatgacaagaatgactgacaccaatagagctggaactgcacttggagcctgagtagccggtctcaggctaaccacacctgtgctgaccacagcgtggcccgtgttgttcatgaggcattctggctgtacctccacagggatgcaagacttccagtgagaggctgcttctgcaagaaaatacctgcctagaaatggtccgctttctcttcctaataaagtgataagctttcttagtccaatggtactaaatagaaacctttttcttccatcagccagagaggtactttatttcctttgtttgggagtgtcagttaaatattgttgaaacatttcactagaacttcctgtcagttacctagtgaattcatgtgacttcatcagtcttgaatacagagaccgtttaataacaatacaattgg

SEQ ID NO: 89472 - DNA, 2459 bp, Homo sapiens
ctactatcatggtacttagagattgtaggggctggataataaacaagggatgtaaacagctggaaagaactttgcttcaatcattacaacaaggaaactacaaactgctaccgtacaacaaggaaatggacaaactacaaaataatttttctaggacccttcagagaactgaggtcacagggcaaccaagtaatcttaaatctggggaaagaaagatgccagctgagagaaacaggactcaagctttacttacctgggatggactctgccagacaccatataagccactctacttctgcaggccccatcccttcccagaaagaagaggaaatgactgagtcccagggaacagtaacattcaaagatgtggctatcgacttcactcaggaggagtggaagagattggatcctgctcagagaaaactgtaccggaatgtgatgctataaaactataacaacttaatcacagtaggctatccgttcaccaaacctgatgtgattttcaaattggagcaagaagaaaaaccatgggtgatggaggaagaagtattaaggagacactggcaaggagaaatatggggagttgatgagcatcagaaaaaccaggacagacttttgagacaagttgaagttaaattccagaaaacactgactgaagaaaaaggcaatgaatgtcaaaagaaatttgcaaatgtatttcctctgaactctgattttttcccttccagacacaatctctatgagtatgacttatttggaaagtgtttagaacataattttgactgtcataataatgtgaaatgccttatgagaaaggagcattgtgaatataatgaacctgtgaaatcatatggtaatagctcatcccattttgtcattaccccctttaagtgtaatcattgtggaaaaggcttcaatcagactttggacctcatcagacatctgagaattcatactggagagaagccctatgaatgtagtaactgtagaaaagccttcagtcacaaggaaaaacttattaaacattataaaattcacagtagggagcagtcttacaaatgtaatgaatgtggtaaagctttcattaaaatgtcaaatctcattagacatcaaagaattcatactggagagaagccctatgcatgtaaggaatgtgagaagtccttcagccagaaatcaaatcttattgatcatgaaaaaattcatactggagagaaaccttatgaatgtaatgagtgtggaaaagcattcagccagaagcaaagcctcattgcacatcagaaagttcatactggggagaaaccttatgcatgtaatgaatgtggtaaagccttccctcgaattgcatcccttgctcttcatatgagaagtcatacaggagaaaaaccttataaatgtgataaatgtggtaaagccttctctcagttttccatgcttattatacatgttagaattcatacaggtgaaaaaccctatgaatgtaatgagtgtggaaaagccttctctcaaagctcagcccttactgtacatatgagaagtcacactggtgagaaaccctatgaatgtaaggaatgcagaaaagccttcagccacaagaaaaacttcattacacaccagaaaattcatactagagagaaaccttatgagtgtaatgaatgtgggaaagcttttatacagatgtcaaatcttgttagacaccagagaattcatactggggaaaaaccctatatatgtaaggaatgtgggaaagcctttagccagaaatcaaatctcattgctcatgaaaaaattcattctggagagaaaccctatgaatgcaatgaatgtggtaaagccttcagccaaaagcaaaacttcattacacatcaaaaagttcatactggagagaaaccttatgattgtaatgaatgtggcaaagccttctctcaaattgcatcccttacccttcatttgagaagtcatacaggggaaaagccttatgaatgtgataaatgtggtaaagccttctctcagtgctcactgcttaatttacatatgagaagtcacacaggtgagaagccctatgtatgtaatgaatgtgggaaagccttctctcaaagaactttccttattgtgcacatgagaggccatacaggtgaaaaaccctatgaatgtaatgagtgtggaaaagccttctctcaaagctcatcccttactatacatatacgaggacatacaggtgagaaaccctatgaatgtaaggaatgcagaaaagccttcagccacaagaaaaacttcattacacaccagaaaattcatactagagagaaccctttaagtgtaatcattgtggaaaaggcttcaatcagactttggacctcatcagacatctgagaattcatactggagagaagccctatgaatgtagtaactgtagaaaagccttcagtcacaaggaaaaacttattaaacattataaa

SEQ ID NO: 89473 - DNA, 2454 bp, Homo sapiens
  misc_feature (1)...(2454): n = a,t,c or g
gttttgatacttatagaggactcccttcaatttccaatggaaattatagccagctgcagttccaagctagagagtattctggagcaccttattcccaaaggatctcagcaatcaccacagtatctgttgcttggaaggtactcagtgggaagataggagaaggtgcagagggcaactgtaaatgtgtcataagtgaaggggcctgggctgtttgccctacccagccctgtggcaaggctaaaccagacaaacacttgaaggatctactgtctaaattgctgaactcaggctattttgaaagtatcccagttcccaaaaatgccaaggaaaaggaagtaccactggaggaagaaatgctaatacaatcagagaaaaaaacacaattatcgaagactgaatctgtcaaagagtcagagtctctaatggaatttgcccagccagagatacaaccacaagagtttcttaacagacgctatatgacagaagtagattattcaaacaaacaaggcgaagagcaaccttgggaagcagattatgctagaaaaccaaatctcccaaaacgttgggatatgcttactgaaccagatggtcaagagaagaaacaggagtcctttaagtcctgggaggcttctggtaagcaccaggaggtatccaagcctgcagtttccttagaacagaggaaacaagacacctcaaaactcaggtctactctgccggaagagcagaagaagcaggagatctccaaatccaagccatctcctagccagtggaagcaagatacacctaaatccaaagcagggtatgttcaagaggaacataagaaacaggagacaccaaagctgtggccagttcagctgcagaaagaacaagatccaaagaagcaaactccaaagtcttggacaccttccatgcagagcgaacagaacaccaccaagtcatggaccactcccatgtgtgaagaacaggattcaaaacagccagagactccaaaatcctgggaaaacaatgttgagagtcaaaaacactctttaacatcacagtcacagatttctccaaagtcctggggagtagctacagcaagcctcataccaaatgaccagctgctgcccaggaagttgaacacagaacccaaagatgtgcctaagcctgtgcatcagcctgaggtttccttccgttanaannccccttccgaaggatccagtattgaggaaagaaaaactgcaggatctgatgactcagattcaaggaacttgtaactttatgcaagagtctgttcttgactttgacaaaccttcaagtgcaattccaacgtcacaaccgccttcagctactccagggtagccccgtaggcatctaaaggaacaaaatctgtccagtcaaagtgattttctttcaaggagccgttacaggtatttaacgttaatgcacctctgcctccacgaaaagaacaagaaataaaagaatccccttattcacctggctacaatcaaagttttaccacagcaagtacacaaacaccaccccagtgccaactgccatctatacatgtagaacaaactgtccattctcaagagactgcaaattatcatcctgatggaactattcaagtaagcaatggtagccttgccttttacccagcacagacgaatgtatttcccagacctactcagccatttgtcaatagccggggatctgttagaggatgtactcgtggtgggagattaataaccaattcctatcggtcccctggtggttataaaggttttgatacttatagaggactcccttcaatttccaatggaaattatagccagctgcagttccaagctagagagtattctggagcaccttattcccaaagggataatttccagcagtgttataagcgaggagggacatctggtggtccacgagcaaattcgagagcagggtggagtgattcttctcaggtgagcagcccagaaagagacaacgaaacctttaacagtggtgactctggacaaggagactcccgtagcatgacccctgtggatgtgccagtgacaaatccagcagccaccatactgccagtacacgtctaccctctgcctcagcagatgcgagttgccttctcagcagccagaacctctaatctggcccctggaactttagaccaacctattgtgtttgatcttcttctgaacaacttaggagaaacttttgatcttcagcttggtagatttaattgcccagtgaatggcacttacgttttcatttttcacatgctaaagctggcagtgaatgtgccactgtatgtcaacctcatgaagaatgaagaggtcttggtatcagcctatgccaatgatggtgctccagaccatgaaactgctagcaatcatgcaattcttcagctcttccagggagaccagatatggttacgtctgcacaggggagcaatttatggaagtagctgga

SEQ ID NO: 89474 - DNA, 3934 bp, Homo sapiens
ttttttttttttaagagacagggtcttgctatgttgcccaggttggtctccaactctgggcctaaagtgatcctcctgtcttggcctcccaaagtgctggaattaacaggtatgagccaccacttcggcctcctcctctatctctatgtgctccttttttgggaatttgcattagctttttagatgggcttaataaatactttttgtcttcttaaaatgtttttcttaaaactatgatagttacttaaaaaaagaagtttagctcactgaaagcacagtttccttaagtatgtagtttatgaaatttggaaaataagcagactgaatttattagagcttttgcagtatcttttaatgctctcaatatatccaatgttttcctggagagctcttttgtcttggtgtgcagtaatgttgcattcagtaaataggtaagaagataaaacgtaccctccttggattttcctaaattgtttctctgtgcataatacataccctaattatacacatgtatatggtttgatataaaagaggtcattgtttatttcatgtaagtaattatcttttcttaccctaacttactttgaggtatattgtcataaatgtaaatatatcaatttaaaatgtttagtgtgaggaattttaactaatatatacatatagctatgttactattacccaaatcaatataagaaactttccatcaccccgagaaagttctctcaagttctctcatatccctttcctcaggcaattactattctgatttttatcacaatagagtagtttttgcctgttcttgcatattgaatacagtatgtatacgtaaagaaagaactatcatgaaggggtgcagacatgaatattttcagctgaaatcaagggctaataaactgtaagctggctagtgagtggaaaaaacagaaatgtaactattaaaatataatcactttgttaaattaagtcaaacttgattaagtggaaaaaaattggcatattttagaaagcccacatatactgaatgatgaaattaatagtgttcacaaaatgttgaaccaatttggaaaagagattatagaatgaagaaaaaaccatcatagtctagagaagtgaggctgggcactgtggctcaagtctgcaattccagcactttgttttgttttgagacaaggtctcgctctgtcacccaggctagagtgagttgagactctatttccaaaaaaaataagaaaaagaggagtgaatgccccctcttctccaatccaaataattggatgataagtaattaaaaactgctatgaatagtaagcctttagtatcttggccagtttattacagaggacgataaatgattccatgtggatagggcataacatacagagaatgtatactatgccagaaatgggaggaggcatttgaaacaacatgagtatctcagggacagatggattgattctgctattggtaggcctggaaggcaaggtcagaagtagcaaaaaatggataccaaaagcactatttgtcacccaagcctaagtggaatagctggcccagtaggagaaatgcaggttttgctctacactaaggtctccaactccttgataagccctccaaaaaacaaatgtttagggggaaaaaaacgcagctggttattgaaaagatatatctcattttcatttaaaaaatcaatggtcaatgctgtttaatagaatcctttttatcttcaggacagaggccaatgccctaaacaaacaccgagctcaagagcctctggatgccaaccctagagggtacccaaacacaaacttaaccatagaggtaaaaaaacccctaatgtccttttggtgggaagcaaaacccatttggttgggtaacttcaacaggaacatctttcctacccaagtccttcatccatatggtatgtgcccacgagtctcccagtttgtttgcaccactgtgtcataagctgagaatacgctgaaaggttagttttgatcctggaaacctatttacaattgccagctgatgtccctgcttgccacttaaaaaacaggcgttgggtctttggcatcaggcagacaggccttgtggtcccgcatcaggtctcttgtgataaacctgcagtgattcccggagtgcagtgtggcatacagaaggaatggatcatcctccgagatgtcatcagcaaaaaaacagctggcttgcttttgcacctcttccatctcatcccgactccactgggaactccgtcttagcatgtgcttccggcctaggaccagcagtcgcagattccgtttggctagttgagagacgacagttcaagagaagttgagattcacgaactttaggaaagcagtttggcaacattgagaccatcaatgacaacatcaaggggaggacgagattttatgaagttctcaaatctcttaagttcctgaggtgttgtctttctgtactggtcacctccatctatcacatccctcatgatttttcccttaagacattcatattcttctggactcagctgaatagactctatggtttttccacagcccgaacactggccactctcaaaccatgtttttatactgtgtgcaaatgactcccctggatacagctgattatttcttagatatgaaagaatatctagtagtttatttgaatagttatcatcctttatgtcttttccaaaatcaaagaaagcttttaaagtttccaacataggaacaatatcatgacctagcaattcctgatataaattccaagctgtgtttacatcttgatgaaggagagctccctggatacagtcattatagttcttttttgaaggagttataacttttttgatgtcctctaacagcaacaatgcttctctccatctgtctgaatggatcaatccccggatgagaagactgtaacctctaggttctaaagtcttatatctggctttcataatttcaaagacatcaataacttcagatgtctgcatatgaaagacacagagatacaaatacttgaccagtaaatcgtaacttacaataccattatttttggctgctacccatgccagcagagatttagccacatctatagagctatgacagccagccatctgtgaaatgatccaactttcgaaactggtctttccggtgttttcttttaaatcttccttaagtttatcccactcctctgaattcaaaggttgtgttgggagttgaatagtgttcctcacaggtgccaaggcatgatcttcagtttgagaattcatctgtgatctctccttagctgctccagctaaaaaaaaatgaggaacagaataaacttgcttattactgccctcatctttcctgagatatctggccttggcaatcagattcgttgctttggtattctgtggagacattgttttaagagaaaacaacctctgctggttcctgatgccacagcggtctgccagaaacagcgagacataagagtgccctgggcctagcccaaggtatgggctcttccaaagcttcggaaagcttcgaataccaaacaaatagaaagtcattatgcagtgagatcagcaccagatagtgagagagatgttgaaaaaacccctcttctatggcaaaattaaagagattgggggtcggcggtgcagagtcgaagtggaactttttaaaaggtttgtgtttcttccttacagacaaatcaaggttctgcttttggggctacttaaaagcaagaaggcaggtgagttttctctattaaacaacaatccggggatgtccaacgtcgcaagccgcaaaccaggggacagagcaggaatcctctggtgcctcttacattccagttcatgaaccgaacgctgacaaatgaagttcacttcattcaacaactcaaagcggcactcagacttaacgcgtccataaacgcgcggacgcgtggg

SEQ ID NO: 89475 - DNA, 701 bp, Homo sapiens
  misc_feature (1)...(701): n = a,t,c or g
gttttcggtattctggagaaagccaaggaaaagtacggcgtggacgactactccaccacggaggggggccacacattctctacggacactgtccccaaacaactgtggcatctgacagagccaactcctgccctgctcccagttcaccttagacctgggaaacgaggttttgacttcactgctctgcatggcctggtgcagggctcccgtgagcagacggcccatgggccacgagccaggcaaggggaggagctcagggccgtggccagagcccacgagaagcccgtgcccagctcagcaggtgaccctccgctctgggaaggtaaggggaggagctcagggccgtggccagagcccacgagaagcccatgcccagctcagcaggtaaccctccgctctgggaaggtaaggggaggagctcagggccgtggccagagcccacgagaagcccatgcccagcactgcagggctctggccactgcctaatgccctccatgaagccctgcctgcccttccagcaaaccagggcccctgaggctccagaaaccccagctcccctgccctcagcctccatggccttagcagcctggctctggggctgagctcctggaaaagcagggtgggggtaggctcctgagttttattttctcacatttcttcctcgtgccnggcttgcgtagtggtttcngagtgttatcaga

SEQ ID NO: 89476 - DNA, 1603 bp, Homo sapiens
tgaccacctggacgaggcgggagaaacgtcaccgggcgagagccgggcccgctgtgtgctcccccggaaggacagccagcttgtaggggggagtgccacctgaaaaaaaaatttccaggtccccaaagggtgaccgtcttccggaggacagcggatcgactaccatgtgggtgcccacaaaaattccacctctgagtcctcaactgctgaccccggggtcaggtggcctccaggtgcaaagtgggaagtgtgagtcctcagtcttgggctattcggccacgtgcctgccggacatgggacgctggagggtcagcagcgtggagtcctggccttttgcgtccacgggtgggaaattggccattgccacggcgggaactgggactcaggctgccccccggccgtttctcatccgtccaccggactcgtgggcgctcgcactggcgctgatgtagtttcctgacctctgacccgtattgtctccagattaaaggtacgacatttggaggccccagcgagaaacgtcaccgggagaaacgtcaccgggcgagagccgggcccgctgtgtgctcccccggaaggacagccagcttgtaggggggagtgccacctgaaaaaaaaaatttccaggtccccaaagggtgaccgtcttccggaggacagcggatcgactaccatgtgggtgcccacaaaaattccacctctgagtcctcaactgctgaccccggggtcagttccagagagaaggactccctcctgcttggaagagacctcacaccgtcatcacgatgccaacggctctgaaggtggatggcattcctgcgtggattcatcactcccgcatcaaaaaggccaacggagcccaactagaaacatgggtccccagggctgggtcaggccccttaaaactgcacctaagttgggtgaagccattagattaattctttttcttaattttgtaaaacaatgcatagcttctgtcaaacttatgtatcttaagactcaatataacccccttgttataactgaggaatcaatgatttgattccccaaaaacacaagtggggaatgtagtgtccaacctggtttttactaaccctgtttttagactctccctttcctttaatcactcagccttgtttccacctgaattgactctcccttagctaagagcgccagatggactccatcttggctctttcactggcagccgcttcctcaaggacttaacttgtgcaagctgactcccagcacatccaagaatgcaattaactgataagatactgtggcaagctatatccgcagttcccaggaattcgtccaattgattacacccaaaagccccgcgtctatcaccttgtaataatcttaaagcccctgcacctggaactattaacgttcctgtaaccatttatccttttaacattttttgttagcctactttatttctgtaaaattgttttaactagaccccccctctcctttttaaaccaaagtataaaagcaaatctagccccttccttgggcgcgagagaattttgagcattagccgtctcttggccaccagctaaataaacggattcttcatgtgtctcaaaaaaaaaaa

SEQ ID NO: 89477 - DNA, 1939 bp, Homo sapiens
ccaagaacagccacatccctggacattatgactttgtttttgtacggcatcccccatcacctccacttcgacgccaggaccgttgaggagccaggatggtatggcagaggccagcacacctggctgttgctgctcaaggctggggacagagcctagtgtacccctgccaggagcagggagtggaccggcaggctgtgaacatgaacaacgcttaacagagcaagtgatgggagccttgttcctgggttctaccatgggagacgctgatcagcaggatgcctggctccctttcccaacccactgctcccaaggcctccagggccctgtgtacataaactggtgggttggaagttgctgggtaactctgatttcagacatgcgtgtggggtaccttttctgtgcatgctcagcctgggctctgtgcgtgtgtgtgtttctgtgattttagaagggtaccaggcacaggttctgtcctaagggcacttaccatttagtagggagatggaaccaacccaattaactctagcaatagcctcctaactggcctcctccattgattcagtgaaccttccaatgcatggctcataatttcaaaatacaggctggttagttactccctacctgaaagccttcataggtgcctctttgctcttctgccagtatcaaaacttttgaaggccttaaaggccctgctttgcctggcccatctgtctctccagcctcaccttgaactgtgttcctgtcactgcacgccagtcacaccggcctctaggtcctcctgtaggccactcttctttctggcacagggacctgcacacctggagtgcccttcctcccccactcgcctgttcacccctgcttttcctttacacctcctcctcagggaagtgcccaccctccgtacatctttcacagccctgattgcagctgtgttcactcaccaggtacctgcagaaggcctacagggtgccaggcacttctttaatgtgttctttctttatgtgattatttgattaatctctgcctcccccactagactgtaagctccctgaaggcaagaatcctgtgcttatgctcaatattagctctcccttggcacagagtaggcactcaacaaatgctccccaaaaggctgagtggctgactgaattaagtaccagtgacatgcagtaactgctaagatagatgagccatctgtatgctctgacagttacagactgaataagttggagacttccctaaagggtggcatttccccagggtgacaacgcagagctcaggtgtgggaaggtgccaggggcaggggtgcagaggggctgaggctgaggggggtgcagaggctggagaaaggataacaggagagagtatacaggcatgccttgatttattgcacttcacaggtagcagaatttttaaagaaattgaaggttttgggacatatatgtgacagcaataggttaagaaaagcaaagcagagaaattgaagatttgtgtcaacactgctttaagcaaatctgttggcaccatttttccaatagcatgtgcccattttgggtctctacattgcattttggtaattgcttgcaatatttcaagcattttcattgttattatatgtgttatagtgatctgtgatcagtgatctttgatatattattgtaattgtttcggggcgccatgaaccgcacccatataacacggtaaacttaatcagcaaaaaaaaaaaaaggggggggccgttttagagaaccaatttttacgcccgggggctggcaaggaaatattttttttttggggccccaaaaataaaatcccggggccgggttttaaaaccggggggagggaaaaacccgggggttccccaatttaaatggcttggaaaaaaacccctttttcgccggggggcaaaaaaccaaaaaacccatatttttatatgtta

SEQ ID NO: 89478 - DNA, 403 bp, Homo sapiens
cccacgcgtccgcccacgcgtctggatgagatgttatgatgaaatgctgaggtgagatgaaacgatgagatgaaatgaaaggatgagatgaaatgatgagatgaggtgagatgagatgaaatgagatgaaacgagatgaaatgatgaaatgagatgagatgagaagaaatgatttgatgaaatgagatgagataaagtgatgagatgaaatgaaaaaatgaaatgaaataatgaaatgaggtgaaattaaatgagatgatgaaattaaatgatgaaatgaaataatgaaatggaaatgatgagatgaaatgagatgaatgatgagatgtcatgatgagatgcaatgatgagatgaaatgatgagatgagatgagatgtaatgatgagaggaaatgatgagatg

SEQ ID NO: 89479 - DNA, 869 bp, Homo sapiens
ggatttggagaaattagacaatattttttggagtatgtgctttgtcttaaatttttgaaatgctctccacaagccatagaaaactcttctttcttaggggaaaatactcttcttttgcctttattggcttaatagatgcctttataggcattcaggtgccttttggttctagacaatatgatcgttttagatgtttctgtgtatactacttattctcattggtcagttacttctttaaactttgtgctttgaggttcacagattattgagcacgcctagtttgaactgtagcaggtttagagtaaggtgcatgaccctgactcgcatttgatttcattaagttccttttttggtcttaagagcataagactaaaataagattatttggggtaagattttaattacactcatactatattccattgccattattacttgaatgtaggtatgggtagatagtatagctccatagatcattaccttttggttttgatcaaatcaaaaaggtgttcctgatcatttagttattagactttacattaaaataattgcagggacccataccctccaaggcctttccctacaagaatggcagattgggtaacaaaacccggggccttgattcccccgggttttgggcggggaaacccttaaccgggggcttccaagcccgcgttcccccatgacaagctccataataagacactcagggagggacccctggaccccccccgcgcgctttcccccccacacctgcgccccacacggggtccaagagaaccccgttatcccgcgcaacgctctccggccgaagcctcgacgaagacgcttccaagttctctgccgcgcggcgccagacgctcccggcc

SEQ ID NO: 89480 - DNA, 681 bp, Homo sapiens
agcgcggttcgagtaaaccgcccgagccggggatggcgattggtttgtccccatgcttgccacccaagctgagatctttggggtaatttgtcagcccttctttgcttcctccttatgcctggattttaaagaattgtggaagagtcagcttttaagtggtagtgacctatttgtgtcatgcaggctgctgtctacctgtcctagatgccaagagagggagatcactaatttatgcacctactgtgtgccaggcgtgtgacacacatattgtggccacatcgttgtaagaggtagtgttgagctcgctttgtagctgaggcctctctgaccactggaggcgttggatgagtcatctggggccccacacctggcatggagcagagctgggctttgaactcaggtttcttgttcagagggtgctttttccagcaggccttagaggaggcccctgaagaagaagcattttctgggtttcttctctctcatttagtctcagcttgtggtgcctctgcatccccagcagagtcctagccccatcacagtccaggacaccggcctttcgtctgcccagtgctggctgcacttcacgggcacctgctgggatccgctgggtaccagtgttcccattaaaattgggcctcccagcattcttcattgcctccacatgtcgccttggggacg

SEQ ID NO: 89481 - DNA, 867 bp, Homo sapiens
  misc_feature (1)...(867): n = a,t,c or g
tggaacctagtttctcagttttccatttatatttatttacctgagctttttgtaaagtagtaagtacttgactgaatttctgctatttatcaaatgctttttgaatagaaataatgagttaataacatttagccttttttggtaaatagtataaacaagatagggcaaatatgtaaactacttagaactttatctaccttgcatattttgtacctcttatttgcatatgcatgtcacatgctccttatgtaccatgtgctattactgtgccggggtactggggctatattgagtctatttcctgtctttgtagacttgatggataatttggacagcattgtgatattccaggtttaagagtcttaaggttcaagactacattaaatgttaaggtagtccaacatttcttgaactctgaaatcctctgagcatcttttcatgcactggcctaaaatgttttcatagcccagcaaaaggctgattacttatttccctcctatggattttttttgagagggggtcttgctgggttgccctgtctgcttgagaactcctgactccggagatcctcctgccttgggctcctggttatgttttaaaaagcattccccctcaaacctannnnnnnnannnnannnnannaaaaaaaanaaggggggccgccttaaaaagaaacaaggttttatggccgcggggggggaaggtaaaaatttttttatgggggcccaaaataaaatttttgggcgggggtttaaaaggggggggggggggagagnggnngngnnncncncnncnnccccngcggggccgcggcgtcgncgtccggcgcgcgggcgcggcgccggggctcgccgcgcgtcgcgtgcc

SEQ ID NO: 89482 - DNA, 889 bp, Homo sapiens
aaatttaaaaataaagtctcagcctgggcaacatataccccatctctgaaaaatcaaaaataaaatctcactgtagaagaaagtgggatgaaaagcagcatgccagtttatttagaaagtttccaagataattgggattatgattttccagccttttttatacctgtgtttaggattatgatcatcttactctggaattctgtggaaattatgtaatagatacaagagtttaacataatttcatcatttattgcaatagtgaaaaagaataaagtcaaagaacctggaaatggcatatctccctgttggtgaatataatttagtaaattgatatatcagtgtgatgaaatatgatgcagccattaaatactaagaagactgcgtagcaaaaatgggaaaatctattctaataaagtttaaaaaggaaatgtggacactgagtatagccatgtaaacgtacctgatgaaaggcaaaaaagacaataacagacaaaaacaactctgttgtagtagtaaggtttttgttataacctggtaaattgtatttttctttttaaaatggtaagataagggatatgcagaagtacctggtattacaagagaaaagtggctctaggaatgtaaagacatcaaatgagaagtaggatatctagacaaagaaacttcctcatgattaggtgaaagataaaaaaaaccaggaagccagctttgtagaaggaataatttattaccccatatgttgttccttggatattctggaaaacaattttgggattgaattgccccatggaaagatttttgcattagcttaaaaaccttggggggaaggttttttttctggggcacattcaggggcttaccccccaataaactcctcgtttcttgggag

SEQ ID NO: 89483 - DNA, 876 bp, Homo sapiens
gcacgcgatacgaccacgcgtacgtccacacttttggataattctacccatgttttttgtttttccttgctactattatatatatttctgccacatgtcacatggtataaatgcctatatggacttttgtaacagaaaatttacttactagaattaatgtagggggctttttaataagagtgcatgtaacatagtaacagtagcagagctatatcagaaacagttctgataatatttcatgatctatagtttgttgcatgctcattgcttcatactgcttgtgttcttggttgagtcataagtaatttttatggggtgtgtcatgactgtcatattcatagagagttgtctgccttgccccatggtctttgcatggcttaaacaggaccccttttcatacacaagtcattcaattttatgtttttaatagcatcaattttagcgcttaacatgtgtgtctggactatgcatcagaatacttgactgttagtgcgaactgaaaattcttggatatcatagtttatgtaacataatttaacatttctttattactaagactttagattgtccctttcccaaaaaataggggcgggtaaaacttaatccttgtgcctttttgtgagtagacctatgatttctatatgatggattcctgtgggaagctggtccaaaacagcaaaagttatttatttattaggggcttcccaaattgctttttcacaacattctaggttaatctgctcgcgcacccttttaacctcgcttaaggagaaaaactacaaacgccccaattcctgtaatctaaacttttattgccgtacatgcccatacagctttcctaaatggcctctacctactggaatttactgggtaccg

SEQ ID NO: 89484 - DNA, 1672 bp, Homo sapiens
tttcgtggggcggcgggagtgcgggtgggcgtttaaaggggccttcggcacccaggtcggttcgccgccgggactgctgacggggagggctaggtagccctgggagtcgggatctagaaggtagaggagaagcggggctgtctgacccccggaggtgacaaggggagaggggctgtgtgaataccctccatgggcagtaatgggatgactatccccagggagcattgcgaaggagagaggcggctgagggactgcactttctggggccccccgggagagtcagagggcagttaagagggatcacaggcccggcttggtactgtcactccccttcccactccctgctctcagcattctgtcacctccctaccccgtcgcggtgcccagccatggccagacctcccgtgcccggttcggtggttgtcccaaactggcacgagagtgccgagggcaaggagtacctggcttgcattctgcgcaagaaccgccggcgggtgtttgggctgcttgagcggccagtgctgctgccgcctgtgtccattgacactgccagctacaagatctttgtgtccgggaagagtggtgtgggcaagacggcgctggtggccaagctggctggcctggaggtgcctgtggtgcaccacgagaccaccggcatccagaccaccgtggtattttggccagccaagctgcaggccagcagccgtgtcgtcatgtttcgttttgagttctgggactgtggagagtctgcactcaaaaagttcgatcatatgctgctggcttgcatggagaacacagatgccttcctcttcctcttctccttcactgaccgtgcctcctttgaagacctccctggacagctggcccgcatagcaggtgaggcccctggtgtcgtcaggatggtcatcggctccaaatttgaccagtacatgcacacggacgtgcccgagcgggacctcacagccttccggcaggcctgggagctgcccctgctacgggtgaagagtgtgccggggcggcggctgggctgatgggcgcacactggacgggcgggctgggctggccgaccgttgcccacatacttcaatggccttgctgagcagctgtggcaccaggaccaggtggcggctggcctgcttcccaaccccccagagagtgctcctgaatgagtcacgagtggttgcctgtgatcccacccccaaccctcaggtctcgacatagggctggaggctggggcaggaacatggatcctatctggaggactggccagcatggcctgatcagggaggatgtggccagagaaggcccacccgcgagcagcgctttccttgcagaattcatggcagggaggtggggaccaaggccctgagctcgaacatctcccgtggcctttccccctttggcagcaccgatggaggatgactgggagagggggtgcctctcaagttacttcaatcaagaacctgtattggttgaggtgacaccatctgttgtaacagataaaccccgaaatcccagtgctgaactccagagacgtgttcgttctcacgtaggcctcagctcgggaggaggtgacagtgggcgtggggctctgctccaggcgctcctgcagagacccagccccagagaccctaccctgcccagttgccctagggtgtcagcacccagtcag

SEQ ID NO: 89485 - DNA, 476 bp, Homo sapiens
  misc_feature (1)...(476): n = a,t,c or g
cgcatgttccanagggggnnnnaaacgataaccctcatggaaaccgtncggangnacnaccggnnnnnaggggccgggtcgacgatttcgtgtaaataagccatctaagagattgttctcactttagcccaggcccctgtccacatcttatttcatgactcctaattcatttcctcaaacatgctcttttcccccactgggaatcaggcagggaatgagtcctctctgcagtcgtccagccccttatgtctggggctccacctgtgagtcgggggctctgcaagctcatcttccccacccccacttcccttacttgtaagttccccagtccctcctcctcaaccctgccctctgctaactccctaatttcccagggttgcctggccttatcttcccaaggttactctgccccatccttctcctctccctcctcctcccttaagaaggcaggagggagtggagatgagcaagacaga

SEQ ID NO: 89486 - DNA, 3229 bp, Homo sapiens
tttcgtccggcttttgggtgcccggggaggcacgtgactgggattataattcgggcccgggggaggggagggacggccgccccccacctgcccgggaggggccgggagctgggagctgtcaccccctccctccttgccaccggctcttctggaggtggggggcgtcccgggccggcgcccgcatgctgctgcagttggcgaatgaggcgaccatggccttgctgggtaagcgctgtgacgtccccaccaacggctgcggacccgaccgctggaactccgcgttcacccgcaaagacgagatcatcaccagcctcgtgtctgccttagactccatgtgctcagcgctgtccaaactgaacgccgaggtggcctgtgtcgccgtgcacgatgagagcgcctttgtggtgggcacagagaaggggagaatgttcctgaatgcccggaaggagctacagtcagacttcctcaggttctgccgagggcccccgtggaaggatccggaggcagagcaccccaagaaggtgcagcggggcgagggtggaggccgtaacctccctcggtcctccctggaacatggctcagatgtgtaccttctgcggaagatggtagaggaggtgtttgatgttctttatagcgaggccctgggaagggccagtgtggtgccactgccctatgagaggctgctcagggagccagggctgctggccgtgcaggggctgcccgaaggcctggccttccgaaggccagccgagtatgaccccaaggccctcatggccatcctggaacacagccaccgcatccgcttcaagctcaagaggccacttgaggatggcgggcgggactcgaaggccctggtggagctgaacggtgtctccctgattcccaaggggtcacgggactgtggcctgcatggccaggcccccaaggtgccaccccaggacctgcccccaaccgccacctcctcctccatggccagcttcctgtacagcacggcgctccccaaccacgccatccgagagctcaagcaggaagcaccttcctgcccccttgcccccagcgacctgggcctgagtcggcccatgccagagcccaaggccaccggtgcccaagacttctccgactgttgtggacagaagcccactgggcctggtgggcctctcatccagaacgtccatgcctccaagcgcattctcttctccatcgtccatgacaagtcagagaagtgggacgccttcataaaggaaaccgaggacatcaacacgctccgggagtgtgtgcagatcctgtttaacagcagatatgcggaagccctgggcctggaccacatggtccccgtgccctaccggaagattgcctgtgacccggaggctgtggagatcgtgggcatcccggacaagatccccttcaagcgcccctgcacttatggagtccccaagctgaagcggatcctggaggagcgccatagtatccacttcatcattaagaggatgtttgatgagcgaattttcacagggaacaagtttaccaaagacaccacgaagctggagccagccagcccgccagaggacacctctggcagaggtctctatgggccaccggtccttgaccttgctgggaatgctcggtcagacaagggcagcatgtctgaagactgtgggccaggaacctccggggagctgggcgggctgaggccgatcaaaattgagccagaggatctggacatcattcaggtcaccgtcccagatgccttgccaacctctgaggaaatgacagactcaatgcctgggcacctgccatcggaggattctggttatgggatggagatgctgacagacaaaggtctgagtgaggacgcgcggcccgaggagaggcccgtggaggacagccacggtgacgtgatccggcccctgcggaagcaggtggagctgctcttcaacacacgatacgccaaggccattggcatctcggagcccgtcaaggtgccgtactccaagtttctgatgcacccggaggagctgtttgtggtgggactgcctgaaggcatctccctccgcaggcccaactgcttcgggatcgccaagctccggaagattctggaggccagcaacagcatccagtttgtcatcaagaggcccgagctgctcactgagggagtcaaagagcccatcatggatagtcaagagagggattccggggaccctctggtggacgagagcctgaagagacagggctttcaagaaaattatgacgcgaggctctcacggatcgacatcgccaacacactaagggagcaggtccaggaccttttcaataagaaatacggggaagccttgggcatcaagtacccggtccaggtcccctacaagcggatcaagagtaaccccggctccgtgatcatcgaggggctgcccccaggaatcccgttccgaaagccctgtaccttcggctcccagaacctggagaggattcttgctgtggctgacaagatcaagttcacagtcaccaggcctttccaaggactcatcccaaagcctgatgaagatgacgccaacagactcggggagaaggtgatcctgcgggagcaggtgaaggaactcttcaacgagaaatacggtgaggccctgggcctgaaccggccggtgctggtcccttataaactaatccgggacagcccagacgccgtggaggtcacgggtctgcctgatgacatccccttccggaaccccaacacgtacgacatccaccggctggagaagatcctgaaggcccgagagcatgtccgcatggtcatcattaaccagctccaaccctttgcagaaatctgcaatgatgccaaggtgccagccaaagacagcagcattcccccaagcgcaaagagaaaagcgggtctcgggaaaggaaaattcccgttctccctccttccctccctcgtccttccctccttccctcgtccctcctaacccggattcaagtggcatcgggccaacccagatcctcactcgtgcaatggcccaatgtaacatggtggactatgcccggccctgaacgtgcagctccccgggacctcttaattactagacctcagtactgaatcaggacctcactcagaaagactaaaggaaatgtaatttatgtacaaaatgtatattcggatatgtatcgatgccttttggtttatccaaatgatttatacacaatattcatgccaccaaggcctttttaaataagt

SEQ ID NO: 89487 - DNA, 2523 bp, Homo sapiens
cgatttcgtcggctggccggcagcagttactcggtgtttccggtgcgaggccagaggtggggaagccatcggacgtcggcggtgaggatcttctcctgacccagcatcgctcatcacaatgaagaaccaagacaaaaagaacggggctgccaaacaatccaatccaaaaagcagcccaggacaaccggaagcaggacccgagggagcccaggagcggcccagccaggcggctcctgcagtagaagcagaaggtcccggcagcagccaggctcctcggaagccggagggggctcaagccagaacggctcagtctggggcccttcgtgatgtctctgaggagctgagccgccaactggaagacatactgagcacatactgtgtggacaataaccaggggggccccggcgaggatggggcacagggtgagccggctgaacccgaagatgcagagaagtcccggacctatgtggcaaggaatggggagcctgaaccaactccagtagtcaatggagagaaggaaccctccaagggggatccaaacacagaagagatccggcagagtgacgaggtcggagaccgagaccatcgaaggccacaggagaagaaaaaagccaagggtttggggaaggagatcacgttgctgatgcagacattgaatactctgagtaccccagaggagaagctggctgctctgtgcaagaagtatgctgaactgctggaggagcaccggaattcacagaagcagatgaagctcctacagaaaaagcagagccagctggtgcaagagaaggaccacctgcgcggtgagcacagcaaggccgtcctggcccgcagcaagcttgagagcctatgccgtgagctgcagcggcacaaccgctccctcaaggaagaaggtgtgcagcgggcccgggaggaggaggagaagcgcaaggaggtgacctcgcacttccaggtgacactgaatgacattcagctgcagatggaacagcacaatgagcgcaactccaagctgcgccaagagaacatggagctggctgagaggctcaagaagctgattgagcagtatgagctgcgcgaggagcatatcgacaaagtcttcaaacacaaggacctacaacagcagctggtggatgccaagctccagcaggcccaggagatgctaaaggaggcagaagagcggcaccagcgggagaaggattttctcctgaaagaggcagtagagtcccagaggatgtgtgagctgatgaagcagcaagagacccacctgaagcaacagcttgccctatacacagagaagtttgaggagttccagaacacactttccaaaagcagcgaggtattcaccacattcaagcaggagatggaaaagatgactaagaagatcaagaagctggagaaagaaaccaccatgtaccggtcccggtgggagagcagcaacaaggccctgcttgagatggctgaggagaaaacagtccgggataaagaactggagggcctgcaggtaaaaatccaacggctggagaagctgtgccgggcactgcagacagagcgcaatgacctgaacaagagggtacaggacctgagtgctggtggccagggctccctcactgacagtggccctgagaggaggccagaggggcctggggctcaagcacccagctcccccagggtcacagaagcgccttgctacccaggagcaccgagcacagaagcatcaggccagactgggcctcaagagcccacctccgccagggcctagagagcctggtgttgggtcatgctgggaagggagcggcagcccagcaagggcttggcccataaaaggctaccatgctaagcagcccattgctgaagccaggatgttgtggcctggctggcatctggcacttgcaattttggattttgtgggtcagttttacgtacatagggcattttgcaaggccgtgcaaatgcatttatacctgtaagtgtgcagtgggcttgcattggggatgggggtgtgtacagatgaagtcagtggcttgtctgtgagctgaagagtcttgagaggggctgtcatctgtagctgccgtcgcagtgagttggcagaagtaacttaagcatttctctgtctggtgtgaggctcagacccctccctgcccttcagagatcaagacaagtaatacacccaggtcttgactgcatttgtcttgtgagcagggcttgcttggtcagctcaggccctcctagctgctctggaggctcctttgattctctagacctggaaaaggtgtccctaggcagagccctggcagggcgctcagagctggggatttcctgcctggaacaagggacctggagaatgtttttgcgtgggatgatgtgctggtcaggagccccttgggcatcgcttcccctgccctttggtagtgccaggaccaggccaatgatgcttctcagtagccttatcattcacaggtgcctctctagcctgcacaaatgattgacaagagatcacccaaaggattatttctgaaggtgttg

SEQ ID NO: 89488 - DNA, 3556 bp, Homo sapiens; identical to SEQ ID NO: 61565

SEQ ID NO: 89489 - DNA, 518 bp, Homo sapiens
tttcgtgggtcctgggccccgggcggcggtcgccaggtcttagggccgggggtacccgagtctcgtttcctctcagtccatccacccttcatggggccagagccctctctccagaatctgagcagcaatgccgtttgctgaagacaagacctataagtatatctgccgcaatttcagcaatttttgcaatgtggatgttgtagagattctgccttacctgccctgcctcacagcaagagaccaggatcgactgcgggccacctgcacactctcagggaaccgggacaccctctggcatctcttcaatacccttcagcggcggcccggctgggtggagtacttcattgcggcactgaggggctgtgagctagttgatctcgcggacgaagtggcctctgtctaccagagctaccagcctcgtgagcgtcctgcccttgccctcctggacccccagcctgctccctggcctccgctctccttttctctctccctgtacttcctgcctttctctgtcatcc

SEQ ID NO: 89490 - DNA, 6097 bp, Homo sapiens; identical to SEQ ID NO: 61804

SEQ ID NO: 89491 - DNA, 6762 bp, Homo sapiens
tttcgtccgggcttgaggttgaattaagaatagtcaggtggtgagtggaacgtctcttggggtgtcggaattcaaaacggacctggaggatgttgatctccaagaacatgccctggcggcggctgcagggcatttccttcgggatgtattcggctgaagagctcaagaaattaagtgttaaatccattacgaaccctcgatacctggacagcctggggaacccatcggcaaacggcctgtacgatttagctttgggccctgcagattccaaagaggtgtgctccacctgcgtgcaggacttcagcaactgttctgggcacctgggccacattgagctcccactcacagtgtataaccctctcctcttcgataagctgtacctgctgcttcggggctcttgtttaaactgccacatgctgacttgtccccgggccgtgattcacctcttactctgccagctgagggttctggaagtcggggccctacaagcagtctacgagcttgagagaattctgaacaggtttctggaagaaaatcccgatccctctgcctctgaaattcgggaggaattagaacaatacacaactgaaattgtgcagaacaacctcctggggtcccagggcgcacatgtaaagaacgtgtgtgagagcaagagcaagctcattgctctcttctggaaggcacatatgaatgctaagcgctgtccccactgcaagaccgggcgatccgttgtccgaaaggaacacaacagcaagttgactatcacgtttccagccatggtgcacaggacagctggccagaaggactctgagcccctgggaattgaggaagctcagataggaaaacgaggatacttaacacccaccagtgcccgcgaacacctttctgccctgtggaagaatgaaggattctttctgaactaccttttttcgggaatggatgatgatggtatggaatccagattcaatcccagtgtgttctttctagatttcttggtggtgccgccctcaaggtatcgcccagtcagtcgcctaggagaccagatgtttactaatggccagacggtgaacttgcaggctgtcatgaaggatgtagttctgattcgaaaacttctggcattgatggcccaagaacagaagttgccagaggaagtggccacacccactacagatgaggaaaaagactctttgattgctattgaccgatcctttttgagtacacttccaggccagtccctcatagacaaactttacaacatttggattcgccttcagagccacgtcaatattgtgtttgatagcgagatggacaaactaatgatggacaagtacccaggcattaggcagatcctggagaagaaagaaggcctgttccgaaaacacatgatgggaaagcgagtggactacgctgcgcgctcagtcatctgcccagacatgtacatcaacaccaacgaaattggaattcccatggtgtttgccacaaaactgacctacccacagccagttaccccatggaatgttcaggaacttaggcaagcggtcatcaacggccctaatgtgcacccaggagcctccatggtcatcaatgaggacggcagccgcacagccctgagcgctgtggacatgacccagcgagaggccgtggccaagcagcttctgaccccagccacgggggcacctaagccccaggggacaaaaattgtgtgccggcatgtgaagaatggggacattctgctactgaaccgacagcccacactgcacagaccctccatccaggcccaccgtgcccgcatcctgcctgaagagaaagtgctgcggctccactatgccaactgcaaggcctataatgccgactttgatggagacgagatgaatgcccatttcccccagagtgagctgggccgggccgaggcctacgtcctggcctgcactgatcagcagtaccttgttcccaaggatggccaaccattggcgggactgatccaggatcacatggtttcaggggcaagcatgactactcggggttgctttttcacccgggagcactatatggagctggtgtaccgaggactcacggacaaagtggggcgcgtgaagctcctttctccttccatcctgaagccctttccgctgtggacaggaaaacaggttgtgtcaacgctgctcataaatataatcccagaggaccacatcccactgaacttatctggaaaggcgaaaatcactgggaaagcctgggtgaaggaaactcctcgatccgttcctggctttaaccctgactcgatgtgcgagtcccaggtgatcatcagggaaggggagctgctctgcggagtgctggacaaggcgcactatgggagctccgcctacggcctggtccactgctgctatgagatctatggaggcgagaccagcggcaaggttctaacctgcctggcccgcctcttcaccgcctacctgcagctctacagaggcttcaccttgggcgtggaagacattttggtgaagccaaaggcagatgtcaagaggcaacgtatcattgaagaatccacccactgcgggccccaggctgtcagggctgcattaaacctgccagaagccgcatcatatgatgaggtccgaggaaaatggcaggatgcccatctgggcaaggaccagagggattttaacatgattgatctgaagttcaaggaggaagtgaaccattacagcaatgagattaacaaggcatgcatgccttttggcctacacagacagttcccagagaacacgctgcagctgatggtgcagtcgggagccaaaggttcaactgtgaacacgatgcagatctcgtgcctgctgggccagattgaactggaaggtcggagcaccccgctgatggcgtctggcaagtcactgccctgctttgagccttatgagttcacccccagggctggtggctttgtcactggcaggttcctcaccggcatcaaacctcctgagttcttcttccactgcatggcaggacgagagggcctggtggacactgctgtgaaaaccagccgctcaggctatctccaaaggtgcatcatcaagcacctagaggggctggtcgtgcagtatgatctcacggtccgtgacagtgacggcagtgtggtgcagttcctgtatggggaggatggcctggacatccccaagacacagttcctgcagcccaagcagttccccttcctggccagcaactacgaggtgataatgaaatcacagcatctccatgaagttttatccagagcagatcccaaaaaagctctccaccacttcagagctatcaaaaaatggcaaagcaagcaccccaacaccctgctgagaagaggcgccttcttgagttattcccagaaaattcaggaagctgtgaaagccctgaaacttgagagtgaaaaccgcaatggccgcagccctgggactcaggagatgctgaggatgtggtatgagttggatgaggaaagccgaaggaaataccagaagaaggcggccgcttgtcctgaccccagtctgtctgtctggcgtcctgacatctactttgcatcagtgtcagaaacatttgaaacaaaggttgatgactacagtcaagagtgggcagctcaaacagagaagagttatgagaaatcagagctttctctcgacaggttgaggaccttgctgcagctagaagtggcagcgctcactgtgtgagccgggcgaggctgtgggcctgctggctgcccagagcatcggagagccctccacccagatgaccctcaacaccttccactttgcaggcagaggcgagatgaacgtcaccctgggcattccaaggttgcgggagattctcatggtggccagcgccaacatcaagacacccatgatgagcgtgcccgtgctcaacaccaagaaagccctgaagagagtgaaaagcctgaagaagcaactcaccagggtgtgcttgggggaggtgttgcagaaaattgacgtccaggagtccttctgtatggaagaaaaacagaacaaattccaggtgtaccagctgcggtttcagttcctgccacatgcatattaccagcaggagaagtgcctgagacccgaggacatcctgcgcttcatggaaacaagattctttaaacttctgatggaatccatcaaaaagaagaataataaagcatcagctttcaggaacgtaaacactcgaagagctacacagcgggatctggacaacgctggggagttggggaggagtcggggagagcaggagggtgatgaggaagaggaggggcacattgtggatgctgaagctgaggagggagacgccgatgcctctgatgccaaacgcaaggagaagcaggaggaggaggttgattatgagagtgaggaagaggaggagagggagggcgaggagaacgacgatgaagacatgcaggaggaacgaaatccccacagggaaggtgctcgaaagacccaagagcaagatgaagaggtgggcttaggcactgaggaggacccgtcccttcccgccctcctgacgcagccccggaaacccacccacagccaggagccccaggggcccgaggccatggagcgccgggtccaggctgtgcgtgagatccacccgttcatagatgactaccagtacgacaccgaggagagcctgtggtgccaggtgacagtgaagctccctctgatgaagatcaactttgacatgagctccctggtagtatctttggcccatggtgccgtcatctatgcgaccaagggcatcactcggtgcctcctgaatgaaacaaccaacaataagaacgagaaggagcttgtgctaaacacagaaggaatcaacctcccagagctattcaagtatgcagaggtcctggatctgcgccgcctctactccaacgacatccacgccatagccaacacgtatggcattgaggccgcgctgcgggtgatcgagaaggagatcaaggatgtgtttgccgtgtatggcatcgcggtcgaccctcgccatctctccctggttgctgattatatgtgcttcgagggtgtttacaagccactgaatcgctttgggatccggtcaaactcttccccgctacagcagatgacatttgaaaccagcttccagtttctgaagcaagccaccatgctgggatcccacgatgagctgaggtctccttctgcctgccttgtggtcgggaaggtcgtcaggggcgggacaggcctgttcgagctcaagcagcctctgagatagcagctaccccggcaccatctgcccagctccaaggacccttggtgagggcgtggcccagcctgccttctgcatgagaggaccaggagactggaatccagggcagttccaagtgacagtacagagcacagcagcgaccttgggcctgaaagcagtgggcctctgagctgggccagcttcacctggaaagtgacagagttgctcatccttgcccctccctgtctctggatttttatcaaggtttaccaagtcttctgagtccccctgagatggctggggcttcacctgtgctgcaggaggcctctgtggcataacccctaaggagaagtcctgattcacgattcactgagaagaccaaggggaagccatgctttgctgctggggaccccaggcacctccagagtagggaagcggggttcttttgctgtgagtggccagggacaacagacaagattcctgggggctcccgatgagcaggaacgtggagcctgctgcccaaggcctgctccttccggctgctccagcccctgggggcagagtccacaaagagtccccatcaagacttcttccctgagtcaagtacagcgtagcatagtcctccacccacccaacctctctgcctggccagggtcctggccctgccactgtgtggcgaggtgtccttctagaccacatcagccccaaggctgggagcagtcgctccagggccgcagcagttcactcccacacatagaacccaggtcactgctggggcgattgaacaggttgcctggcttttctctgctgtcagtttggtgtggaggcctatgttctgccccatacaccccacaggccctgcttatgggaaggaacacaggcctccagcccagaggactgtgccgccctgttcttggccgtccacgtttcctctccctctagcaccagcaatacatttccctggcatggacagaaaagacagagaggacttatacaaaggttttgtaaaaccagaggctagcttctatctttgtctactgttatttcagctcagggcgggtaattaacatcattggaactagctattaggaaagaaaaaaaacttggttttttttacaacaattttttcccttggtttgcagtttctgcatttggatttgagaacccagggcggggattttcttggcacagtcaggtcttgggtccctcttcctgtgctttcttgtctgaggccttagggggaagagctcagcctctgcagcctcctccacctctgcccctggcctgcctctgctgtgacctccttccagagctagctgctggccctgtggccaggagaagcagaggggagaagcctttatgcagaagctgtgctagccttggtctggggtggggaggctgctgctgtgaccttaggggtagggttggggatcaagggaggctttgtcaagggagagtgaccatgttgctccctacatccatgcaataggacccagcctgcacctcctaggcctacactggggaaagcctgacaaa

SEQ ID NO: 89492 - DNA, 468 bp, Homo sapiens
  misc_feature (1)...(468): n = a,t,c or g
gctgggtnnnnnaattgagagcangatgaccactcgccggaccggaattnccgggacgacgatttcgtgggtggaggtccccacagctaggctgtggttgtgtggaggtcctcagagctgggctgtggttgggtggaggtcctcacagctgggctgtggttgggtggaggtcctcacagctgggctgtcatttggtggaggtcctcatagctgggctgtggttgggtggaggtcctcaaagctgggctgtggttgggtggaggtcctcaaagctgggctgtggttgggtggaggtcctcacagctgggctgtggttgggtggaggtcctcacagctgggctgtcatttggaggagggcctcagagctgggctgttactggatatatgccatgtgagctggatggcctgtgaaagagaaaagcatctggtgataaaaataattggatgattcttatagaaatagaagag

SEQ ID NO: 89493 - DNA, 5995 bp, Homo sapiens
gatcctcccaccactggaaggcccccctgcccaggcatccccgagcagcaccatgcttggtgagggctcccagcctgattggccagggggcagccgctatgacttggacgagattgatgcctactggctggagctcatcaactcggagcttaaggagatggagaggccggagctggacgagctgacattagagcgtgtgctggaggagctggagaccctgtgccaccagaatatggccagggccattgagacgcaggaggggctgggcatcgagtacgacgaggatgttgtctgcgacgtgtgtcgctctcctgagggcgaggatggcaacgagatggtcttctgtgacaagtgcaacgtctgtgtgcatcaggcatgctacgggatcctcaaggtgcccacgggcagctggctgtgccggacgtgtgccctgggtgtccagccaaagtgcctgctctgccccaagcgaggaggagccttgaagcccactagaagtgggaccaagtgggtgcatgtcagctgtgccctatggattcctgaggtcagcatcggctgcccagagaagatggagcccatcaccaagatctcgcatatcccagccagccgctgggctctgtcctgcagcctctgcaaggaatgcacaggcacctgcatccagtgttccatgccttcctgcggtcacagcgttccatgtcacatgcgcctttgaccacggcctggaaatgcggactatattagcagacaacgatgaggtcaagttcaagtcattctgccaggagcacagtgacgggggcccacgtaatgagcccacatctgagcccacggaacccagccaggctggcgaggacctggaaaaggtgaccctgcgcaagcagcggctgcagcagctagaggaggacttctacgagctggtggagccggctgaggtggctgagcggctggacctggctgaggcactggtcgacttcatctaccagtactggaagctgaagaggaaagccaatgccaaccagccgctgctgacccccaagaccgacgaggtggacaacctggcccagcaggagcaggacgtcctctaccgccgcctgaagctcttcacccatctgcggcaggacctagagagggttagaaatctgtgctacatggtgacaaggcgcgagagaacgaaacacgccatctgcaaactccaggagcagatattccacctgcagatgaaacttattgaacaggatctgtgtcgagcaggcctgtccacctcattccccatcgatggcaccttcttcaacagctggctggcacagtcggtgcagatcacagcagagaacatggccatgagcgagtggccactgaacaatgggcaccgcgaggaccctgctccagggctgctgtcagaggaactgctgcaggacgaggagacactgctcagcttcatgcgggacccctcgctgcgacctggtgaccctgctaggaaggcccgaggccgcacccgcctgcctgccaagaagaaaccaccaccaccaccaccgcaggacgggcctggttcacggacgactccagacaaagcccccaagaagacctggggccaggatgcaggcagtggcaaggggggtcaagggccacctaccaggaagccaccacgtcggacatcttctcacttgccgtccagccctgcagccggggactgtcccatcctagccacccctgaaagccccccgccactggcccctgagaccccggacgaggcagcctcagtagctgctgactcagatgtccaagtgccctggccctgcagcaagccctaagcctttgggccggctccggccacccccgcgagagccaaggtaaaccccggagattgcccgggtgcccaggcctgatgctggggatggggaccacctttcagctgtggctgagaggcccaaggtcaagcctgcattttgacactgagactgatggcttacttctctgaatggggagatgagcaactcaagatgtaagaggccgaggacggtggggtgcagcggggtccccgggaggcaggggcaaaggagggtggtccgcatgggcgtactggcctcctaactcacccccttccctgtcccaggccctgccctggtccccccacaaggcctcagcccagtcacaactgccatttccagtctctgctgagtgtcccagaccctcgaggctgccactccgtcgtggttttatttttaatatagagagagttttgaattctacactgttgtctttcctctgtgctggcctaggacattaggattccttccacggctccggccgctaggaccctgccaggtcccgcgcaccatccctgccctgcccacgtggtattgctgggctcctggctagatgcaagcaaggtggacaagagctcaggactccagcccactgccactgggtgacacagactgtcgtttgggcattatttcatggcagatgggccagtccagggcctaccccgccttgcccccagatcccactggggtccatttggggggtcctgctacactccaccgatccccaaggaagtataataaacgatacccagccagagtctactcactgtcacaagcacaacgagtttatatgagaaagcactgagggggtgcagagggcccgctagttccaggggaactgaaagctgttcctgatcagcccgtatcatctgaggcctgcctgcccaccctgccaccctcccctcccttgctgctctgcccctgccagtgcccagcccagcggctctgggaaggggttcccagaatccctcctgagctgtgccatttactcaggggactcccaaacagccagctgccagtgcaggtggagggctgtaggggagggccagtgcccagacagggtcatggggctcagaccagcccactgtagagaatcactctgaggctccaacttccttccttccttcggggccagtctcggccgaagtctggtcacgctcagacagagctgaccagaccagaccgtttgccttttcaagtttcctagtcctgctacaagatgagcttcttccgtggtttccttttggaaactcctccttccaacaagcagtgggatcccggggcccagggcgggccggtgttggccgctggggctgttgtaagtcttgctggatgttcccctgttcctgagccttaacccctcgcacagccatcccccccccccgtcctgccatccccccccgccgtcctgccttccccaccccacccttaggtcccaggtagttgctctgaagagtttcagtagagtggccccagggtgatagctcagggaacaacaaaaaaggaattccgtgaaaacatttttttttctttgatgaattactcctgggtcacttccaccactggtaaagccagaacttctccaaaaagaaccttgcaaaaagtccagtgaatcagtcgaatcattctgtggatgccaaagaatattttgaccataatacagcacagcctggacctgacaacttgtcatttggacttttttttaaatggagttctttagcaacaaagtatagaaacatgttcattgcacacacccaaggagaagagctcaagcgcttggaagaggatgctttgctgctgctgaagtgtacctgggtgttagatttcagatcctgggctgagcccactgtgagctttcctaaactgtgagactcacagaggggaaagatactgacggtgaaaccagcatggaaaacgtctttaccatgtggttccctcctccccaaatacataaagcaaataagcaggatggggaacagcttgaccttcatccacccctaactccaaaactatcaaggtacgacagtggcattgtcatcgacactcaatttcatgtgaattttagcaaaacaggaaacaaagataatgactcagttcagaggatcggacaaatgtgtctagtccgggtggactcggagggagtggggtgggcttcaaggattctgggcgttgggatggcatgagctaccctgtagagtttagtctgcctgcccgccttggtagtagtgaccagtcagtgtcagcatcagtgtcccaaccccagtctctgtttactgcctttgaacagaacttcttccttccccatgctttgggtcacctcgggctgcaaccctgtctgtgccagattgcccggtctgaccctgcaggaagcaaagaggtgagcttaaagaacaaccaaactctgccaggggtcccagaaagcccagggtccagcagtctcagcacttggccccttgccccttcacaccatcctggggcaggggctgggcctccctggtggcaggggtgggtggagaattagggagagggtgcaacgagtctggccccttgcctcgggctggctggtgttcttccaagagcctctgctcacattgttggcctctggattctggcccttcttcattggctgttgctttggactggactgttgctgagcctgtgtcctgcagaacccagatgtctgttaggctggctggctgctgcgaggggaggggggtggcctttcatttggggtgccctttcactcccaggccaagccctggagcaatcttcttcaggcagctgtctccacctccaggatgtccagcaggctgcaaggagaaggatgccagccacccatcctcccccagttcccagcctttcccctgttggtcacagccgcttctgtctttttccggtctactgtccccagtgtagagggctttgctgtccctgagactgaggcaggttccttttccaggtcagaggtggaggtagatctttctctcaaccacatctgcctccacacacagctcctccgcagggaaggagaagctgctctgtaactcattctggctatcgtcccccttctcactgacctgaccgcccaccacctccttccccctcatcacatgacaaaggataatgtgcaagaaaagtatttttatgtatcataaatgtattttgaaacaaatgagaagaagaaaggtagaagggtttattttattaaatgagcctgacttagtgacagtgtgtgagcatttgcaatgtaagggcctcagcttccttggagaagccaccccaggtttccagacatagatgttgaattgtttgtggggggtgtgccaggccacgtctcgtgtgtccgtatgcaggcatgcctgtgtatactgtgtatgggcacactgtgggactagctgggacaattcctagagattcaactgcccaattctaaccaacattggcagcggctgaacttggcatttccttgctaactgccagatgtggccaacctttgtccatatgcaaaccactgaaaaatgatctggatttctatagcaaggcccttggggagggcactctcccatgcccttggcctcgctggccacattggccaatgagccagggctggagtctgagacctttggttgttctttaaggcacctcctgccactttctccctcagaggcacaaacactttgtgttccacgtcagtttgaggggacggtggggggatgatatgaatgtcacaggaggagacaccttctgtctttgtttcaaagaaagtgatgtgccatttgttaatatacaagagaaatattgaaaatatattgaaaagagcaattttaaattatttttggcttatgttgcaatatttattttcttgtattagaaaagattcctttgtagagaaaaaatgtatttttcattaacgcaaagacctatttctcctttttgtacattgtccatgtgcgcaacccttaacgagcaatagaatgtatggtcacctgggtgtggccagtgcccgctgtgccctgcatgattctgtgttgccgctgctgcatagttcccagccccatcctgtcctgctcactcatgggggcttccagaccccggccccaccagggcttgtgtcatagggagccctttgcactcctcgtgtgttggcaaacgcagttaataaagcaatgttttctgtg

SEQ ID NO: 89494 - DNA, 791 bp, Homo sapiens
  misc_feature (1)...(791): n = a,t,c or g
ctggtgagtgtgaagctgtaaccttctgctggggccggggccgaagtttttccgccagagcaaggaaggctgcccctggcagcaactgcactccttccttactcctgttgagattcattttatagtaggaaataggcatctaactaccatacaagttcagaccaatggaagaaaagagcagcaaaaattgaactgaatgaatcccaaaagcaagaaattaaagacgcctttaatttatttgatattgatgggtctggaaccatcgatgtaaaagaaggaaatgcttgatgaagctgatcatgatagagatggagaaataaacgaggaagatgttttgagagtgatgaaaaagactactcgttattaatagcgttgttttagtccttgtggaaaattaacaaatttgtatttgttatgcagttttataatttaatatctgaatgtattcattttcagtttttagtttatatgtacacattggcttcttgatgtctaatccatgtaagaagttacacatctctaccaatatgatgttaaatntacagcatcaagaaacaaaacataatgacttctttgagccattaatccaagaacagtattgattctagctgctcttttgagaaccttaggtcacaaagacttagaattttaaagtttgatgaagttggcttcacatccaaatgaatttggcaaacaaaacttatattttccttttgtgcaacccaaaaaaacctgatgaacatttgctttttagtcagttactcaaatacataaagtattaaaaaaaaaaa

SEQ ID NO: 89495 - DNA, 1662 bp, Homo sapiens
ctctttctggtgggcttcagtgtcttcaccatgaaatgagagggtcagatgtggccctttccagggtagactccgacccagcgctgtgctcctagtgggatggtggtgtcctttgccatgtgctgaaccagaacccttgtgcctgacagccagcctcttcttctgttctcaccccacaatcaaatatatccccttcattttcctcccatccacatgaaggaaggactcaacacagggcagaagaaaaccaacattgaattctcttccaaagcagcagagagttcagcagggaggcaaggagggggctgaggaacgtgcctcttcaggcaggaaactcacagatggcaatgaaggaggaggtgcaggagatgccattccagagcccgttgttcaggagaataacgcagtcctcccctgagccgtggtcatttggctcatccttcttccagttgctgtaggtcagcctcccgcccgtcaagtacatgaactggccttcagttgcctcatctgtgatgcccaggaaggcagtgtctttggccacatcctggatggccttattctcctcggcattcttgggggcagccactgtggcctggagcccagcacacagagccttcactttggagaaaggcatccgctcaccattggtcacgaaaagcttcttcccagacatttttccccaaggagaagggctacagcttcttcgtgtggtccagttctgatctcaggctctatagctttctctctaagttggccagcttagcctcagcaactgaattgtccccacgatctcctttttggcccctaggtcctggaattccagaagtccctgtgtttcctgggggccccatcttcccaggagggccctgcaaacctctgagcccttgacctgttgcaagacaaagggaagatgacccagtggctgtcactctttttttttttcccaaaagctcaatgctccattcctgttcacccccggcacagccaatgagccagtgatctgacccaaagaagaaagactctcctgcaacctagtggagggcctgcaccaaggccagctccccaaccaggcaggacacccctctgaagggacaaccacacacccccagttcctgtgtggaaatatgggatcccagagagtccacgaacagctttgttttggaggcaatggcattttacaggggttgttctgagtgtagcatgggtcctgatgaaaggggagcctccccaagtctgtgctttaaccctcgtgtggcaggctcaagcacagatttgcttgaacacctgccggaggtggagatttaggaagccacagaaacctgtcccagacctggctctcccttttcccccttgggtctatctcgcccatctctgcctggggtgccattggtgacggggatgccacaggtaatcatggagcaggtcttctgggtatctgcacaggcttttgttttggagcaggaagctgtcaccacagacaggagaaggacagggaatgatggaaacaggaacatggtccttaccttgaggtgaagaaagtgaaggaaggaatttcatcccatctcatttaaatagcatttgctacccactgtggtgtgctggaccctgtgctggggacagtggacacagaggggaccatcacaacccctggctctgaatgac

SEQ ID NO: 89496 - DNA, 2297 bp, Homo sapiens
  misc_feature (1)...(2297): n = a,t,c or g
ttttttcaccatttaagcaagaatttatttccaggactatgtttttactatagatttaaatttaattataccttaattcacatataaagacaactctgaagaccatctggatatgataatggcctggggttaaagtgaaatattggaggtcatgctcaggcctgagcagtataccaacttgctcaagcctgagaaataggacttctctctttcactcatcacttcaaaaatgcaatggccctccctgcaagaaattgccactccagctgaaggaatgaggctttcagttcccagccccacattgcttccaatgtgactaggcaggattctcaagggaaggtaggttcatcaatctgggggtgtgtgggtgaggggtgggggggcaatccgctaggaggctctttctcccccgggggcaccgctagggggtaattgattagcttgcacgtaggatgttatgatcggctcgttagtttcatcacagagcttctggtgatatttagcagcatctgcaacccgacacagggattgatgtgggctgtggcagtggacaacacaggaaggccggcatccattagcatctgtctcatgagtttgacgttgcgctggtgctggcggcgaagcacccgtccctcagcgctcttcaggatccgcacagactcccagggctccagccagcaagcatggggtggcagagaggtggtgaagatgaagccagcagcataaggacccgacggtgtcattcagagaactcgtgctgggcgatgtaccctccaacacaaccaagggcttgcacaagtgtcccagaaatgatgtccttctttggcatgactccatgccgatcggcaatcctccgccctcgagctccataaagctgcactgcntgaacctaattccacgaaggtgattgctccatactcatgggccacatcacacagctcttccagtgggcacaccgcaccatccattgaatggacgagtttcaaatgccacaaatctttggggacgtgaggggtcaaaatctttgcaagcagttcctctgaggtggctgaacatcaattgtggcggaagatgtaactttggcactcggctgtttcgaaatcccttggatcaatggaggcaatggttcccagaatcagagtaaatctcacgagcctggcatcatcttagccagggtgaagagggttgagtcattggccacaaagcaccgaggaaaacaagagtgcggcatctttcccatggaggtctgccagctcccgctctaagtccacatggaatttactagttccagaaatatttctagtaccacctgccccagcaccatgttgtttcaaagtgtccataactgccccaccacacccgtgggtggcgactcattcctaggtagtcattactgcaccagactgacacttgctttttggtgatgagggagtctgaatagtcatctgccatggggaagatgtgtgctcgccggttcacagttttaaaaactcgataggtgtggtcattctttttctcatcaatttttttctcaaagaaacgatcatactgaaaagtggaaacagattttggcaagttatcttgaagaagatgagacactctttctggtctttgcttttgcataatgtcctggaagttcttcagcagtccactgggatcccctccatcggttttcacactaaccacactggggcctgctgaggtttcagcaacctctttcctcacggcattcatttcctgcacatccctcctgaagctcaagactggctttgcagaagacactgctgcctctctgattcatctgtgctgccaggaaagggcatttgcttgcagtgccctggcttgtggcaggcaaggggtgtccagacggaatccagacggaagctgtgtgccatctggactctgctgggatccatcaggagtctgttggaccttggccttagcagttttgtctttctcactggccggaggggtttctttgatctgttggtagtgtactgctgcagtggacaatgcccgaggggctggcttggccccaacttccatcatcttggggcagttttgggcatagaacaacagagatttgcctgctttctgcagaaaggcctgggggactcgggataagaatgggcagcggcgaacaacactctccatgttcaggaagtatgctggctcctgcgctgaggactgcagaggcggcggcgaaggaggcgggcactcaagtcgagaagtccacccgaaacgctcgttgcccttgtccgggagcagcctcaggccgcgatcgccggcgccttaat

SEQ ID NO: 89497 - DNA, 468 bp, Homo sapiens
  misc_feature (1)...(468): n = a,t,c or g
cgaanatgtccngggggnnnnttaccggaccccataagagngncgntngaannaacggngnnacactggggcactctgaggcctggctcagctattcacaccgagaggttgaggacaggtcgtcacactcggtcactctgagtcctggctcagctattcacaccgagaggaggaggacagggcgtcacactcggtcactctgagtcctggctcagctattcacaccgagaggaggaggacagggcgtcacactcggtcactctgagtcctggctcagctattcacaccgagaggaggaggacagggcgtcacactcggtcactctgagtcctggctcagctattcacaccgagaggaggaggacagggcgtcacactcggtcactctgagtcctggctcagctattcacaccgagaggaggaggacagggcgtcacactcggtcactctgagtcctggctcagctaan

SEQ ID NO: 89498 - DNA, 1596 bp, Homo sapiens; identical to SEQ ID NO: 61518

SEQ ID NO: 89499 - DNA, 1541 bp, Homo sapiens
ttttttttttttgcctcctgattacctacaatggtcaattttattacaaagaactgtatcaaaatatacaagtctgtttaagaacaaccaagaaatgcagctgtttaagggacaaatgagaatcaaccgttagagagcaggcagcctctccccgccgctgtccactgcaggagacggcatcctcagggccacattttccacgggacatccttctgaataatttaaagggtaagtccggcacattacaggtcttcgcgggagggcagctgtgtcgggctttctccttctgtggcttcagcctctgccggcggcacacaggcatcttccgtttcttcgaagccgtcaggacacacacagacgtagctccctggagtattgtagcagttttcgtttttcctcacacaggttttttctgctagtgagcactcgtccacatctgcacactgtccgtgctccctcgcgtagccagagatacactctttacagtttcctgggccttcccctgtgcagcccacacagctggagtcacactctgcaacagggagccagcgtcagaccccgacatgcacaaggcaccagtgcccgtcagaccccgacatgcacaaggcaccggtgccgccaggatttgggttttctcctcattcatcaccaagtgactttataacgatctgtctctgtctcccggcaaaagcacagactcgcgtcctgctgtgcagcaggtgctcccggagagccatggtgcagaccacctggcttggaactctttgggagaaactgggtgctacagagattttagaaacaaacccacctccagctcggtgaccattggtttgccagcctgccaggagcttcctaagaataaccagagcctctcgcatggcttccagtattagtggctcactgagggacccactgtctgcactcccaacagtgaaaactgcctggggctgtcacacacacggggcagaggcggcctcctccctgctgctgggactggggatcagcacaacttttctggggcactatggctctaaaagacacattcccttgactgagcgatttggaaattaatccacagaaaatcataaggaatgtgaaaagtttaccttcaagtgttcacagtttataagttgaaaaactgttatgacgtaaacgtccagcaacagacattgttgtaaaagtatgaaataatggctccaaaatcattagcgtgacagagaaaccacaggacgcagagacgttcgcaacaagctgctgagtggaaaacacccgacaggcgctgcggaaagtcacgcagggcacgttgcgggggcgctgggggggcacgagcagtggaggcaccagcagggtgcactctccagggagttcctgggtttttaactgttttcttttcatctgacttgaattttctgattttcctgcagcaaatacctatgacttactttgccacactaagtgttctcagggcaggcaggatgtatggaagtgacgctaagaagccataaatgaatgttgacaaaggcagcaacgaaacccggcag

SEQ ID NO: 89500 - DNA, 600 bp, Homo sapiens
ccgacaggggagacacagtccctgcccaaggagcttccaagctaagggcggaaccacagccaagcccagggagctcccaggctaagggcggagactgtcccagcccagggagctcccagtcaaaagggggagacacagcactgcccttacaaagctaccagcctcacggagaaggcgcagtccctgtccacagagacacagccttgccccagttactgcccacctgcaagagatccacatttctgccctccagagctcccaaactgatgggggagagagacatcatcccccagctctgggagtttccagtctgatggaggagacagagcctgcttcggtaactctcactctgcgggggaagactcagccctatccagggagctcccacactttcaatggggaggcccacccagtggccgagcctgctgctgctcctgctgttgccggggcccccgcccgtcgccggcttggaagacgctgccttcccccacctgggggagagcttgcagcccctgccccgggcctgtcccctgcgctgctcctgcccccgagtcgacactgtggactgtgatggcttggaccttcgagtgttcccggaca

SEQ ID NO: 89501 - DNA, 840 bp, Homo sapiens
  misc_feature (1)...(840): n = a,t,c or g
ggaattcccacaacctgtcaaaccagagatgccagtttccccaggactcccaggagctcccgcccctagctggtaccagggagagcctttgcaggctcggtgggcagtgcccccaacccatgccccatgcacctgcttatcgatcactgcctgtctggatgtgtctcgtgtcagagccctctggtgtgaacttgccgagtactgagaggccaagacgtgagacaattacaagcaggggagagaagtggtaccctgtgacaagaggcagctgtggagaaaggggcaggctccatgcccggggtgagcgccatctgggcaggaggcctggcttccagctgtgggggcttgggaagggcagagcctgggaggaatgattttgaagccactactatggagattaaggggatgagaatgtaaatctcaagtaaaaaggtaattgaatgtaatagcaaacactgctcgctctatgttaattttagctcttcccctggatacaagacgctgtattagtgttttattaccattttgtttgcactaataaaatagtaaaatttatttcaaggaagttgaaggatggttntacaatgcaaatttgaagaaattggacttttcatttatgcctctgctattttaaaccctgacgggtgtaaattagctacagggaccgaacagaccccactgatggggacttgggaggcgggagccctgacagaggttccagaccagcttagggcagaaaacgcgaccgtatcacacggagaggcttcaccgggaagggtacttgggggccctggatggggtgggacgccgtgcgcttgttgaaaaggtggatctaggacc

SEQ ID NO: 89502 - DNA, 390 bp, Homo sapiens
atccagcaattaaccaattgcagttcaagttttcctatcccaggctgcttcctgtggaagtttctgcttatgggtctctgtgtgggtatatgtgattctctgtatctgtctgtctgtctacccagttttgggggaaatggtttgctctgtgacctcacttctctgccaggtctaagaaaagctattgattttttttgtttgtttagcgttttacttgtttttaggatggaatgatgacttctaagcttcttaacatgctaagccagaaaccttaaactattttgtagatttcgatcattgtggcatcttcacagagcatcagagatgttctaaagcataactaacaatggctatctggtactctattttgatatgtcacatatttaatta

SEQ ID NO: 89503 - DNA, 1074 bp, Homo sapiens
atggaggatgcggccaccagccaaggtgctgacgtgatggccacagcaggaaatccctggggctggttcctggggtacctcatccttggtgtcgcaggatcgctcgtctctggtagctgcagccaaatcataaacggcgaggactgcagcccgcactcgcagccctggcaggcggcactggtcatggaaaacgaattgttctgctcgggcgttctggtgcattcgcagtgggtgctgtcagccgcacactgtttccagaagtgagtgcagagctcctacaccatcgggctgggcctgcacagtcttgaggccgaccaagagccagggagccagatggggaggccagcctctccgtacggcacccagagtacaacagacccttgctcgctaacgacctcatgctcatcaagttggacgaatccgtgtccgagtctgacaccatccggagcatcagcattgcttcgcagtgccctaccgcggggaactcttgcctcgtttctggctggggtctgctggcgaacggcagaatgcctaccgtgctgcagtgcgtgaacgtgtcggtggtgtctgaggaggtctgcagtaagctctatgacccgctgtaccaccccagcatgttttgcgccggcggagggcaagaccagaaggactcctgcaacggtgactcctgtggggcccctgatctgcaacgggtacttgcagggccttgtgtctttcggaaaagccccgtgtggccaagttggcgtgccaggtgtctacaccaacctctgcaaattcacctgagtggatagagaaaaccgtccaggccagctaactctggggactgggaacccatgaaattgacccccaaataccatcctgcggaaggaattcaggaataggtgttcccagcccctcctccctcaggcccaggagtccaggcccccagcccctcctccctcaaaccaagggtacagaaccccagcccctcctccctcagacccaggagtccagaccccccagcccctcctccctcagacccaggagtccagcccctcctccctcagacccaggagtccagaccccccgtcgacc

SEQ ID NO: 89504 - DNA, 1324 bp, Homo sapiens
ttttttttttttcacattaccgaaaggccaagtaatgtggtgtgattactataattcctacaacaaaacttccacttagaatagttacatgttcccaaactatttttcttctgtctgccatgctggcttctgtatcccatggtccactgtaatctttttggtcttctttttttgcagtacagcagtcctcgtgctgctatccattgagtaggtaaaccaccaattcataggtggccatcataatggctgtgtttgggaatctgtctcactagatgagttgtcagaccacgataaagagacccataaccttcttcttgaacaagcaaagatagagtctgaaaaaaagatctgtattttgttccctcttcacgtagtcttgttcttacaacttcatgtggatatgctatagttgtggcaacaagtttttgaggtggcagcagctagcatcattcccacaaaatctgatgcttctttcacagactcttcatcattttccattgtagaagcagtcttatattccagtagtttttgttttatactttcataaataacaaaatggataacagtctctgatataccagcatatgaagcagacatgcccctataaaatccttttagtccatctgtctgatacactttacgaacacattccaaaagccacccattcgccttttccccgcggttccttgcatcaaagctgtaaccgagtctttataagccaaatggggttggttgctgtgattgcagtaaaacctgccattgcagctgaaatcatatgtacttgggtagaatcaggatcaaatacatcattcaacttttccttgcagtttgaataagcagcaaagtatattgctctggaaggggctacccccactaaattggggcctagtcctctaaacaaggaacgaggcccttctttttccaagatcacctttaggcaatgaagaggtccgggagacactactcggttgacactggctccagccatggtgttcagctgaacttcagaaatataaagcgtcacagaagatgactgcagtcgtgtttttacaacttccagtggacatgtcagaatagctcccactgtaccaccacatcctccggcaaacagatgcaccagcgtgtccctctggctcattctctctcccgcatgtcctccggccgctgaggcgggacgcggatctggccgcccgctacggcaggcggcttcggtcccggactggagacgcacagcgccccggggacggcgaggagagctggccgagatgcggctgcagaaagcaaccggcacagccctccccgcggcactccagccgcgacgaaa

SEQ ID NO: 89505 - DNA, 503 bp, Homo sapiens
  misc_feature (1)...(503): n = a,t,c or g
aggggctcnnnnnnaattgaagnccatgagaatcgtcgccggnnccgaattnccgggncgacccacgcgtncgggagttttgtcagcacacgcttttagaaggtttcttccactgtatgaccgtgtattgatgaaaggaatgtgcctgaaactgtaaccaaaggagacatgcttccagaaaaatctcaaggaaaagtattgtaagcaacagtagatgttggatcagactctaaagtaaagggtggagagttaaccagttaacatgtaagttggagatagagttctcccagaatatgtaggcaccaaagtagttctagacaacaaggattacttctcatttaaagatggtgacattcttgcaaactatatagactgaaataaatcatattgaaatggcatcaacatgaagctgcccattctgtaattctgaaatcttctatcatgtaaaataattttcatgtctttcttttgtaataaactaatgatatctaaactaatgatgg

SEQ ID NO: 89506 - DNA, 1101 bp, Homo sapiens
aaaggtactagacataccattattgcaataattataacaaatagtaacaaactctacaaagatgggtgtgggacaaatctgatttgcagagttgccaccttatattatttaaattttccagttttcaacaacaacaaaagatgtgaagaaacagcaattacagccgcctatatatgggggaaaaaacttagaaaacagaaaccatccctgagaaaacccagacattagatctattaaacaaaaagtttgtcaacctttaaatatgctttaaaaactaaagtaaaccgtggacaaagaacaggagaaaggaaaataatgtataaacaaagtgaaagtatcagtaaatagaaaacatgaaaaattctggagctgaaaaatttcttagaggggtttacagatttaaacaggcagaagaatcagcaaatttgaaaataggacaaatgtaattatccagtccgaggaacagaaagaaaaaagaatgaagagtgaacagagcttgagggatctgtggcattttatcaagttaccaacatacgcattaaaggagttccagaaaatgaaaagaaaaaggcagaaataatatttgaggaaataatggctgagacttcccaaattcaatgaaatacatgagctacacattcaagaagatcaacaaattataactaggataaactcagagatctattactaaacacattacaatcaagctgtcaaaagccagagacaaagacagtcgttaaagcagcaggagaaaaacaacttatcacatacaagggatcctgtgtaagattaaatgcctaccactcatcagaaactacagagaacagaaagaaaaaagaatgaagaggaacagagcttgagggatctgtggcattttatcaagttaccaacatacgcattaaaggagttccagaaaatgaaaagaaaaaggcagaaataatatttgaggaaataatggctgagacttcccaaattcaatgaaatacatgagctacacattcaagaagatcaacaaattataactaggataaactcagagatctattactaaacacattacaatcaagctgtcaaaagccagagacaaagacagtcgttaaa

SEQ ID NO: 89507 - DNA, 789 bp, Homo sapiens
  misc_feature (1)...(789): n = a,t,c or g
ctaaagagttttattatgaatgtatattgaattctttagtctgtaatagtcatatggtttttctcttttaatgtgttaaatatgttgagtcacactgataacgtgttctaatgtaagaatgctggcattcttatattaaaaccaccttggttataatgtatttttaaatttcgatcttatgtcagttcagcttagaatttttggatctgtgttcttgattgaattggtctataattttctctttcttaactatgggctcaaagatctgtttagcttttctgtatctccttgaagcagttttggctacttttttttaggaagctgttcattttgtctaagtgataaaacttgttgacatgaaattgttcacactgttctcttacattttaatttttttaagatctttttttatgccccagaactgagtggattatgttttaattttctactagagatttgttaaagcatttttcaaagaagcaactatcggccaggtgcggtggctcatgcctataatcccagcactttgngaggccgaggcgggtggatcatctgaggtttggagtttaactccagccttgccaacgtggagaaaccccatctctgctagagatacaaaaattgggccggccatggtggcacatgcttgtaatcccagctactcaagaggcttgaggtgggagaatcgtttgaacccttggaagggggaggttccaatgacctgaaaatggggcctttgcccttcaaccctggattgccaaaaacaggattctgtctttaaaaaaaaaa

SEQ ID NO: 89508 - DNA, 5268 bp, Homo sapiens
cccgcaattcccgggtcgacgattatctgggcacccggcagccacagcgcagcgagagcggacggtcgccatggttccctccccagccagtcccaggcgcccggtgcactatgcggggcacgtgcgccccccagctctaatctgcgcgctgacaggagcatgatctgtgcccaggccagggctggcaagaatctgtaccagaacaggtttttaggcctggccgccatggcgtctccttctagaaactcccagagccgacgccggtgcaaggagccgctccgatacagctacaaccccgaccagttccacaacatggacctcaggggcggcccccacgatggcgtcaccattccccgctccaccagcgacactgacctggtcacctcggacagccgctccacgctcatgggcaggagctcctactattccatcgggcactctcaggacctggtcatccactgggacataaaggaggaagtggacgctggggactggattggcatgtacctcattgatgaggtcttgtccgaaaactttctggactataaaaaccgtggagtcaatggttctcatcggggccagatcatctggaagatcgatgccagctcgtactttgtggaacctgaaactaagatctgcttcaaatactaccatggagtgagtggggccctgcgagcaaccacccccagtgtcacggtcaaaaactcggcagctcctatttttaaaagcattggtgctgatgagaccgtccaaggacaaggaagtcggaggctgatcagcttctctctctcagatttccaagccatggggttgaagaaagggatgtttttcaacccagacccttatctgaagatttccattcagcctgggaaacacagcatcttccccgccctccctcaccatggacaggagaggagatccaagatcataggcaacaccgtgaaccccatctggcaggccgagcaattcagttttgtgtccttgcccactgacgtgctggaaattgaggtgaaggacaagtttgccaagagccgccccatcatcaagcgcttcttgggaaagctgtcgatgcccgttcaaagactcctggagagacacgccataggggatagggtggtcagctacacacttggccgcaggcttccaacagatcatgtgagtggacagctgcaattccgatttgagatcacttcctccatccacccagatgatgaggagatttccctgagtaccgagcctgagtcagcccaaattcaggacagccccatgaacaacctgatggaaagcggcagtggggaacctcggtctgaggcaccagagtcctctgagagctggaagccagagcagctgggtgagggcagtgtccccgatcgtccagggaaccaaagcatagagctttccagaccagctgaggaagcagcagtcatcacggaggcaggagaccagggcatggtctctgtgggacctgaaggggctggggagctcctggcccaggtgcaaaaggacatccagcctgcccccagtgcagaagagctggccgagcagctggacctgggtgaggaggcatcagcactgctgctggaagacggtgaagccccagccagcaccaaggaggagcccttggaggaggaagcaacgacccagagccgggctggaagggaagaagaggagaaggagcaggaggaggagggagatgtgtccaccctggagcagggagagggcaggctgcagctgcgggcctcggtgaagagaaaaagcaggccctgctccttgcctgtgtccgagctggagacggtgatcgcgtcagcctgcggggaccccgagaccccgcggacacactacatccgcatccacaccctgctgcacagcatgccctccgcccagggcggcagcgcggcagaggaggaggacggcgcggaggaggagtccaccctcaaggactcctcggagaaggatgggctcagcgaggtggacacggtggccgctgacccgtctgccctggaagaggacagagaagagcccgagggggctactccaggcacggcgcaccctggccactccgggggccacttccccagcctggccaatggcgcggcccaggatggcgacacgcaccccagcaccgggagcgagagcgactccagccccaggcaaggcggggaccacagttgcgagggctgtgacgcgtcctgctgcagcccctcgtgctacagctcctcgtgctacagcacgtcctgctacagcagctcgtgctacagcgcctcgtgctacagcccctcctgctacaacggcaacaggttcgccagccacacgcgcttctcctccgtggacagcgccaagatctccgagagcacggtcttctcctcgcaagacgacgaggaggaggagaacagcgcgttcgagtcggtacccgactccatgcagagccctgagctggacccggagtccacgaacggggctgggccgtggcaagacgagctggccgcccctagcgggcacgtggaaagaagcccggaaggtctggaatcccccgtggcaggtccaagcaatcggagagaaggtgaatgtcctatactccataattcccagccagtaagccagcttccttccctgaggcctgaacatcatcactacccaacaatcgatgagcctcttccaccaaactgggaagctcgaattgacagccacgggcgggtcttttatgtggaccacgtgaaccgcacaaccacctggcagcgtccgacggcagcagccaccccggatggcatgcggagatcggggtccatccagcagatggagcaactcaacaggcggtatcaaaacattcagcgaaccattgcaacagagaggtccgaagaagattctggcagccaaagctgcgagcaagccccagcaggaggaggcggaggtggagggagtgactcagaagccgaatcttcccagtccagcttagatctaaggagagaggggtcactttctccagtgaactcacaaaaaatcaccttgctgctgcagtccccagcggtcaagttcatcaccaaccccgagttcttcactgtgctacatgccaattatagtgcctaccgagtcttcaccagtagcacctgcttaaagcacatgattctgaaagtccgacgggatgctcgcaattttgaacgctaccagcacaaccgggacttggtgaatttcatcaacatgttcgcagacactcggctggaactgccccggggctgggagatcaaaacggaccagcagggaaagtcttttttcgtggaccacaacagtcgagctaccactttcattgacccccgaatccctcttcagaacggtcgtcttcccaatcatctaactcaccgacagcacctccagaggctccgaagttacagcgctggagaggcctcagaagtttctagaaacagaggagcctctttactggccaggccaggacacagcttagtagctgctattcgaagccaacatcaacatgagtcattgccactggcatataatgacaagattgtggcatttcttcgccagccaaacatttttgaaatgctgcaagagcgtcagccaagcttagcaagaaaccacacactcagggagaaaatccattacattcggactgagggtaatcacgggcttgagaagttgtcctgtgatgcggatctggtcattttgctgagtctctttgaagaagagattatgtcctacgtccccctgcaggctgccttccaccctgggtatagcttctctccccgctgttcaccctgttcttcacctcagaactccccaggtttacagagagccagtgcaagagccccttccccctaccgaagagactttgaggccaagctccgcaatttctacagaaaactggaagccaaaggatttggtcagggtccggggaaaattaagctcattattcgccgggatcatttgttggagggaaccttcaatcaggtgatggcctattcgcggaaagagctccagcgaaacaagctctacgtcacctttgttggagaggagggcctggactacagtggcccctcgcgggagttcttcttccttctgtctcaggagctcttcaacccttactatggactctttgagtactcggcaaatgatacttacacggtgcagatcagccccatgtccgcatttgtagaaaaccatcttgagtggttcaggtttagcggtcgcatcctggggtctggctctgatccatcagtaccttcttgacgctttcttcacggaggcccttctacaaggcactcctggagactgccctgtggattttgagtgacctggaatatttggatgaggaattccaccagagtttgcagtggatgaaggacaacaacatcacagacatcttagacctcactttcactgttaatgaagaggtttttggacaggtcacggaaagggagttgaagtctggaggagccaacacacaggtgacggagaaaaacaagaaggagtacatcgagcgcatggtgaagtggcgggtggagcgcggcgtggtacagcagaccgaggcgctggtgcgcggcttctacgaggttgtagactcgaggctggtgtccgtgtttgatgccagggagctggagctggtgatagctggcaccgcggaaatcgacctaaatgactggcggaataacactgagtaccggggaggttaccacgatgggcatcttgtgatccgctggttctgggctgcggtggagcgcttcaataatgagcagaggctgagattactgcagtttgtcacgggaacatccagcgtgccctacgaaggcttcgcagccccaccgtgggagccaatggggcttcggcgcttcctgccatagaagaaatgggggaaaattacttctctcccccccaggggaacacacatgccttcaaccggactgggatcttccaaccgtatcccctcgtactcccatgttgtatgaaaaagctgttaacagcaagtagaggaaaccagcacctttgggacttgagtgaggacatggaacctcgcctgacattttccctggccagtgacatcacccttcctgggatgatccccttttccctttcccttaatcaactctcctttgattttggtattccatgatttttattttcaaaccaaatcaggattgacaaaagctgtgcatgaagaactgccttcttctaagatctaaccttcaggcttctctcctctgttttcaatgaactgctagcctgtatgcaatattaaaaaacagctgtctcaaaaaaaaa

SEQ ID NO: 89509 - DNA, 2194 bp, Homo sapiens
  misc_feature (1)...(2194): n = a,t,c or g
atattattcttgtaagaagtaggaaaatatttcttttatttattaatccaatcaaaaatgatgagtgctaaactaaaattcccaaccaaaattccaaagatgagcaaaacgaatgcctgtggaaataagaaaaaagataaaagataagaaagataaaagaaaaaagataaaaaaatacaattggattatttgttaaatctctactctctgcaataatgtattctatattttaaaatatattgactttcttgatgcaggtaaaataatataaactgacaaactatttcttaaaatagaagtcttgaaagaaagaaacaaaaacaacctaccccaagctttttccatgacagaaaatcctctctgctaagtttaagataaaatagtcctgggaatataaaaatcaaacatgttgatgtactggcaccaactacaccaaatacatttctaatgtcaggaacatatattgcaagtaaaacgatgataatattgagtgctagagtgatcaaaaaatggcgaatccatgagaatggaaaattggagaaaaacatcattgttacagcttttctggcagggaagtggattaaagggactgtccaaaagcacagcaaatagtatgcataacttcacaggtcatgaccacaacatcatgtgattaaggtatttactattaaccttttagtaattctgactccactttgtctttaattctgtgacaggtcacttcacctctctgggctttagttgttcatcataaaaagtgaggtacccaaagagtgcagatataaaataaatgagaaaacttaaagcaattgctgtattggtaacattctgcattcttttctttgaaggactttgaagttcacagtatatgggcaatattgaggtatggcagagaaatgaaaaagccatggttggtaaggcataagcactctctttggagaaatgaaagagctttggcttacaatcatctgtaacatttgaaatctggaagcctttctctacataatttaatgtcagaggacaagggatggaccattttttaattattaccacaagagcaaagaacatcataaagaaaaatgataaactacttgtgtagccaagaaagcctattttgggaagaagtgcaagagggaacacaatgccaacacatatgattattagtagtgtttgtccatcaagataccaatatctactatagtctccagtcaaaaattctgcaatagcagcaggaagctctgttttaataattaaaagataagatgacatagctccaatattctgaattattatggtgcctgccaccaccaactttccaggtaatccaaatgcaaagagtccaagatcttcataagatgttacagctccacagagaattttacaaagattgaaggaattcaatcaacggaagacaggtgagtcaatgtgcaggcagaaccatgaagtagttagttcatgggcccaagtaggctgtctgaatacacatactaagcagaagatggactgagtaagaagccaggagagcaactgtcagcagcaagaagctaaatccaaagacaccggtattagccataacataagctaagccaaggatgccacttcccatgatggcattcatcaaattaaacactgataaaccaaatgaaacacctggggatcgctgtctgtgaagttcagcagtgagtacataatcctagggccgctcatcccatcatgttcgcagcttccactcaacgctgcatctcttccacccgacgcttttcatcttttctttctagagtatgctaggctgctatcacgttcataactgcgccaatctcatctgaatctcggcggctgccttcagaccccatcccccagggttcaggctccagcatctcccctgtcccggtgcggtcctccttttctgggtcttatttggcaggcacttgagggaagccggagggcgtcagcgcggggaagcgaacacagcccacttacgttgcttagcaacggactcaactcttcggcctccgcttcttcaggctgctggacagagacataccagccccgctcagcgttgaagctcccccaggacgcctccatgctgctatccagctgactaccagttccatgtacgagcctcgtacccgtgccctgcgacttccgccgctctcgccgatagtctcaagtttctcatttnnnngacgcacct

SEQ ID NO: 89510 - DNA, 912 bp, Homo sapiens
ccagcctagagtgctagctttaaaagccccacctgctctactctggttcagctgcctggtggaaggaaaggaatttcccatcatgcttctcttcccaaaaagattctggctccagttccttccagtgaggacccacggggtggcagagttgggtctggcctctagatcccagttacctggggggctgccaggggggatgtgggcagggccctcggacgggacgccgtggagcctcatctcattgctgtgtcccagctgcacccgtctcagtatggaccgctccatgtggatgtcctggggcccccagggatcaactagggtcccccaagttgaggaatcacctggtgccattgaagggaggtggcgtggaccggcggaaccgtcctccctggagactgtctgtcttgtaatgatgttcccgtgtccaatctggatggcttcggagtttgcaatggaaatccagctgttgggtccattctggcagatcatgttgattggattgtgctggtaaataattgaggctgactttgctcttcttccagaatcttctgggcggtaaatcgtccatgctttggactgctcatccatgtccagaaggtgcctgctcttcatcctgtacaagtctcggttcacatcttttgctgtcctcattcccagtgcttgggcgatgaccagggccctctggggaccattgtctttgagaaacctgtagatgtcttcctcccgttgttggctgaactgagggccaggggtctctggaattgtagctgcatgttgctggggcctcttggcttctctgcccgggtcagcaggagcctgggccatgctgacagcagctgcaaggagtcggagagacttggcaggtgtgcaggcttctgcactgtggccctgagagggtgggctaggacgaaa

SEQ ID NO: 89511 - DNA, 392 bp, Homo sapiens
  misc_feature (1)...(392): n = a,t,c or g
ttgattgtgctgaggcgtcatttttatatattgctgaatttaatttgctaattttgttgatgatatttttgcttttatgttgatgacttttgcttttatattggtcagaaatcttcagtttttgtcagtgttctgaagccatcaatgtcatgatggcttcataaaatgaattgggaaatgttctctcttctaagcttgaagaatttatgtagaattggtatttttttttctttaatgtttaatgaaatttgataatgaaactgtctagacctggagttttctttcatatacatatgactaatcaggttactttcttgagtgactttttggtagtttatatctgtcaaaataatttgtccatttcatctgtgctggcagatttatgagcttan

SEQ ID NO: 89512 - DNA, 5716 bp, Homo sapiens
tgcgaccgccacccccttccccgctgccagcactcaccctctctccgctcctgctcgcaacctcgcggttcctggggtgcttgtgcccactgtgtggacagcgcgggcggacttttgggccggggcgtggcgtgcgggggaggctctctaaggcctccgcctctgcctctcccgcccccttacccgccccggagacgacagcgtcggaggctccgccatggcctcgggagccggaggagtcggagggggcggtggcggcaagatccggacgcggcgttgccaccaggggccaattaagccttaccagcaggggcgacaacagcatcagggcattcttagcagggttacagaatctgttaagaatattgtgccagggtggctacaaagatacttcaacaagaatgaagatgtatgcagctgttcaacagacacaagcgaggttccacgctggccagaaaataaagaggaccatctggtatatgccgatgaggagagctctaatattactgatgggagaatcacacctgagccagcagtcagtaatacagaagaaccttcaacaactagtactgcttcaaccttatccagatgtgttaacaagggtttctctttatcggagccatctgaatttttccatgttggaatcccctgcattacactgtcagccatctacatcctcggcattcccaattggcagttcgggattttcccttgtaaaggaaattaaagattctacctctcagcatgatgatgataacatctcaactaccagtggtttttcttcaagagcttctgataaagatataactgtttcaaagaacacttcattgccacctctgtggtccccagaagctgaacgttctcactcactctcacagcacactgccaccagctcaaaaaaaccagcattcaacttgtctgcctttggaacactttccccttcacttgggaattcttcaatccttaaaaccagtcagcttggagattctcctttttatcctggaaaaacaacatacggtggggcagcagctgctgtaagacagtctaaactacgaaatacaccttatcaggcaccagttagaagacaaatgaaagctaagcaactcagtgcacaatcttacggtgtgaccagttcaacagctcggcgaatattgcagtctttagagaagatgtcaagccctttagcggatgcaaaaagaattccatccattgtttcttctcctctgaattctcctcttgataggagtgggatagatatcacagattttcaggccaaaagagaaaaggtggattctcaatatcctcctgttcagagacttatgaccccaaagccagtttccatagcaacaaatcgaagtgtttattttaaaccatctctgactccttctggtgaattcaggaagactaatcaaagaatagataagaagtgcagtactggatatgaaaaaaatatgacacccggacaaaatagagaacaacgagaaagtggcttttcatatccaaatttcagtttgcctgcagccaatggtttatcttctggagtaggtggtggaggtggcaagatgagacgagaaagacacgcctttgttgcttctaaacctctggaggaggaggaaatggaagttccagtattaccgaaaatctctctaccgatcaccagttcttcactgcctacctttaattttagttcccctgagatcacaacttcctctccatcacccatcaattcgtctcaagcattaacaaacaaggtacaaatgacctctccgagcagcactggcagtcccatgtttaaattttcatctccaatcgtaaaatctactgaggcaaatgtactacctccatcatctattggatttacatttagtgtgcctgttgcaaaaacagcagaactttctggttctagtagtactttagaaccaattataagtagttcagctcatcatgtcactacagtgaacagtacaaattgtaagaagacaccacctgaagattgtgagggtccttttagacctgcagaaatcctgaaagaaggaagtgttctagatattctgaaaagccctggtttcgcatcgccgaagatagattctgttgctgctcagcccaccgcaacaagcccagtagtttatacaagaccagcaataagtagcttttcttctagtggaattgggtttggggagagtttaaaagctgggtcatcatggcagtgtgatacatgtctactccagaacaaagttacagacaacaaatgcatagcctgtcaagcagcaaaattgtcacccagagatactgctaaacagactggaattgaaacaccaaataaaagtggcaaaacaactctttctgcatcagggacaggctttggagacaaatttaaaccagtgataggcacttgggattgtgatacctgtttagtgcaaaataaacctgaagcaataaaatgtgtagcctgtgaaacaccgaaacctggaacttgtgtgaagcgagcccttacattgacagtggtttcggaaagtgctgagactatgactgcttcatcttccagctgcactgtaaccactggtaccttaggatttggagataaattcaaaaggcccattggatcttgggagtgttcagtatgctgtgtttctaataatgcagaagacaataagtgtgtgtcctgtatgtctgagaaaccaggaagttcagtacctacttcaagtagcagcactgtacctgtctctctgccttctggaggctctctaggattggaaaagttcaagaaacccgagggaatctgggactgtgaattgtgcctagtgcagaataaggcagactctaccaaatgtttggcatgtgaaagtgcaaagccaggcacaaaatctgggtttaaaggctttgacacatcttcctcatcttcgaactcagcagcctcctcatccttcaaatttggtgtctcatcatcctcttctgggccttctcagactttaacaagcactggaaattttaaatttggagatcagggaggattcaaaataggtgtgtcatctgattctgggtatataaaccccatgagtgaaggcttttaattttctaaacacatagtaggttttaaatttggagtttcatctgaatctaagcctgaagaagttaaaaaagatagtaagaatgataattttaagtttggactttcttttggtttaagcaacccagtttttttaactccattccaatttggggtatctaatcttggacaggaagaaaagaaagaggaattgctcaaatcttcatgtgcaggttttaggtttggtacaggtgttattaactccacccgtgttcctgctaacaccatagtgacttctgagaacaagagcagcttcaaccttggaaccatagaaaccaagagtgtttcagtggctcctttaaaatgtcagacatctgaagctaaaaaagaagaaatgcctgccaccaaaggaggattctcttttggcaacgtggagcctgcctctctgccatctgcctcagtgtttgttttgggaaggacagaagagaaacagcaagagcctgtcacttctacttccctagtttttggggaaggaaagctgacaatgaaggagccaaagtgttcaaccagtgttttcctttggggaatttcagaggcaaaccaaagatgagaattcttcaaagtccacatttagttttagtatgacaaaaccatctgagaaggaatctgaacagccagcaaaagccacttttgcctttggagctcaaactaatactacagctgatcaaggtgcagcaaagccagatcttagttacttgaacaacagttcctctagttcaagtacaccagccacttctgctggtggtgggcatatttggtagttccacctcttcctccaatccacctgtggctacctttgtgtttggacagtccagcaatcctgggagcagctctggcctttggtaacactgctgaatccagcacctctcagtctttgctattttctcaagatagcaaactagcaaccacatccagcacaggtacagctgtcaccccatttgtctttggtccaggagccagcagtaataatactaccacctctggtttcggctttggagccacaaccacatctagctctgcaggatcctcctttgtatttggaactggaccctcagcaccatctgccagtccagcatttggtgctaaccagaccccaacatttggacaaagtcaaggtgccagccagcccaatcccccaggctttggatctatatcatcttccacagcattatttcccactggttctcagcctgcaccacctacttttgggacagtgtcaagcagtagccagccccctgtgtttggacagcaacctagtcagtctgcatttggctctggaacaactcctaattctagttcggctttccagtttggcagcagcactacaaatttcaacttcacaaacaacagtccatcaggagtgttcacatttggtgcaaattctagcacacctgcagcctcagcccagccttcaggctcggggggctttccatttaaccagtctccagcagcatttacagtggggtcaaatgggaaaaatgtgttctcttcttctggaacttcattctctggtcgcaagataaagactgctgttagacgcaggaaataaaggtcacattggtgttgtactcaattttaacaacagctggtgccctgctttcagatactggattgtactttgtgctggggttatctgaagtcagatctgcctaaggacttctttaattttggaattttcctcctttctctttcgttacagaagccccaccctgcctcacccacccttttttaaataaataaatagctagactggtgactgattcttcagcaaaaatattttatgatccagcagattattcactgatttgacatagtctggctgtacccaggaatggagcctgcacggtgaatggctttgtatagaacctctttgtctacaccattatgtgcgctgataagcgttcatggaacgcgttgaaattgtaattatatctgaggaattctgtatagattagaattctgtatagattagagagtgttgaaacggatgatttctatgctgagtttgtgctggtgtatgtgtgaagtgagtgagttgggtgtattgtgcgctaaacttttctgatagaggaagcctgattaaagaatggtccgtgctaaggacttgttagatctagttcactctccatttaataattatatgctatttctatattttcattctcctatcacctgtcttgcctttttcattattttattatgaaacttgtgtaaatacaattttgtttctgtactttttggcataacataaatctgtgaacttgaaatttgaattttgtgttagagatttttttgttgtttgtttagtcttgtctcagattttattatgtaaatcccattattcaaagttgcctaaatccatttggaaatctttaaaaaaaaaattggggattcttaaagttgaatttattggcttttctgatccagttttgtttggaccaaaaaccagtattgtacaaagtattaagcatatatttttatatttactaaaatggactgtggtgactttggataataaggaaaagtttaatattaaagccatgtttattacagtataattaacatgttaacccatgggataaatgccatcaataaaaattattatgacat

SEQ ID NO: 89513 - DNA, 679 bp, Homo sapiens
cttagccaccggtctggaattcccggctcgacccacgcgcccggagcccgtgctctgaaggatctgtgtactccctcagcctggcgtccagagtcaggcccaactgggagagagaaacgcagacgaacctagcgctcgccctcaggaaggacccccgatgaggtccacatggggggaaatgaacagccgtcagccttcctagctcgtaagttgggagcctgctcactaacctgcctccccagggtctggctgctgcggctctccagatcaaaccttcccaagaacagggctgagcaaagccagcgctccattcttccaaagactgatctgtccccatcctttcccacaggggaagtccaagcagtgctgtgtgccagccagcactggcacacggtgggtctgaaggtcaattagccccgcccccaccgaggtcggagagctctcactcactgagccctgggcctgggtgcacagcggggactctgagacaggtgggctgctgagatcctcactgctgggctccccaaggaccatcagtcacacaaccatcctggggatatagctggaggtttacggggggttgcacccaaccacagagcacacgtccttttgccggcaaaggcacctttaaaacttacgccaagccagggcttagaaaagcccttggcacttgttagct

SEQ ID NO: 89514 - DNA, 398 bp, Homo sapiens
  misc_feature (1)...(398): n = a,t,c or g
ccagtaatgtggnatgcggttttatactttgagttattcaataaaatgggcagagaaaaatgaagagtacgtacgtagaggttttgctctaatttctcctccaccaataactctaatatggggtctgcaaggttagatgacccacgtagcaggccagctttcagcacaatatggacctatcatagagcccttttctgcattggccctcactcaaaactgtcagatatgatgccacccagtatataaaggagagcagcattcctaggtgtgaaatatgctgcctttataacccaaagaggcctgtcaggcattgtgctttcttcttcatagtggaacatacaggttgtaaataacttgtctcttactttagaggggatgtcttaacatgccccacatca

SEQ ID NO: 89515 - DNA, 2739 bp, Homo sapiens
  misc_feature (1)...(2739): n = a,t,c or g
caccgctccgtgaattcccgggtcgacgatttcgtgggtttaagggccaggaaaggaagcattcagggaatttaggtgtagccagaagaaaatcaggtcctggctccccagaagcaagagagttcaagtgaaggaaggaggaggttcctggatgtggatgtcatcatttctgggaacactcttaaatggagactcagatttcttagccaaaatttagggaggatccagaagaaaccaaagacgaagcatcccagttcttgggtatttcctgaaacagaagaaaatgacaaaggcccaggaatcactgaccctggaggatgtggctgtggacttcacctgggaggagtggcagttcctgagccctgctcagaaggacctgtaccgggatgtgatgttggagaactacagcaaccttgtgtcagtggggtatcaagccggcaaacctgatgccctcaccaagttggaacaaggagaaccactatggacactagaagatgaaatccacagtccagcccacccagaaattgagaaagctgatgatcatctgcagcagcccttgcaaaaccaaaaaatactgaagaggacgggacaacgctatgaacacggaagaactttgaaatcatatttaggtttaaccaaccagagcagaagatacaacagaaaggagcctgctgagtttaatggagatggagcttttctccatgataatcatgaacaaatgcctacggaaattgaattccctgaaagtagaaaacccatcagcaccaagtcacaattccttaaacatcagcaaacacacaacatagagaaagcccatgaatgcactgactgtgggaaagctttcctcaagaagtctcagctcactgagcataagagaattcatacaggaaagaaaccccacgtgtgtagcttgtgtgggaaagccttctacaagaagtacaggctcactgaacacgagagagctcacagaggagagaaaccccacgggtgtagcttgtgtgggaaagccttctacaagaggtacaggctcactgaacacgagagagctcacaaaggagagaaaccatacgggtgcagtgaatgtgggaaagccttccccaggaaatctgagcttactgaacatcaaaggattcacacgggaattaagccccatcaatgcagcgaatgtgggagagctttctccagaaaatcactactcgttgtacatcagcgaactcatacaggagagaagcctcatacatgcagtgaatgtggaaaaggcttcattcagaagggcaatctcaacatacatcaacgaactcacactggagagaaaccttatggatgcattgactgtggcaaggccttcagccagaagtcttgccttgtagcacatcagagatatcatacaggaaagactccctttgtatgtcctgaatgtgggcaaccctgttcacagaagtcaggactcattagacatcagaaaattcactcaggagagaaaccctataaatgcagtgactgtgggaaagccttccttacaaagacaatgctcattgtacatcacagaactcacacgggagagagaccctatggctgtgatgagtgtgagaaagcttacttctatatgtcttgccttgttaaacataagagaatacactcaagggagaaacggggggattcagtgaaggtggaaaatccttccacagcaagtcacagcttaagtcctagtgaacatgtgcaggggaaaagccctgttaatatggtaactgtggcaatggtggcagggcagtgtgagtttgcccacatcctgcattcatgataaacagtttgctgtttgatcatatagcctccagcggaatgctgagtttgtcatgtcccatgggcctttggctccctgcactaatatgtatagtagggtttacaagatatgaaatatattttacttttttatatcttataaacctcactacccctcccacaatattgtttttcatttactatcttgatcatagagtttggctggggaggggggcagttttagaggcttccacttggtgttcctcgagaatgatatctcttactccgggggccaaggtaggggttagcttttgttctctttgtagtttaaaatggatctcctgccctgttcaagttcccaaatctttttgtgtatacccatatgtacatgaaaatgatgttcatgctttttattattttacccttcattatttcattttttatagttctcatagctatgtctttcagttcactaatcttttttccacagtgtttaatctgtcattaatcccatccaaagtatgttttctctcagaaattgtaatttttaacctctaataatttgacatgggtttttccctgttatatctttcatatctttatttatcatgggtttacttttaacctatttatgctttcatatttaaagggggtgtttagtgggcaacatacagttgggccttccttttttatccagctaacaatctctgtctttttactggggtatttagatcatttacgttcaatgtattgatgtttttaggtttaaattactaacttactatttgttgtttattctatgtcttctttgttctccttttcttctttttctgctttcccttagagtagctgagtgtgtttatattacatattgtctcctttgttggcttattaactgtaaatccttggnaattggntccttgagattttatagcatacatcattgtnagggattgcata

SEQ ID NO: 89516 - DNA, 650 bp, Homo sapiens
cccacgcgtccgcagctgaaacccagggagagataatgccctaagtatagcagttaagtgataaagattttgattcctaaagtggcgagccccaagcctcaaagtggcagaagcagcttaagacagcacatagaaatgagaagaacctcctggagctatgaagttacctttgggtactgaggaagccacgtaatgcacattccaaaggacagatacttacaattggtgacagttgactgcagatcacacaaagcaccataatgtactgaaacagttaccagcacctcccccatcatgaaatccaaagatcctttcaaaattgtgaactgttatctctgtgatgttgtccactcctggacactcctgtatagtactctcctttggctttgctgacctgccatacactgtccagacttgcctccctgatctggccctttgaagactgcatttctcttcttaactccttcacgcattggttcaatttttacttcccgagaggtggacggacgacacccctttgaagccaaatatgcggagtaccctaggggaaaggatcctagaaataaccccctaaaaaatttcggtcctgatggaaacagggaaaaaaggccatcgcccctggggggacgaccgcccctccctgggggacc

SEQ ID NO: 89517 - DNA, 937 bp, Homo sapiens
cggacgcgtgggttgaaagacagagttatgcacatgtgaataaatacatttcgtgaggatttctttatcactgattctgatcataaaatccagtgggatgtttccatttttacctgagatgataggcacgttttacactctttagtatttaagaataaataataccatgtggggggaaaagaagatgcagtgtctcttgagcttgcttaatagatgcacattattttttaaaagtttcatttttttcctatgcaaactgtgttaattagaatgtaatttaaaagccatatatcaatacaacacagtaaatttgaattagaattattgctcctgtcttctttgtaattccccaacattggtcccaaaaatgtttttcacttaaggttatttaggagttgtttctatacaaaagtactgctgtttttgctcagtgcttatggattttgcttttgatttacaaatatatatatatatatatacacacacatacacacacgctcatatgtatgagttcttttttacggtggccgcacatagtgagagttgctcccgccccactggccatgcaccgacacctgaagaggatagctcgggaggactatgggtgcaccgcgtctttgttagatgctgccatcctacgacatcggcccgtctttgttagcctctggtgtcgcccgccgtttccgaccaacctcaaatccgccagtgtgcctacatgggggtcaaggccacaagacagggcgctctgcgtcgacgtcgccactctacaagcacctgagcttgtcgaatctcacgctgccctcccgcgtcctcggcgtgtccatcgcccctcctcctcctggcacccctatctacacaacccaacctctttccccgtctgcttgtctctcgatcatatagccgctcacgcacgttctccatatcgatcacgtcacgg

SEQ ID NO: 89518 - DNA, 401 bp, Homo sapiens
cggacgcgtgggcggacgcgtggggaaagaaattgaatttgtagtttcaaaaatctttcaacaaagaaaacttaaggtctagatggtggccttactagtaaattatagcaaacatttaaggaggaaataataccaattatacacacagtctttcagaaaatgggaggaagcacttaccagctcgttttatgaagccagcattatactaatatcaaaaccaaataaagacatgagaagcatagaaagttacagccccagtatccatcatgaacatagatgtaaaaatattctataaaacttaagcaagtttaagtcaagagatatataaaaagaataatacatcatgaacaaatggggttcacttgaaaatcagtgcagtccactatattagtagactaaaa

SEQ ID NO: 89519 - DNA, 885 bp, Homo sapiens
tcattacgccatgcttggcacgaggcatcaacccaactcaggctggaaatgagcatttcttcctctggactcctgtaacccttcatctcttctcccttccttgaattatggggatttcatgcatacctttccccttttcttgcctgtattccaaccatcttttcctccttctattcttagtattgccttttccacataacagtctcataaatggctagatggtttgtggggtgcagaagcagggagactaggtgtatatagagctagttcagacaagctggggtaggggcccgagctgtggcagcagtgaggaaagggggattgcagagatggagccatgaccaagctttgcataaatgaggaaagcacagtgacatggaagtgctgtgtgtcagcagaagaataccatggagatttgagtgctatttcctcacagctgcatgtgccaccagaataaagtgtacccactggattgtggcggattacttaagtatcaccatgatcacataaatcaccatggagctttcgaagcacaaaaagaatgcctttcataggaaattgttatttgaaggagttggctgctgagtgttagaaatcatctagggttagaaatcatcctcagtaacagagggcaggtgagctacaaattgactagaagaaacatggcccctgtcatccctgggcagggacacatgcatagctatttttaagaatacgttaaactgattttggtaaactgcagggcctgggatcttcccggaaacaatgggggcccagggccaggggggccatcctgccaactggttaaatgggggctccctccttggcctttctggaacacttttaaggggctgcggtggcctcgcttggctgaccccttgttcg

SEQ ID NO: 89520 - DNA, 1623 bp, Homo sapiens
gggatctagcgaggatgccccctacaaattccccacatcacgtaggccaggagcctcagcggtgccccttcaggctcatctcggcaagacggtaccagcttgctcagaacaggggctggctattcatcatctcagagcatagagaccctctccttgccacccggcccttcccacctggttggtgacaaatcacaaggtggtagaagttgccagggacagataacatcggcagccagcgggaagaccagcaagtccgaaccgaaccatgttatcttcaagaagatctcccgggacaaatcggtgacccatctacctggggaacagagactacaatagaccatgtcaggccaagtccagcctgtggatggtgtcgtgttggttgatcctgatcttgtgaagggaaagaaagtgtatgtcactctgacctgcgccttccgctatggccaagaggacattgacgtgatcggcttgaccttccgcagggacctgtacttctcccgggtccaggtgtatcctcctgtgggggccgcgagcacccccacaaaactgcaagagagcctgcttaaaaagctggggagcaacacgtacccctttctcctgacgtttcctgactacttgccctgttcagtgatgttgcagccagctccacaagattcagggaagtcctgtggggttgactttgaggtcaaagcattcgccacagacagcaccgatgccgaagaggacaaaatccccaagaagagctccgtgcgattactgatccgcaaagtacagcatgccccacttgagatgggtccccagccccgagctgaggcggcctggcagttcttcatgttttgacaagcccctgcaccttgcggtctctctcaacaaaagagatctatttcccatggggagccccatccctgtgcccgtgtctgtcccccaataacacagagaagcccgtgaagaagattaaagcattccgtggaacaggtggccaatgtggttctctactcggagtgattatttacgtcaagcccgtggctatggaggaagcgcaagaaaaagtgccaccaaacagcacttggaccaaggcggttgacgctgcttgccttggttggttaacaatcgagaaaggagaggcattgccctggatgggaaaatcaagcacgaggacacaaaccttgcctccagcaccatcattaaggagggcatagaccggaaacgttcctgggaaatcctggtgtcttacccagatcaaaggtgaagctccacagtgtcaggctttcttgggagagcctcaccttcccagtgaagtcgcccaacttgaaggtcccaattccgcctcaatgcaccctcagccctgaggacccagcctaaggaaagttatcaggatgcaaatttagtttttggaggagtttgctcgcccataaatcttgaaagatgcaggagaagcttgaggaggggaagagagaccaagaatgacattgatgagtgaagatgtcggctcaggatgccggaaaatgacctgtagttaccagtgcaacgagcaaagccccacagtttagtcctttggagttatgctgcgtatgaaaggatgagtcttcttccgagaaataaagcttgtttgttctcccctgg

SEQ ID NO: 89521 - DNA, 2934 bp, Homo sapiens; identical to SEQ ID NO: 61392

SEQ ID NO: 89522 - DNA, 2829 bp, Homo sapiens; identical to SEQ ID NO: 61650

SEQ ID NO: 89523 - DNA, 2268 bp, Homo sapiens; identical to SEQ ID NO: 61654
  misc_feature (1)...(2268): n = a,t,c or g

SEQ ID NO: 89524 - DNA, 3378 bp, Homo sapiens
taaaagcgtagcatatatatatatgcttgatttttgttcttcctgatcccctgcacctgatagtctctttatggtaatattttcacattcttttttgttgttgttgtttttgagacggagtctcgctctgtcgcccaggctggagtgcagtggtgcgatctcggctcactgcaagctccgcctcccaggttcacgccattctcctgcctcagcctcccaagtagctgggactacaggcgcctgccaccgcgcccggctaattttttgtatttttagtagagacggggtttcaccgtgttagccaggatggtttcgatctcctgacctcgtgatccgcccgccttggcctcccaaagtgctgggattacaggcgtgagccaccgcgcccggccggccctattattttatttttttttttatttttttttttttctttgagacggagtctcgctctgtcgcccaggctggagtgcagtggcgcgatctcggctcactgcaagctccgcctcccgggttcacgccattctcctgcctcagcctcccaagtagctgggactacaggcgcccgccactacgcccggctaattttttgtatttttagtagagacggggtttcaccgttttagccgggatggtctcgatctcctgacctcgtgatccgcccgcctcggcctcccaaagtgctgggattacaggcgtgagccaccgcgcccggcctatttttagttttaaacaaaaaagtttaagaagtaaaaaaaaaacatgttttgttgtcgttttctttgagagggagtttagcattgatgcccatgctggagtgcagtgacacgatctcggctcactgcaatctccgcctcctgggctcaagcgattctcctgcctcagcctcctgagtagctaggattacaggctcctgccaccacaccccacacattttttgtatttttagtagagaacgggaattcgccatgttggccaggctggtcttgaactcctgatctcaggtgatccgcccgcctcggcctccctaagtgttgggactacaggcgtgagccaccatgcctggccccaaccagaacacttctgagcgtggaagaggatgctgttaattactcaagaccaaaaggcataaaaggagacatatgtccacccaagtgataaggcagtttgggaaactacatttcccagtatgccctgccccttgaaagttaaaaatcttaactggcacagagcaccctgggacacctgtggttagcaccatttaagaagtaaaaggtatagggttgggttctgacgtgaaggctttccccttccatgggacacttaaccagacacaggacacaacacctgaggtgaaatttcaatgggtattaagtctggggtagagcttctctctccccaaatctagcttccaaagatgtggagctggtggagctgtccattggtccactgccctgtttctcctgggtgctgcctctgcctcctcatatcaccagcgtccccactgccactagtctgtagggggattccgggctaggtgctcttcccactcgacttcaaccaacttatatagctccatggtggcctgggcatcttccacagaggaatgtccgctcttcccaacctggatatcccggtttagcagcttcttggtgagatgcttcagagacatggtggcattctccgggcagtcagccttccggttgaggggggggatatgggaggtgtcacgggtgagggacttggggtgaaagtactgaagggctttgaagtcgttgtggatggcatgccccaccactatcttccctgtgagtatcttcaagatctctccatccttgaaatgctcactcccacaagttttctttcttctggaatccaccttcctcttccacaggtgatttccatggtataccctgtttggactcatactgccagtggctccttaccttcttattgatctccaccccatgacattaatttgccttcagtcctaaatgacactcatgtttgagatgtccatgtatttagttcagttctggcttgctacatgaagtcctttaactattaccattatgttggccttagacacatggctgggacccgggctccagggaggctaacaaaagcccaaaattacatgcaattagatgtgtatgggtactagaggaagagaatctgtggctttcatcaaattctcagagtctacaaaccgtaaaaaattaagaatcacatataaactaaagttgcagaagcaaccttattcacactagttttggaaccaagtaaaataaaaataacttctcaatatttcaggaaactgttttttttttttgagacggagtctcgctctgtcgcccaggctggagtgcagtggcgggatctcggctcactgcaacaagctccgcctcactgcaagctccgcctcccgggttcacgccattctcctgcctcagcctcccgagtagctgggactacaggcgcccgctaccacgcccggctaattttttgtatttttagtagagacggggtttcaccgtgttagccaggatggtctcgatctcctgacctcgtgatccgcccgcctcggcctcccaaagtgctgggattacaggcgtgagccaccgcgcccggctgcaaataatctttctttttttctttttttctgagacagagtctcgctctgtcacccaggctggagtgcagtggcacgatctcggctcactgcaagctccgcctcccgggttcacgccattctcctgcctcagcttcccgagtagctgggactacaggggcccgccaccacgcccggctaattttttgtatttttagtagagacggggtttcactgtgttagccaggatggtctcgatctcctgacctcaggtgatctgcccgcctcggcctcccaaagtgctgggattacaggcgtgagccaccgcgcctggcctttttgagacggagtcttgctctgtcgcccaggctggggtgcagtggcacaatctcagcttactgcaagctccgcctcccgggttcacgccattctcctgcctcagcctcctgagtagctgggactacaggcgcccgccaccatgcccggctaattttttgtattttcagtagaggcggggtttcaccatgttagccaggatggtctcgatctcctgacctcgtgatccgcccgccccgggcctcccaaagtgctgggattacaggcgtgagccaccgcgcccggccctattttttgaaatcatatccatcttaaactcattgaatattcaaatatgaggcttggaaaacccacagcacagctggggcatgaaaatgggcttgttagacaagctgattcaactaggggggaaaaaagaggagggaagaagg

SEQ ID NO: 89525 - DNA, 1424 bp, Homo sapiens
tttcgtgacggtttcagcctccggtgcggctgcaatgctgagctcccgggccgaggcggcgatgacgcggccgacagggccatccagcgcttcctgcggaccggggcggccgtcagatataaagtcatgaagaactggggagttataggtggaattgctgctgctcttgcagcaggaatatatgttatttggggtcccattacagaaagaaagaagcgtagaaaagggcttgtgcctggccttgttaatttagggaacacctgcttcatgaactccctgctacaaggcctgtctgcctgtcctgctttcatcaggtggctggaagagttcacctcccagtactccagggatcagaaggagcccccctcacaccagtatttatccttaacactcttgcaccttctgaaagccttgtcctgccaagaagttactgatgatgaggtcttacatgcaagctgcttgttggatgtcttaagaatgtacagatggcagatctcatcatttgaagaacaggatgctcacgaattattccatgtcattacctcgtcattggaagatgagcgagaccgccagcctcgggtcacacatttgtttgatgtgcattccctggagcagcagtcagaaataactcccaaaacaaattacctgccgcacaagagggtcacctcaccccacatccaatcactggaagtctcaacatccttttcatggaagactcactagtaatatggtctgcaaacactgtgaacaccagagtcctgttcgatttgatacctttgatagcctttcactaagtattccagccgccacatggggtcacccattgaccctggaccactgccttcaccacttcatctcatcagaatcagtgcgggatgttgtgtgtgacaactgtacaaagattgaagccaagggaacgttgaacggggaaaaggtggaacaccagaggaccacttttgttaaacagttaaaactagggaagctccctcagtgtctctgcatccacctacagcggctgagctggtccagccacggcacgcctctgaagcggcatgagcacgtgcagttcaatgagttcctgatgatggacatttacaagtaccacctccttggacataaacctagtcaacacaaccctaaactgaacaagaacccagggcctacactggagctgcaggatgggccgggagcccccacaccaggtctgaatcagccaggggcccccaaaacacagatttttatgaatggcgcctgctccccatctttattgccaacgctgtcagcgccgatgcccttccctctcccagttgttcccgactacagctcctccacatacctcttccggctgatgggcagttgtcgtccaccatgggagacatggcactctgggacactttgttcatttaccgacggtccccaccttc

SEQ ID NO: 89526 - DNA, 4505 bp, Homo sapiens
ttttttttttttactgaagcagaagttgctttaatcaaggggtgaagtcctcaatcaaggggacctcacttaaccgtttggtgggtggggtctcagcctacgccccacaagccctgaggccccctcaagaaggagggagcagttgagcaacaaattatggcaaaaggcccagggaaatgggagtgggggaacccgggtccaaggtgaaaggggcaggacgctgaaagggtgggagtgaagctgaacggggccaggaagagcttaacccacgttttctaactggggggctggctgaggtggctgtgcatcgggcagagcgggcaccaagagggctgagaggtcgaaggggacagcaggggaaaggagtgcttaggagatgaggcgactgtgaagctggtgcagctgctcctgggtcagcaccagccggtgtcgctgtccaaaaccagccgcacatgagaaggtcactttgcccatgtagactgtgtcatcctgctgctcctccttggccctgaggaaggctgatgaagggaaggtggcaaagtcagtgggtactgtggctccagggcgctgagatactgtctccttgaggacctcatccttgagcttctcgacggtgtcactcagggacttaagctgagccacttgctccataagttgggccgacgggctcttggcagcagggctggtgcgagtgatgtctactacgtgcgtgtgtgtgctcaattgattcaatgtctccagcagctggctggtcttacgatacagcgctccagctggtaactcactgccagggccctcatgggatagctttgcaacatgcagagggggcagggatgccaaggatgccttcatctgggctcccttgaggatgctgttctcatgctggagctgggagatgtgcagcctcatggcagagatctgctgaagcagcagtggtgagtccttcaccagccctgggcctggcacagaccctggagcctgcccagggatggctcctcgctgctgttcttcaccagcaatgccagagaccagagtagcaatgcctgaaggaggagggccccggagtccctcaatcgtgcgtttggactggctgttcagacgctgctttagttctgccttctctgcctccagctggtcgatgtcagcctggagtgcatccattgtctcctcaaactctttctccttctttcgcagcagtgcctgggtctcctccagccgagtctggactttctcgatgcgctcatctgcatccttggcagcactgtccaacttcttctccaggagggtcagccgcacattggcctcacttagctcctctcccttaatcttgagtgacttcttcaactccttaataactgtctctcgatcttcgagcttcaaacccaggccttcagcatctgtgatctctgcacgaagggcagcagcccgcagttcaaccggggggaggcttgctggggggccgctctgcatcatactccccctcctgcatggctgtgaccaactttgttcatggtactgatgaggatgttgcatgactggcgcagacactcataggggctgctggagggggtcccatagatctgctcgcttgctttgaaagccagttcctccagagcagccacaagtagcccctcattctctgccagtggggcaatgagctgggcagcagcagctgccacctcctgcagcacagccacgacccacgtcaagtgtttcctgcagtctaggagcgtgtcagatacctgtggtccaaaggccagtgcagctgggatcccaggagcatctgtccctggcattcgccttcggatcttcttgcagaactggcggatgtgcactgcatgaagtttccagatcccggagcaggagggcaatatctgtagcctcctgcccaccctgcaagaaggcacgcagccgtcctacctccacactcatgcagtccagagcactctgcgtgaacttaatgtggtcagccagctgcatagtacagtcctcaggctgttcggcaaggtggatgctgtacagatgctgatagtacttgatggccttggtgagaggctccacattgacagtctcatccagctgatccttgtgcagcagttcaatgaggaaatccaaggagcgctcatgggcactcatctcagggtacaggctgcccactttcttatacacaatccaacctgcactgagagagggcatggcatcaatagcggtggtagcggtggcctgcagcaggcatcagcgaggtacaccagtcctatggctgcaaagctgagttgctccccagcagctcctcgcagcccaggccgctctgaacagttctcacttagttcaaacttctcctgggcctgcttccggatcagctctgccttgcaaatgagacgaggcatgagcaacagcaccagaacgcagtcatggtccccacctggccgaaggaagctgtcaggcatgaaggctgtcagcagggacatgtgtcgattggcctgggccacctccatctgcctcaattccatctcaattgccttggcatgggccttagtctcagcaaacttgattttgaagtcaaaggtctctggaggtggctgctgttgcctctccacagatgcttcctgctggtttgtcagttcccgattcacatcctgtagatgggcggtcagctggcggtacttcttgatggtctgctggtagtctgcaaccgtctcctgggctgcctccacacgcttctgggcctcacgaacccgcgcgcctgccatgtccagctgctcccgcagctccagttctgtctcacgtgcattctcctgcagctcatcgttcatctcattcatcgcttccaagtctcccacagtctccctcaactcgcgcactttctcttccagattcaggttccgatctgtcagcatctccaccatctcctcagcacccagagcagcatcgacctgctccttgagctcatcaatggtgctctctgcctggcttagctcctcctgcagacgctcccgctgttgcctcacaacttccagctcttggttcttcttttccatgagcttctggagctttaacatgctcctgcttctctgaggaagaaagatcccgcatcctcaccagggcatccttcaggcgggcattctgctcctcaagctgcttgagctgataactggatgcagcgccatctgagcccttctcttcaatctcagccttgaggatctctaagtcagtagtgagctcgtccacccgctccttcagtgcctccacctcctgctgcagggactcagcccgctcttcagccatctccttgtccaaagtggccatctcaatggcatcagcagtatcagccatctcctccatatagcgttcctttgcctccagcgcctccttggcttcctttctcgcctccttgaggcgccgctgcaggtcggcctgctgctcctgcattttgctcttccattcctgcacctgctccagctggattttgtgtttctccagctcttttagctttgctttgtcttctgcccgtttcagtctcagggtctctagtttctcctccaggtcccgcacctgagcccttagtccctcctcctccttggatggggaaggaagcggggggactgctccaggagaggtgaggaccggcgtggggatgatgggtgctgccagcggagtctgagccggggtgctgggctcactgctgctcagctcacctgctgacgctgagccagaggggcccagggagctactggccccagccaccccagtactggctgggcgcgtgggcttgggtcgccgagttgtggtctttcgggctgtcggtgccttcttaggcttcagtccccgcagtttgctagtctttgcagttgtatcagttccctctcttttgaggacttttgaagcagaagaatcaggtgtctctggggaagtagtatctgctccatcttcaaatacctggatctgggactggcgcacaaagatgccatgcccttcatcacaagtgaagtacttcctgccttgaacagttccatcatttttgccctttgcttcatccagaatcacgcctacccatttgccagtggcaaacagtgtggctccaacataggccacagtgcctcggtggccttttccaatcacctctacacgggagcccacccgcagaggccgggcgcttgcctccgcactcatcctgctgccgctgggcgtccggctgtacacgtgcctcttgctctgtgccatgttgctcacccggcctctaccccctcccccagctggccaaagacagagagaaaaggtagaaacctaggcaggagggtcagggcgctgggccctcatagagggacacaggagtcgtcaggcacagccctccccagtccatgggcctcactcggtggcctacacgggtaggggtgggggcagtgatgggggctgaggagcaagtcccctctgctgcctgaggattcctgaacccagagacacagaatcctgcttgccagctgatgagtctcactctgcgctagtgc

SEQ ID NO: 89527 - DNA, 6207 bp, Homo sapiens
ttttttttttttaactgatgttttaaatttaagtcatttattttacaaacagagactacctattatacttaagacattgggttagatctttgccaaagacatggtttagtcatacctaatgtaatccattttttaactttccatattaatttaatttttaattcatttttctttatgcttgcttcaggggctacatctgggactgaatagcagcatatggcccaagggctggtgggttttgccactcatgctctatacttttagtcttttccagagttgagtatagcagtcacgtatcgttaatacagggtgtcactattttattacctggcagagaaacaggattaacttcctttatttaatactgataaatagaaaggctttttcaagaaaaaaaaagaaagcttacatttacaaaagtgatttatggtaatatgtgccattaacaaagacaaatactgaaatccacacaaaatcagaattaacttctacaactaaaaaaaaattacagggtaataaaactgtaggaaaagctgtatgtaaaaagaaaaaaagacaagtccctatgtagctaattacaagagaatattgtaaatacattcaaaaaagttttccaaaaatcctgcagcctcatctagaaactgatacatgttaagattcttgatctataccaaattataatgttaaaggaaatcatgaaaactgaggtatatatttgatgcattagaaactatcatttgaacactatttaaatagtttaattataaggtctaatttcaagttaaagtctgtaaacggagattagtttggattatatgacacaggagacaataaaacatgttctcaaagacatgccaatacattttcttgaaacaaaacctcagcaaatgagaattttcatactgtgcatgggaataactaaaacctttattagatatgattttccattaacaataatgtgaaaattagaattatgaattcaaaaagcagtgaagtctgaaaatttaaaaagtagactaggtattaggggattaaaggtaaaggaagacgagaatgtttctttaatactattcattatttcccctctgtacacaatgttgcatatatacaactacttcatttttattgactttatataatagtgaaatccctttaagcaacctagggtatacagttggtgtccaactttcaggggattttcgggggggagtagaaacacttgattaacagttttcacccacacacgttagacaatttttttctttttttgccaagattttagtagtaaattcataaatataggaaatactttcactccttcagtgttaaaatagaaaaccaaacagtgccaacagtagtggcttaattattggtatacaagaaaaacacaacaacaatgggttttcttaattacgcattttaaatatcaatatgtgcatttgtttttacagttataaatttttttctcacctgttttagacaacagcttgtaatagttttgaatccattaagatgttgctttcaatttgaaatattttgtgtatacatgtatataaaaaataacccaatgtatgactcatctgaccgatgtttaagatcaataacggcttatttttcaacatgcagttaggaagagagggaagcaagccaacctctctacagtatctttttgctggcttgtttttgtagtggtatcaatagtggtttttggagggaaccatgtgccttcagcctatctagtcaagatcagataccacgatcaacaagagcggtagaagagatggggaaaggggagtgggtaagtgttaaatatcaattttgtaaagtgtgcattttgtactccttctaggcacaggattaaaaacaggccaatgaggaaaaatttgttataattaggaaaaaactgcaatcaaatcaagacataatagccgaattaagttcttttaatagattgcatatatagatgtttagccatactcttagatcaactctttaagagcagaactttatatccaatttacatgctctagataccaccttttttattttttacagtaaggtctggtattcaaatacccacttgtacactgacagctttaagaaaaacaggacacagagggagttgtcatttttagcagcaatgaaataccactaacccctttttacataccgaattcaagtcactatcagaggtgagtgcaccacaaagtcaccaggtacaaaattgctagttcatttttaaattaataacttgaaattaccccctgccccccaccccatttacatctttttataaacagcaaacattttgctatttttaataccatagggctaggcaggcttgtttcaatatgaaagtgctaattcatttacagatttttataatcagttatgtagtgctacaataaatgtccaataatctacataggaacaatgatgaaaatgatgaagactgaataaggctatcagatgaccttatcttatttacatataaagaatagatacccaatggtgaggaagagacagaaattggacaaatactcataggtgtaaaaattacatctacctttgagttttatactgtaaatgagacattttaaatagtcctgtagcccatgcctattttttcctcagaaaaagaaaagctgccttcatgacatcccctcgtttcagatttccacagtgtcactttgaagcttcagagtcaggatcttactttcttcaaaaaataaagaaaatactcccctcctaaggtacctcccatccccccccacccccaaaatcccgctgatttcttttccagtgccaggttgcatgatcaggtcccatctcctggggttgttgtttcttttgtccatctattgattattagtttagaatagataacatgaaccagttctggaaccactactaggaggaacacaagctcttcactacaagcacacagcaggaaagaaagagataactcaattcatccctggtgctgggcctccaaaattgaaagaacttggcacaactgggagcactgaatttgtatcctccatgcttctcaatcattttggattcatgggctgctcttctttgatcagccagagttgctatgtcctgtaactgttttctttgttcttcattaagaccgtgagtcagtgcctgataccacacaggattacgattttgaatagtttgaaagatagctttaaatatctgatactcatcaacagggttatcttcatcatcaatgattgtggaatagccttccagagcagtctcttcagcatcatcttcttcccaatcttcatcatctccatcttcaccagcctgcttagccagaatctccaaatattcttgcccatcttcatcaatatcatcttcatcactccccagttcctcggtttcatcatcatcttcagcttcatcatcatcatcactgtcattctcatgttctgcatggcaggcatatgctcttttcaatccgttaaataaaaggataaaagctggcaaaatctgtccagaaacctgatttaaaccttggggtatctgttccatatcaataagagcacagagactgagaacacacatccttctgtcatgaagccccaagaaacagtcaacatcattaagccactaataaaatgatttgtaactggttcaacattattagggaagtgaagattttctaaggtatttagtaataggtatgcattataatgtaaagctgcaattgcaacttgcagacccatagttcaaagttcacttgtcttaacctctcttgtcagtctttctaaggctgcttccacgaataagggaatgcactggtcaatgccacgccctttgcactgcagaatgatgacctctaacaattttgctgcatgacactctgcatcttctcctgcaactcctgtaagaacctttttgcacatactgtatatcatttcaagatacttggtgtcagacagaagtgtgtctgtatcaactgttacataattatgaaggaggggcatcatatctgtaaagtaatcaaagccatcttgctgaaagacttcaaatacaaggggtagtagctgccacatctgtggagacacttgttgacatgtcaaactgtgcgctaaagagaagatctcctcatagaattctaagacatgctgttgtaaaacagtaccaatgacctgtaagcagattccctcaagctgttgggttatctctttatgatcttcaactacactaagaagtgtatcaattgtattcagaattcccatagcagtaactgctttgtcatcactaccttcttcatctggccccgtctggattacttggttaaatgtcattgccaaatgttgtgtcatttctactgcaataggagtaacttcttcactatattcacagatcattttctgaattacattggtaaggtcatcattttctgtttctcttataatgtgaagaagagcctgcattacaggtctgatgaatggtgtgatatattctttagctttttcttgattgctgatcaatacttgaagggcaatggcagcttccactttcacaggcatttctctatcatcaatcagacatcttcttgttagctctaaggctgtttgaaggttctgatcacttttgaacttcacttcacaaaaatagtgaagtacccagcaagcccttgctctcatgtaggcctagttcactgctggaagagaggggaatacatggattctggcaacatgtattccatctgatctttataggatctttttcttcagaagtatttcagctaaagagccaatcatatgcagggctccatctttttttcgagggtcagcatttggttctgtaagaatctggtaacaaaatcccatagtcttttgcagtacctctttcctcttactacaggctgtaaacaaaagtgtctgggcagcagtggtaggagaaatgaaatcttcaaacacatcaaacttcatgcgtatatattcgtaagggtcttcttgccaaagttcctcatcagcatctgtatagcacatcaatggaaaaataacatcttggataatgccttgtatatggggcttcagattcttccaggtgagagcatgagaaactccttgattaatataatttaatgtctgttgtaaaactcgaggagccatatattgcttctccttgtactgatataacaccttcaataaaacttgctggacaccaacagcaaatgccttcagaaatacttcagcaaattcattatactccttggaaacattgccagggcttccatatctttcaaaaagtcttgctaaaatatgtaaggcccacttcttgcatttccaccatggtaactcaggtcgatcatcttcttcaacttgaagtgtttcattaggtacatccctgttcacaacagtctttaaaatttctatccattctgtcaggttctgttggtttatcagttccagtggtagtgtatactgaacaagagccatagaagatcttgaatatctgtttctggatgaggacagactgatcagactggtcagaaagaagctggataaaacgatcctttagaactggcagaaaatgctgcattgctgctaccaatggactccgctcctctggttttttatactcataatttttcacaagctgataaaggcaaagaagaattcctagccaacaagcactgttatcggactgaagataaaagccaattttgtccacaatggcagtccagcggcttggataatcatgtttgatgatgtgatgaatgcatgtagtaagctgtaccctgatgagctcaggagaatggataatggcttctacaatattttctcgaatacaatggcgatcttcttctggaatagtataaggggatatatcccctggtgctgtttctcgatcaggccaatactgtgttatcatatttttcagatagataacacctgcctgtctcacaggtaaatccagctgttccgacatagtaatctggagcagtgttgagacaaaattcagagacttgtgtgcttcattgagctggcgctccgcggcctcacgcagggctgggtccatggtgccccgcagggcctcgataatggtgttggggtccatcgcagcgcggactcggtcaaacccggggctcgggtgctactgggccaggaatagcgccactcactgcgcacatggacccgccgcgctccgcagcggcaaccggcgcgaaaggaaagagcg

SEQ ID NO: 89528 - DNA, 829 bp, Homo sapiens
ttttttttttttattgatcaaagagagaatttattcacagagattttcaaatacaaacaaaatagcacttttaaattttttacaaaatgaatatagaaataaatgtggtacagcacagtacaataatggacaaaagaaaacacgatccaatgactggaaaatgtctctcattactctcatatcttcggctgaattctctcctatagtggacagaaagttgccccttttcttcataagaatatcatagcagaagctactcagagaaatattgcatattgtggaataacatggaaatacaaaggcttaactctaaaggtctgcataaacactgaaaatatgttgaggaactaaattagagtttatgcaggatatacaaaatactgatagtttggcttattggtccatttattaggcttaatgtatgttttataaagtgataatactgtattttaaatgtatattaaaaagaaaacagaggagaaatgcaccactaaacctcccagtctgtgcgataatccacgtttgtgcataggcgtgtgtggggatgcatatgtctgtatgtgcttgtgtgcttttgggagtgccgtgacctacagggaacatctttgggggtaccctgcttcccaacataacactgtttctactagccctttgattttctgagtcctcaccttaaaaaaaaaaaactaaaacccaaacccttgtttgtatatgtagatttgttgtgtgtgtgtgtgtgtgtgtgtgtgtgtgtgtgtgttgtacattaacaatactctgtggaatagaaacacccgatgccctgcaatatttttagcctttctcgtgc

SEQ ID NO: 89529 - DNA, 2481 bp, Homo sapiens; identical to SEQ ID NO: 61637

SEQ ID NO: 89530 - DNA, 8734 bp, Homo sapiens; identical to SEQ ID NO: 61389

SEQ ID NO: 89531 - DNA, 435 bp, Homo sapiens
  misc_feature (1)...(435): n = a,t,c or g
nttgttgaccatcgccacgngcggcggaatttcatggataggtgcatagatggatggatgggtggaaggatgggtgggtggatacattgatgagtgggtggatgcatgtattcatggatggttggatcagtgaattgatggatgggcaggcgcatggctggatgggtggatggatgcatgggtgggtggatggatggatgtgtgggtgtctaggtagatggatgtataagtgaaaggatgggtgagtagatgcatgaatgcatggattagtagatgggtgggtaaatgggtttatggatggatagatgaattgatgggtggatgggtaagtggatgagtgcgtcgatgtaaggttggatgttttagtcaatgctccctttctctcatttcttcttgtcgtcttatatttactctttttcctcatcccgtctactg

SEQ ID NO: 89532 - DNA, 6314 bp, Homo sapiens
gcgagcggctgttggaggaaggaggtgggggccgggagcgcaaatggcgttgagatggttcagggccctgttcaaactccagcactgaccattcaccggcggaagcggcggcgcaggaggcggcggcggcccagcgggggcacacagcaggctctgttaccagctccagcagtggcggccagcgagagctaggcccgcgcccggccggcggcgctcgaggcggggagggaagttgcggggccgccgctcctgcccccccaaccgggcttcctatttaccgaaagcagagtccctcgcctctctcggctctcacctgccggccctgctctcccgcgcgagggttccgcgcccgcccgcgggccgtaaggagcgggagaaggcggaagcggccccgtggccaaagcacccgccaggcttccgaggagaatatgaaactggttgtcaaaatgacatccagatttgggaaaacatacagtaggaaaggtggaaatggcagttcaaaattcgatgaagtcttttccaacaaacggactacccttagcacaaaatggggagagaccacatttatggctaaattagggcagaagaggcccaatttcaaaccagatatccaagaaattccgaagaaacctaaagtggaagaagaaagtactggagatccttttggatttgatagtgatgatgagtctctaccagtttcttcaaagaatttagcccaggttaagtgttcctcttattcagaatctagtgaagctgctcagttggaagaggtcacttcagtacttgaagctaatagcaaaattagtcatgtggtcattgaagacactgtcgtttctgataaatgcttccctttggaggacactttacttgggaaagaaaagagcacaaaccgaattgtagaagatgatgcaagcataagtagctgtaataaattaataacttcaggtaaagtggagaattttcatgaagaacatgaaaagaatagtcaccatattcacaaaaatgctgatgacagtactaagaaacccaatgcagaaactacagtggcttctgaaatcaaggaaacaaatgatacttggaactcccagtttgggaaaaggccagaatcaccatcagaaatatctccaatcaagggatctgttagaactggtttgtttgaatgggataatgattttgaagatatcagatcagaagactgtattttaagtttggatagtgatccccttttggagatgaaggatgacgattttaaaaatcgattggaaaatctgaatgaagccattgaggaagatattgtacaaagtgttcttaggccaaccaactgtaggacgtactgtagggccaataaaacgaaatcctcccaaggagcatcaaattttgataagctgatggacggcaccagtcaggccttagccaaagcaaacagtgaatcgagtaaagatggcctgaatcaggcaaagaaagggggtgtaagttgtgggaccagttttagagggacagttggacggactagagattacactgttttacatccatcttgcttgtcagtttgtaatgttaccatacaggatactatggaacgcagcatggatgagttcactgcatccactcctgcagatttgggagaagctggtcgtctcagaaaaaaggcagatattgcaacttctaagactactactagatttcgacctagtaatactaaatccaaaaaggatgttaaacttgaattttttggttttgaagatcatgagacaggaggtgatgaaggaggttctggaagttctaattacaaaattaagtattttggctttgatgatctcagtgaaagcgaagatgatgaagatgatgactgtcaagtagaaagaaagacaagcaaaaaaagaactaaaacagctccatcaccctccttgcagcctcccccagaaagcaatgataattcccaggacagtcagtctggtactaacaatgcagaaaacttggattttacagaggacttgcctggtgtgcctgaaagtgtgaagaagcccataaataaacaaggagataaatcaaaggaaaataccagaaagatttttagtggccccaaacggtcacccacaaaagctgtatataatgccagacattggaatcatccagattcagaagaactgcctgggccaccagtagtaaaacctcagagtgtcacagtgaggctgtcttcaaaggaaccaaatcaaaaagatgatggagtttttaaggctcctgcaccaccatcccaaagtgataaaaactgtgacaatacctactcagccctaccaagatatagttactgcactgaaatgccagacgagaagaccaagaattatatactgttgttcagcacgtgaagcacttcaacgatgttgtagaatttggtgaaaatcaagagttcactgatgacattgagtacatgttaagtggcttaaagagcactcagcctctaaacacacgttgccttagtgttattagcttggctactaaatgtgccatgcccagttttcgaatgcacctgagagcacatgggatggtagcaatggtctttaaaaccttggatgattcccagcaccatcagaatctgtccctctgtacagctgccctcatgtatatactgagtagagatcgtttgaacatggatcttgatagagctagcttagatctaatgattcgacttttggaactggaacaagatgcttcatcagccaagctactgaatgaaaaagacatgaacaaaattaaagaaaaaatccgaaggctctgtgaaactgtacacaacaagcatcttgatctagaaaatataacgactgggcatttagctatggagacattattatcccttacttctaaacgagcaggagactggtttaaagaagaactccggcttttgggtggtctggatcatattgtagataaagtaaaagaatgtgtggatcatttaagtagagatgaggatgaagagaaactggtagcctcactatggggagcagagagatgtttacgagttttagaaagtgtaactgtgcataatcccgaaaatcaaagctacttgatagcatataaagattcccaacttattgtttcatcagctaaagcattacagcattgtgaagaactgattcagcagtacaaccgtgctgaggacagcatatgcttagctgacagtaagcctctgcctcaccagaatgtaactaaccatgtaggcaaagcagtggaggactgcatgagggccatcatcggggtgttgcttaatttaactaatgataatgagtggggcagcaccaaaacaggagagcaggacggtctcataggcacagcgctgaactgtgtgcttcaggttccaaagtacctacctcaggagcagagatttgatattcgagtgctgggcttaggtctgctgataaatctagtggagtatagtgctcggaatcggcactgtcttgtcaacatggaaacatcgtgctcttttgattcttccatctgtagtggagaaggggatgatagtttaaggataggtggacaagttcatgctgtccaggctttagtgcagctattccttgagcgagagcgggcagcccagctagcagaaagtaaaacagatgagttgatcaaagatgctcccaccactcagcatgataagagtggagagtggcaagaaacaagtggagaaatacagtgggtgtcaactgaaaagactgatggtacagaagagaaacataagaaggaggaggaggatgaagaacttgacctcaataaagcccttcagcatgccggcaaacacatggaggattgcattgtggcctcctacacggcactacttcttgggtgtctctgccaggaaagtccaatcaatgtaaccactgtgcgggaatatctgccagaaggagacttttcaataatgacagagatgctcaaaaaatttttgagttttatgaatctcacttgtgctgttggaacaactggccagaaatctatctctagagtgattgaatatttggaacattgctagctgctttacctttgcttcaggtgctcggtaatgctggagctatccttagacaaagaaaagtcaagtcatgaaagaagtccttgaagatataccaagaacattcatcagtatcattcgtgtttggatttttaaggccacctgatttcttcgtcatgcattcggcatttgctaaatgacagttactacatcaatctgcaactatcaaaaatgaggggaaaaggttcaggctgttaacaattccatgcagtatttaaatacatttactttggcagagtttataccctccccttgttttcttgctttattctgggcaagtttgaaggggaaaatttgtgctgctgttagtgcaactgctgtgtatgttgagccactgttgtcatgccagccaggtgcaaaggcagcttagctactgaggtagcgaatgttctgaggacattctagacaacagcttagttcctttttcaggctcatttgcttttgcttttttgttgaatgattccaatcgtaaataaagcttttaataattttgtgaattttttggttgttgttccctgaactactgtctatatttaaaattagatggaatccaaagatacacgggattaatagtatatttttttattcttgattaggtttgggttattgaactattttttacttttgagaccacaaccatattcaatatcataccataatgtgtcatagctataggcacaagaaaaacaacagtttgagagaatattatataagatgatgtgccctgttaaaaggaggaggcaaaatagtcaaacccagggtagtttacacttaatgctagggaggctcttaaaacattattagattttgaggaaagactctctagatatattttctaatgttcagtacaataaatataaggaagctaaaacaccaatgtggaattcctgtttccagataacatgtatattcttctatagagtgacaggatcaattgcataagcgcaaagccttaaattgctggtttagagaagacccttttttcattcagattctttgttcgtagagcagttatttgaaaaacagttatggaacacaaaacattttatagatttaatatcataacattgcaaatttttcttgtattattgttcacaccactggttatacttttttttttccttttttattgatggggcctgaatacaggctttctagagatctttttcattaatacttttaaatacctttcaggtagttacatcatgtttcttcattggatttgtaaaacttgaagccataaaaatattagtttggtgtgtattggggaaaatagctaaaagtctaatttttacccatttagactttgttatttccttgtataaagtgacaaatcggggctcttgtatcagtgccagctgtaatgtttttaaatgcagtggctgccttctattgtcttcctatttttgataatgcagattgttgggaaatctgtaaggaagtaactgattccaggcaaattgttttcttccttctacccaacccaaacccctacccatcaccttttaagaacatagtacgccagtgtaacgtgggaaccattgagattgtatttgccctgagtattaaagctagcttagcaaaatacttttaaaaacatattggtaaatgatacccataaaattaaattagttatattttattttaaaatgcaaaatacattgatatttattaatcattggatttagggaaagggacagatttttggtgaacctgacttgtggcagatggtaaggaatattataaaacatttggatgagaacaatcagggcgaactgcatttttctgttacactggtaatcatttgaaaattgatttacctcagtgtttaacagttttttgttttgttttgttttttaaataataactaattgtcgagcactgatagagatgcagattttggtggggggaggtggtgggggagataatcacttcaccaactgcagtgcatttgtgtgtttttaaccctcagagaactctgcattttagggtacttgaggctgacttaactaaaagttttaaagtaaccttttttccattgtaaatatttctgtaaatactaccaattggaaattagaacagtagagtacttttctgaatccaatcctatttttattttatacagtatttctcagctgtgatctttggagcaaaagccaacggcaggaaaaaatagtttgtaccagtttcatgaagtatgtctttgggtttttgtaaataattttaactcaaataaaattgctactttcaatacaaa

SEQ ID NO: 89533 - DNA, 2921 bp, Homo sapiens; identical to SEQ ID NO: 61709
  misc_feature (1)...(2921): n = a,t,c or g

SEQ ID NO: 89534 - DNA, 2951 bp, Homo sapiens
  misc_feature (1)...(2951): n = a,t,c or g
cggacgcgtggggagcatggacggtgccatggggcctcgggggctgctgttgtgcatgtacctggtatctctcctcatcctgcaggccatgcctgccctgggctcggctacaggcaggtccaagagcagcgagaagcgacaggctgtggacaccgctgtcgatggcgtgttcatccggagtttgaaagtcaactgcaaagtcacctctcgcttcgcccactatgttgtcaccagccaagtggtcaacactgccaatgaagccagggaagtggccttcgacctggaaatccccaagacagcattcatcagtgactttgccgttacagcagatggaaacgcatttatcggagacataaaggacaaggtgactgcatggaagcagtaccggaaagcagctatctcaggagagaatgccggccttgtcagggcctcggggagaactatggagcaattcaccatccacctcaccgtcaatccccagagcaaggtcacgtttcagctgacttatgaggaagtgctgaagagaaaccatatgcagtatgaaattgtcatcaaagtcaagcccaagcagctggtgcatcattttgagattgatgtggacatcttcgagccccaggggatcagcaagctggatgcccaggcctctttcctgccgaaggaactggcagcccaaactatcaagaagtccttctcaggaaaaaagggtcatgtgctgttccgtcccaccgtgagccagcagcagtcctgccccacatgctctacatccttactgaacgggcacttcaaggtgacctacgatgtcagtcgagacaagatctgcgacctcctggtggccaataaccactttgcccacttctttgccccccaaaacctgacaaacatgaacaagaacgtggtttttgtgattgacatcagtggctccatgagaggccagaaagtgaagcagaccaaggaggcactccttaaaattctgggggacatgcagccaggggactactttgacctggttctttttgggactcgagtacaatcgtggaagggctcgctggtgcaagcatctgaggccaacctacaagcagctcaagactttgtgcggggcttttccctggatgaggccacaaacctgaatggaggtttgctccggggaattgagatcttgaaccaagttcaggaaagcctcccagaactcagcaaccatgcctcaatactcatcatgttgacagatggcgatcccacagagggggtgacggaccgttcccaaatcctcaagaacgtccgcaacgccatccggggcaggttcccgctctacaacctgggtttcggccacaatgtggactttaactttctggaggtcatgtccatggagaacaacggacgggcccagagaatctacgaggaccatgatgccacccagcagctgcagggtttctacagccaggtagccaaacccctgctggtggatgtggatttgcagtacccccaggatgctgtcttggccctgacccagaaccaccataaacagtactacgaaggctcagagattgtggtggccgggcgcattgctgacaacaaacagagcagcttcaaggctgatgtgcaggcccatggggagggacaagaattcagtataacctgcctagtggatgaggaggagatgaagaaactgctccgagagcgtggccacatgctggagaaccacgtcgagcgcctctgggcctacctcaccatccaggagctgctggccaagcggatgaaggtggacagggaggtgagggccaacctgtcatcccaggccctgcggatgtcgctggactatgggtttgtgaccccactgacctccatgagcatcaggggcatggcggaccaggacggcctgaagcccaccatcgacaagccctcagaggattctccgcctttggagatgctgggacccagaaggacgttcgtgctgtcagccttgcagccttctcctactcattccagctccaatacccagcggctgccagaccgagtgaccggcgtggacacagaccctcacttcatcatccacgtgccccagaaagaggacaccctgtgcttcaacatcaatgaggagcctggtgttatcctgagcctggtacaggaccccaacacaggcttctcagtgaatggacagctcattggcaacaaggccaggagccctgggcagcatgacggcacgtacttcgggcggctgggaatcgcaaaccctgccacggactttcagttggaagtgactcctcagaacattacgctgaaccccggctttggtgggcctgtgttttcctggagggaccaagctgtgctgcggcaggacggggtggtggtgaccatcaacaagaagaggaacctggtggtgtctgtggacgacggtggcaccttttgaggttgtttttgcaccgagtgtgggaaggggagctcgggtcnaccaggacttcctggggcttctaatgtgctgggacaagtcaatcgggatgtcaagcccgggacgcaagggctgctgggggcaaatttttccaccccattcggtttttgaaagtgtcttgacatccacccccaggctccgacccccaaaaagcccaaatgcccacgatggtggtgaggaacccgcccggcctcacggtcacccaggggtttgcaaaaagactacagcaaggacccgtggcatggggccgaggtgtcctgctggttcatttcacaacaatggggcttgaattcaccgattgtgcctacactgattatattcgtccccgacatcttctgagccctctgggccagcaacgcctgttccntgcccccgggggccaaggcagaggaggaggacgacatcctgacctgctgctgaggctgtacctccttgacctaagctggttcctttgtgtcaaagcacctcatgccttcccattaaagagaggccgtgtccaaaaaaaaaa

SEQ ID NO: 89535 - DNA, 9403 bp, Homo sapiens
tagaggcaagtgaccagggtcgggacccgggtcctcgggagtaccacagccgctgttttcctttctgtggaggatgacaatgataatgccccccagtttagtgagaagcgctatgtggtccaggtgagggaggatgtgactccaggggccccagtactccgagtcacagcctcggatcgagacaaggggagcaatgccgtggtgcactatagcatcatgagtggcaatgctcggggacagttttatctggatgcccagactggagctctggatgtggtgagccctcttgactatgagacgaccaaggagtacaccctacgggtgcgagcacaggatggtggccgtcccccactctctaatgtctctggcttggtgacagtacaggtcctggatatcaacgacaatgcccccatcttcgtcagcacccctttccaggctactgtcctggagagcgtccccttaggctacctggttctccatgtccaggctatcgacgctgatgctggtgacaatgcccgcctggaataccgccttgctggggtgggacatgacttccccttcaccatcaacaatggcacaggctggatctctgtggctgctgaactggaccgggaggaagttgatttctacagctttggggtagaagctcgagaccatggcactccagcactcactgcctcggccagtgtcagcgtgactgccctggatgtcaacgacaacaatccaacctttacccaaccagagtacacagtgcggctcaatgaggatgcagctgtgggcaccagcgtggtgacggtgtcagctgtggaccgtgatgctcatagtgtcatcacctaccagatcaccagtggcaatactcgaaaccgcttctccatcaccagccaaagtggtggtgggctggtatcccttgccctgccactggactacaaacttgagcggcagtatgtgttggctgttaccgcctccgatggcactcggcaggacacggcacagattgtggtgaatgtcaccgacgccaacacccatcgtcctgtctttcagagctcccactatacagtgaatgttaatgaggaccggccggcaggcaccacggtggtgctgatcagcgccacggatgaggacacaggtgagaatgcccgcatcacctacttcatggaggacagcatcccccagttccgcatcgatgcagacacgggggctgtcaccacccaggctgagctggactacgaagaccaagtgtcttacaccctggccattactgctcgggacaatggcattccccagaagtccgacaccacctacctggagatcctggtgaacgacgtgaatgacaatgcccctcagttcctgcgagactcctaccagggcagtgtctatgaggatgtgccacccttcactagcgtcctgcagatctcagccactgatcgtgattctggacttaatggcagggtcttctacaccttccaaggaggcgacgatggagacggtgactttattgttgagtccacgtcaggcatcgtgcgaacgctacggaggctggatcgagagaacgtggcccagtatgtcttgcgggcatatgcagtggacaaggggatgcccccagcccgcacacctatggaagtgacagtcactgtgttggatgtgaatgacaatccccctgtctttgagcaggatgagtttgatgtgtttgtggaagagaacagccccattgggctagccgtggcccgggtcacagccactgaccccgatgaaggcaccaatgcccagattatgtaccagattgtggagggcaacatccctgaggtcttccagctggacatcttctccggggagctgacagccctggtagacttagactacgaggaccggcctgagtacgtcctggtcatccaggccacgtcagctcctctggtgagccgggctacagtccacgtccgcctccttgaccgcaatgacaacccaccagtgctgggcaactttgagatccttttcaacaactatgtcaccaatcgctcaagcagcttccctgggggtgccattggccgagtacctgcccatgaccctgatatctcagatagtctgacttacagctttgagcggggaaatgaactcagcctggtcctgctcaatgcctccacgggtgagctgaagctaagccgcgcactggacaacaaccggcctctggaggccatcatgagcgtgctggtgtcagacggcgtacacagcgtgaccgcccagtgcgcgctgcgtgtgaccatcatcaccgatgagatgctcacccacagcatcacgctgcgcctggaggacatgtcacccgagcgcttcctgtcaccactgctaggcctcttcatccaggcggtggccgccacgctggccacgccaccggaccacgtggtggtcttcaacgtacagcgggacaccgacgcccccgggggccacatcctcaacgtgagcctgtcggtgggccagccgccagggcccgggggcgggccgcccttcctgccctctgaggacctgcaggagcgcctatacctcaaccgcagcctgctgacggccatctcggcacagcgcgtgctgcccttcgacgacaacatctgcctgcgggagccctgcgagaactacatgcgctgcgtgtcggtgctgcgcttcgactcctccgcgcccttcatcgcctcctcctccgtgctcttccggcccatccaccccgtcggagggctgcgctgccgctgcccgcccggcttcacgggtgactactgcgagaccgaggtggacctctgctactcgcggccctgtggcccccacgggcgctgccgcagccgcgagggcggctacacctgcctctgtcgtgatggctacacgggtgagcactgtgaggtgagtgctcgctcaggccgttgcaccccgggtgtctgcaagaatgggggcacctgtgtcaacctgctggtgggcggtttcaagtgcgattgcccatctggagacttcgagaagccctactgccaggtgaccacgcgcagcttccccgcccactccttcatcacctttcgcggcctgcgccagcgtttccacttcaccctggccctctcgtttgccacaaaggagcgcgacgggttgctgttgtacaatgggcgtttcaatgagaagcatgactttgtggccctcgaggtgatccaggagcaggtccagctcaccttctctgcaggggagtcaaccaccacggtgtccccattcgtgcccggaggagtcagtgatggccagtggcatacggtgcagctgaaatactacaataagccactgttgggtcagacagggctcccacagggcccatcagagcagaaggtggctgtggtgaccgtggatggctgtgacacaggagtggccttgcgcttcggatctgtcctgggcaactactcctgtgctgccccagggcacccagggtggcagcaagaagtctctggatctgacggggcccctgctactaggcggggtgcctgacctgcccgagagcttcccagtccgaatgcggcagttcgtgggctgcatgcggaacctgcaggtggacagccggcacatagacatggctgacttcattgccaacaatggcaccgtgcctggctgccctgccaagaagaacgtgtgtgacagcaaaacttgccacaatgggggcacttgcgtgaaccagtgggacgcgttcagctgcgagtgccccctgggctttgggggcaagagctgcgcccaggaaatggccaatccacagcacttcctgggcagcagcctggtggcctggcatggcctctcgctgcccatctcccaaccctggtacctcagcctcatgttccgcacgcgccaggccgacggtgtcctgctgcaggccatcaccagggggcgcagcaccatcaccctacagctacgagagggccacgtgatgctgagcgtggagggcacagggcttcaggcctcctctctccgtctggagccaggccgggccaatgacggtgactggcaccatgcacagctggcactgggagccatcggggggcctggccatgccattctgtccttcgattatgggcagcagagagcagagggcaacctgggcccccggctgcatggtctgcacctgagcaacataacagtgggcggaatacctgggccagccggcggtgtggcccgtggctttcggggctgtttgcagggtgtgcgggtgagcgatacgccagagggggttaacagcctggatcccagccatggggagagcatcaacgtggagcaaggctgtagcctgcctgacccttgtgactcaaacccgtgtcctgctaacagctattgcagcaacgactgggacagctattcctgcagctgtgatccaggttactatggtgacaactgtactaatgtgtgtgacctgaacccgtgtgagcaccagtctgtgtgtacccgcaagcccagtgccccccatggctatacctgcgagtgtcccccaaattaccttgggccatactgtgagaccaggattgaccagccttgtccccgtggctggtggggacatcccacatgtggcccatgcaactgtgatgtcagcaaaggctttgacccagactgcaacaagacaagcggcgagtgccactgcaaggagaaccactaccggcccccaggcagccccacctgcctcttgtgtgactgctaccccacaggctccttgtccagagtctgtgaccctgaggatggccagtgtccatgcaagccaggtgtcatcgggcgtcagtgtgaccgctgtgacaacccttttgctgaggtcaccaccaatggctgtgaagtgaattatgacagctgcccacgagcgattgaggctgggatctggtggccccgtacccgcttcgggctgcctgctgctgctccctgtcccaaaggctcctttgggactgctgtgcgccactgtgatgagcacagggggtggctccccccaaacctcttcaactgcacgtccatcaccttctcagaactgaagggcttcgctgagcggctacagcggaatgagtcaggcctagactcagggcgctcccagcagctagccctgctcctgcgcaacgccacgcagcacacagctggctacttcggcagcgacgtcaaggtggcctaccagctggccacgcggctgctggcccacgagagcacccagcggggctttgggctgtctgccacacaggacgtgcacttcactgagaatctgctgcgggtgggcagcgccctcctggacacagccaacaagcggcactgggagctgatccagcagacagagggtggcaccgcctggctgctccagcactatgaggcctacgccagtgccctggcccagaacatgcggcacacctacctaagccccttcaccatcgtcacgcccaacattgtcatctccgtagtgcgcttggacaaagggaactttgctggggccaagctgccccgctacgaggccctgcgtggggagcagcccccggaccttgagacaacagtcattctgcctgagtctgtcttcagagagacgccccccgtggtcaggcccgcaggccccggagaggcccaggagccagaggagctggcacggcgacagcgacggcacccggagctgagccagggtgaggctgtggccagcgtcatcatctaccgcaccctggccgggctactgcctcataactatgaccctgacaagcgcagcttgagagtccccaaacgcccgatcatcaacacacccgtggtgagcatcagcgtccatgatgatgaggagcttctgccccgggccctggacaaacccgtcacggtgcagttccgcctgctggagacagaggagcggaccaagcccatctgtgtcttctggaaccattcaatcctggtcagtggcacaggtggctggtcggccagaggctgtgaagtcgtcttccgcaatgagagccacgtcagctgccagtgcaaccacatgacgagcttcgctgtgctcatggacgtttctcggcgggagaatggggagatcctgccactgaagacactgacatacgtggctctaggtgtcaccttggctgcccttctgctcaccttcttcttcctcactctcttgcgtatcctgcgctccaaccaacacggcatccgacgtaacctgacagctgccctgggcctggctcagctggtcttcctcctgggaatcaaccaggctgacctcccttttgcctgcacagtcattgccatcctgctgcacttcctgtacctctgcaccttttcctgggctctgctggaggccttgcacctgtaccgggcactcactgaggtgcgcgatgtcaacaccggccccatgcgcttctactacatgctgggctggggcgtgcctgccttcatcacagggctagccgtgggcctggaccccgagggctacgggaaccctgacttctgctggctctccatctatgacacgctcatctggagttttgctggcccggtggcctttgccgtctcgatgagtgtcttcctgtacatcctggcggcccgggcctcctgtgctgcccagcggcagggctttgagaagaaaggtcctgtctcgggcctgcagccctccttcgccgtcctcctgctgctgagcgccacgtggctgctggcactgctctctgtcaacagcgacaccctcctcttccactacctctttgctacctgcaattgcatccagggccccttcatcttcctctcctatgtggtgcttagcaaggaggtccggaaagcactcaagcttgcctgcagccgcaagcccagccctgaccctgctctgaccaccaagtccaccctgacctcgtcctacaactgccccagcccctacgcagatgggcggctgtaccagccctaacggagactcggccggctctctgcacagcaccagtcgctcgggcaagagtcagcccagctacatccccttcttgctgagggaggagtccgcactgaaccctgggccaagggccccctgggcttggggggattccaggaaggcctgtttcctgggaaggttcaaagaccagcagcattgattcctgaacaagggatttcgacagtgacctgtccttagaagacgaccagagtggctcctatgcctctacccactcatcagacagtgaggaggaagaagaggaggaggaagaggaggccgccttccctggagagcagggctgggatagcctgctggggcctggagcagagagactgcccctgcacagtactcccaaggatgggggcccagggcctggcaaggccccctggccaggagactttgggaccacagcaaaagagagtagtggcaacggggcccctgaggagcggctgcgggagaatggagatgccctgtctcgagaggggtccctaggcccccttccaggctcttctgcccagcctcacaaaggcatccttaagaagaagtgtctgcccaccatcagcgagaagagcagcctcctgcggctccccctggagcaatgcacagggtcttcccggggctcctccgctagtgagggcagccggggcggccccccttcccgcccaccgccccggcagagcctccaggagcagctgaacggggtcatgcccatcgccatgagcatcaaggcaggcacggtggatgaggactcgtcaggctccgaatttctcttctttaacttcctgcattaaccctgggccgtggttcctacgcccgaggctcccttcccttccccagccgcactcatgccctgctcctgtcttgtgctttatcctgccccgctccccatcgcctgcccgcagcagcgacgaaacgtccatctgaggagcctgggccttgccgggaggggtactcaccccacctaaggccatctagtgccaactccccccccaccattcccctcactgcactttggacccctggggccaacatctccaagacaaagtttttcagaaaagaggaaaaaaagaatttaaaaaaggatctccactcttcatgacttcagggattcattttttttatacgctggaaattgactcccctttcccttcccaaagaggataggacctcccaggatgcttcccagcctctcctcagtttcccatctgctgtgcctctgggaggagagggactcctggggggcctgcccctcatacgccatcaccaaaaggaaaggacaaagccacacgcagccagggcttcacacccttcaggctgcacccgggcaggcctcagaacggtgaggggccagggcaaagggtgtgtctcgtcctgcccgcactgcctctcccaggaactggaaaagccctgtccggtgagggggcagaaggactcagcgcccctggacccccaaatgctgcatgaacacattttcaggggagcctgtgcccccaggcgggggtcgggcagccccagcccctctccttttcctggactctggccgtgcgcggcagcccaggtgtttgctcagttgctgacccaaaagtgcttcatttttcgtgcccgccccgcgccccgggcaggccagtcatgtgttaagttgcgcttctttgctgtgatgtgggtgggggaggaagagtaaacacagtgctggctcggctgccctgagggtgctcaatcaagcacaggtttcaagtctgggttctggtgtccactcacccaccccaccccccaaaatcagacaaatgctactttgtctaacctgctgtggcctctgagacatgttctatttttaaccccttcttggaattggctctcttcttcaaaggaccaggtcctgttcctctttctccccgactccaccccagctccctgtgaagagagagttaatatatttgttttatttatttgctttttgcgttgggatgggttcgtgtccagtcccgggggtctgatatggccatcacaggctgggtgttcccagcagccctggcttgggggcttgacgcccttccccttgccccaggccatcatctccccacctctcctcccctctcctcagttttgccgactgcttttcatctgagtcaccatttactccaagcatgtattccagacttgtcactgactttccttctggagcaggtggctagaaaaagaggctgtgggcaggaaagaaaggctcctgtttctcatttgtgaggccagcctctggcttttctgccgtggattctccccctgtcttctcccctcagcaattcctgcaaagggttaaaaatttaactggtttttactactgatgacttgatttaaaaaaaatacaaagatgctggatgctaacttgatactaaccatcagattgtacagtttggttgttgctgtaaatatggtagcgttttgttgttgttgttttttcatgccccatactactgaataaactagttctgtgcgggtacaaaaaaaaaa

SEQ ID NO: 89536 - DNA, 1835 bp, Homo sapiens
tttcgtctgtaactgctcctcactgcgttacccagtaatgcgctgatcgggggagggggcgggggggccggggagcgagcgggagagcgagccgacttggaaatgtgaacgcaagaagcaggcttgatttttttttctccccccttctctctctctctctctctctctcttcctctctccctctttctcctctctcacccacactcacgcacacctccaaaccgcacacccagacgcacacgcataccccagcgcccggcagttatgtattctccgctctgtctcacccaggatgaatttcatcctttcatcgaagcacttctgccccacgtccgagcctttgcctacacatggttcaacctgcaggcccgaaaacgaaaatacttcaaaaaacatgaaaagcgtatgtcaaaagaagaagagagagccgtgaaggatgaattgctaagtgaaaaaccagaggtcaagcagaagtgggcatctcgacttctggcaaagttgcggaaagatatccgacccgaatatcgagaggattttgttcttacagttacagggaaaaaacctccatgttgtgttctttccaacccagaccagaaaggcaagatgcgaagaattgactgcctccgccaggcagataaagtctggaggttggaccttgttatggtgattttgtttaaaggtattccgctggaaagtactgatggcgagcgccttgtaaagtccccacaatgctctaatccagggctctgtgtccaaccccatcacataggggtttctgttaaggaactcgatttatatttggcatactttgtgcatgcagcagattcaagtcaatctgaaagtcccagccaggccaagtgacgctgacattaaggaccagccagaaaatgggacatttggggcttccagggacagttttgtcacattcaggtgttttttagtgtcacttgagcttagttaagagtgtcacagacacccattagctgcagggaactggcccaaatttttctctctcagatttggaaagttcttcatactacagcatgagtccaggagcaatgaggaggtctttacccagcacatcctctacgagctccacaaagcgcctcaagtctgtggaggatgaaatggacagtcctggtgaggagccattttatacaggccaagggcgctccccaggaagtggcagtcagtcaagtggatggcatgaagtggagccaggaatgccatctccaaccacactgaagaagtcggagaagtctggtttcagcagcccctccccttcacagacctcctccctggggaacggcgttcacacagcatcaccgacctgtcattacagggacccagagcaagttccacattgcaacaccatcgattctttcattttccccgacattcaccctttttccagcagcctgggccttacttctcacacccagccatccgctatcaccctcaggagacgctgaaagaatttgtccaacttgtctgccctgatgctggtcagcaggctggacagcccaatgggagcagccaaggcaaggtgcacaacccattccttcccaccccaatgttgccaccgccaccgccaccaccgatggccaggcctgtgcctctgccggtgccagacacaaagcctccaaccacgtcaacagaaggaggtgcagcctcccccacgtcaccaactaccaggtcgctggcaggactagaccacagcagcccttcctacatatggtccgccctagcctgtaaagctgatggcatgaaggtgcgggtggcagtgtgcttcccaccagcacctgtccccgaagaggaagagacagggtggggtg

SEQ ID NO: 89537 - DNA, 847 bp, Homo sapiens
  misc_feature (1)...(847): n = a,t,c or g
ggccctgaagtttcattagcaaccaggaaaataaaataaaataaagaatggagaactcattaagagttctgcagtctaagcacacagcatagttttaatacctttcaaaattatatataatgcaggaataagagactgtctttagggattttattttaggaggttatttacctctttatgttctaagcagtgtgttcagaccccaggtaaggtctcctcaaggtatatacacttgaaatgtggggtcttcaccccctgtcccatctggcttatcttatctctgctgttcccctcttcattatacttcatggngggggtgggggctgttcattttttagggttgaggtgacacctctctgaggagggagaaaaagcggcttcacaactgcatgggatgaggacagctgcttcttttggggggcccacctgctcgctggagccatggggtgcctctgctctttagttttatattagtttaaagccttttcccgattggatagggttcaagggccattgggattttcccagtggccaaaaagggtgtaaaagtccaactccgggagcttcttgggggcctccccaaacccccaccccctttaatagactattttcccccctttctctgggttggctccggggattttaggcgacaaattaaagaggacaattttgggccaggggaatcccgaggggatctttttttttacctctccacacagagtggggggagtttggggaggtngacgaaanaactttgggttgttttttgagatgttttttgaacttggtggaaggaagagaatgaggtatgattattcagcagccgcgaggacgcgtgcactccgcc

SEQ ID NO: 89538 - DNA, 2276 bp, Homo sapiens
acgggcaccctcactgaggacggcttagacgtgatgggggtggtgcccctgaaggggcaggcattcctgcccctggtcccagagcctcgccgcctgcctgtggggcccctgctccgagcactggccacctgccatgccctcagccggctccaggacacccccgtgggcgaccccatggacttgaagatggtggagtctactggctgggtcctggaggaagagccggctgcagactcagcatttgggacccaggtcttggcagtgatgagacccccactttgggagccccagctgcaggcaatggaggagcccccggtgccagtcagcgtcctccaccgcttccccttctcttcggctctgcagcgcatgagtgtggtggtggcgtggccaggggccactcagcccgaggcctacgtcaaaggctccccggagctggtggcagggctctgcaaccccgagacagtgcccaccgacttcgcccagatgctgcagagctatacagctgctggctaccgtgtcgtggccctggccagcaagccactgccctctgtgcccagcctggaggcagcccagcaactgacgagggacactgtggaaggagacctgagcctcctggggctgctggtcatgaggaacctactgaagccgcagacaacgccagttatccaggctctgcgaaggacccgcatccgcgccgtcatggtgacaggggacaacctgcagacagcggtgactgtggcccggggctgtggcatggtggccccccaggagcatctgatcatcgtccacgccacccaccctgagcggggtcagcctgcctctctcgagttcctgccgatggagtcccccacagccgtgaatggcgttaaggatcctgaccaggctgcaagctacaccgtggagccagacccccgatccaggcacctggccctcagcgggcccacctttggtatcattgtgaagcacttccccaagctgctgcccaaggtcctggtccagggcactgtctttgcccgcatggcccctgagcagaagacagagctggtgtgcgagctacagaagcttcagtactgcgtgggcatgtgcggagacggtgccaatgactgtggggccctgaaggcggctgatgtcggcatctcgctgtcccaggcagaagcctcagtggtctcacccttcacctcgagcatggccagtattgagtgcgtgcccatggtcatcagggaggggcgctgttcccttgacacttcgttcagcgtcttcaagtacatggctctgtacagcctgacccagttcatctccgtcctgatcctctacacgatcaacaccaacctgggtgacctgcagttcctggccatcgacctggtcatcaccaccacagtggcagtgctcatgagccgcacggggccagcgctggtcctgggacgggtacggccaccgggggcgctgctcagcgtgcccgtgctcagcagcctgctgctgcagatggtcctggtgaccggcgtgcagctagggggctacttcctgaccctggcccagccatggttcgtgcctctgaacaggacagtggccgcaccagacaacctgcccaactacgagaacaccgtggtcttctctctgtccagcttccagtacctcatcctggctgcagccgtgtccaagggggcgcccttccggccggccgctcacaaacaatgtgcctttcctgttggcctcggcgctctagagctccgtcttggtggtccttgttctgtcccccggcctcctgcatgggccgctggcgttgaggaacatcactgacaccggcttcaagctgctgttggtgggtctggtcaccctcaacttcgtgggtggccttcatgctggagagcgtgctagaccagtgcctccccgcctgcctgcgccgcctccggcccaagcgggcctccaagaagcgcttcaagcagctggaacgagagctggccgagcagccctggccgccgctgcccgccggccccctgaggtagtgcaggcccacgggcaccccagacactggaactccctgcctctgagccaccaactggacccctctccagcaacaccaccgccaccacctcccacatccctgaggttggcgactgtctacactcctcccccgagaccacccccaccctggggaagcgttgactactgtcccctaccttggaccatcccgcgtaggggtggcagcccccagctcccctcagtgctgctgtcagtgtagcaaataaagtcatgatattttcctggcaaaaaaaaaa

SEQ ID NO: 89539 - DNA, 2610 bp, Homo sapiens
  misc_feature (1)...(2610): n = a,t,c or g
cttgtgggaagagctgaagcaggcgctcttggctcggcgcggcccgctgcaatccgtggaggaacgcagccgccgagccaccatcagtgcctgggcacttacaggaaggcttcggctgcgtggtcaccaaccgattcgaccagttatttgaccgacgaatcgggancccgttccgaggtgctgaaggcagcagagaacaagaaaaaagaagcccggcgggggcgcgtgtgtggggccctggggcatagagcgcagctcagggccggcgggcccacgaccaactccaacgcggcaggcaaacagcgtgcgcaaggagtcccagaaagaccgcaagaacccgctgccccccagcgttggcgtggttgacaagaaagaggagacgcagccgcccgtggcgcttaagaaagaaggaataagacgagttggaagaagacctgatcaacaacttcagggtgaagggaaaataattgatagaagaccagaaaggcgaccacctcgtgaacgaagattcgaaaagccacttgaagaaaagggtgaaggaggcgaattttcagttgatagaccgattattgaccgacctattcgaggtcgtggtggtcttggaagaggtcgagggggccgtggacgtggaatgggccgaggagatggatttgattctcgtggcaaacgtgaatttgataggcatagtggaagtgatagatcttctttttcacattacagtggcctgaagcacgaggacaaacgtggaggtagcggatctcacaactggggaactgtcaaagacgaattaactgacttggatcaatcaaatgtgactgaggaaacacctgaaggtgaagaacatcatccagtggcagacactgaaaataaggagaatgaagttgaagaggtaaaagaggagggtccaaaagagatgactttggatgagtggaaggctattcaaaataaggaccgggcaaaagtagaatttaatatccgaaaaccaaatgaaggtgctgatgggcagtggaagaagggatttgttcttcataaatcaaagagtgaagaggctcatgctgaagattcggttatggaccatcatttccggaagccagcaaatgatataacgtctcagctggagatcaattttggagaccttggccgcccaggacgtggcggcaggggaggacgaggtggacgtgggcgtggtgggcgcccaaaccgtggcagcaggaccgacaagtcaagtgcttctgctcctgatgtggatgacccagaggcattcccagctctggcttaactggatgccataagacaaccctggttcctttgtgaacccttctgttcaaagcttttgcatgcttaaggattccaaacgactaagaaattaaaaaaaaaaagactgtcattcataccattcacacctaaagactgaattttatctgttttaaaaatgaacttctcccgctacacagaagtaacaaatatggtagtcagttttgtatttaaaaatgtattggtagcagggatgttttcataattttcagagattatgcattcttcatgaatacttttgtattgctgcttgcaaatatgcatttccaaacttgaaatataggtgtgaacagtgtgtaccagtttaaagctttcacttcatttgtgttttttaattaaggatttagaagttcccccaattacaaactggttttaaatattggacatactggttttaatacctgctttgcatattcacacatggtcaactgggacatgttaaactttgatttgtcaaattttatgctgtgtggaatactaactatatgtattttaacttagttttaatattttcatttttggggaaaaatcttttttcacttctcatgatagctgttatatatatatgctaaatctttatatacagaaatatcagtacttgaacaaattcaaagcacatttggtttattaacccttgctccttgcatggctcattaggttcaaattataactgatttacattttcagctatatttactttttaaatgcttgagtttcccattttaaaatctaaactagacatcttaattggtgaaagttgtttaaactacttattgttggtaggcacatcgtgtcaagtgaagtagttttataggtatgggttttttctcccccttcaccagggtgggtggaataagttgatttggccaatgtgtaatatttaaactgttctgtaaaataagtgtctggccatttggtatgatttctgtgtgtgaaaggtcccaaaatcaaaatggtacatccataatcagccaccatttaacccttccttgttctaaaacaaaaaccaaagggcgctggttggtagggtgaggtgggggagtattttaatttttggaatttgggaagcagacagctttactttgtaaggttggaacagcagcactatacatgaaatataaaccaaaaacctttactgtttctaaatttcctagattgctattatttggttgtaagttgagtattccacagaaagtggtaattatctcttctctcttcctccattagaaaattaggtaaataatggattcctataatgggagcatcaccacttattaaaacacacatagaatgatg

SEQ ID NO: 89540 - DNA, 451 bp, Homo sapiens
  misc_feature (1)...(451): n = a,t,c or g
ggaggaaattatgctctgcganatcgaaggcgtcggaatgcccggaccgacccacgcgtccgacacccctggccccacaggacgaggagcacatgctccctccacttccgtgcctggagctgctgcccttcccgctgtggatggctaggacgagaaccaatctgctcttgctgccccacagggtcagggctttgttctgggcctgcagggccctctgggtgtcgcccctgttgtgcggagaacgttcctaccctgtgctcttcgtttcactgaggagacccctggagtcccggctctgtcaagagtgcgcaggggctgctgaggactagggcgagcccacggcccctctctcctcagtggccaggtggtggtctggccacaggcggctgggaacgtggcgccctcctttccatctcactgaaggtggccctggccccccacacccagagcc

SEQ ID NO: 89541 - DNA, 3318 bp, Homo sapiens; identical to SEQ ID NO: 61765

SEQ ID NO: 89542 - DNA, 1579 bp, Homo sapiens
  misc_feature (1)...(1579): n = a,t,c or g
ggtaaaaatggctgaatatttagcttcgatattcgggactgagaaggacaaggttaactgctctttttactttaagatcggggtctgccggcacggggaccggtgctcccggcttcacaacaagccgacattcagccaggtgagacccggcacggagcctcgggggttaacggctccctggcccttccccttctggggccgtcgtcaccatgtcccgcctattccgggttcctgagtccctccccaccgcccggctttttttctcattggacctttctgcaggctcctcccaccggtcttcgtgccgttttcccgggaacttggtcgcgcccccatgcgtacaggctacacacggcggctgttcatctttgccagtcccttccatcccgctgttcatccttgccagtcccctccatcccttttctggtttcttaggggcaaaggatcgccgatgcactcatgatgcttaggctggggtgtaaggttccacccccaaccttcatgcctcactctctgttcatgcagccctgccctctgagctcaggccccgccccttttaaattctgtgcagaccatagtgctgctcaacctgtaccggaatccacagaacacagcccaaactgcagacggatcacactgtgagtaagggaccaggcctgggggcaaggtgaacagcccccagtaggctacactctgattccaccctgcccgcccccaccccaggtcatgtgagtgacgtggaggtgcaggagcactatgatagcttcttcgaggtgagggttggtaggggcagatggggtttcttgtgggagctcagctgagttcctccccgtcttccacaggaggtgttcacagaactgcaggagaagtatggggagattgaagagatgaatgtgtgcgacaaccttggggaccacctcgtgggcaacgtctatgtcaaggtgcttgctgccccccacttagggcccagaagtggaggcgtttcaatgcctgatggtggccactgtaggctctcagcttgaatttcatcactaaatccagtccagccccagagcgggtagtgagtcccctgaagatctctgagttctcctgctgaccctgactgacatttcctgcagttccggagggaggaggatggagagcgggccgtggctgaactcagtaaccgctggttcaacgggcaggctgtgcacgggaatgtacccgaggtggcttctgcaacttcatgcatctgcggcccatttcccagaacctccagaggcagctctatgggcggggacccaggcgcaggtcacccccgaggttccatactggccaccatccccgagagaggaaccatcgggtnttcccctgatcactgggcatggccgcttctgaggccctggcccccttacccttcacccccaacagggacagatgttcctggcaggacctctcctcaaagcccccttcactctcctgccccatccctcccaggctcccgggctccataatgtaatctattcagcatggagaccttcttctaccgcccctgtcttaataaagctgcgtgtttcacttcggcatcaaaaaaaaaaaa

SEQ ID NO: 89543 - DNA, 3507 bp, Homo sapiens
caagtgggattgtggtcagagctttgtggagggaaaaaaaacctggtgggggcaggagagtaaaaagaagaaacccaggcagacaggcagttggacacactgaggaagaccccccacgagtgggaaccccctggaaggaacacaccggccccggcccccaggaagggagcacaatggaggccgctcatgctaaaaccacggaggaatgtttggcctattttggggtgagtgagaccacgggcctcaccccggaccaagttaagcggaatctggagaaatacggcctcaatgagctccctgctgaggaagggaagaccctgtgggagctggtgatagagcagtttgaagacctcctggtgcggattctcctcctggccgcatgcatttccttcgtgctggcctggtttgaggaaggtgaagagaccatcactgcctttgttgaaccctttgtcatcctcttgatcctcattgccaatgccatcgtgggggtttggcaggagcggaacgcagagaacgccatcgaggccctgaaggagtatgagccagagatggggaaggtctaccgggctgaccgcaagtcagtgcaaaggatcaaggctcgggacatcgtccctggggacatcgtggaggtggctgtgggggacaaagtccctgcagacatccgaatcctcgccatcaaatccaccacgctgcgggttgaccagtccatcctgacaggcgagtatgtatctgtcatcaaacacacggagcccgttcctgacccccgagctgtcaaccaggacaagaagaacatgcttttctcgggcaccaacattgcagccggcaaggccttgggcatcgtggccaccaccggtgtgggcaccgagattgggaagatccgagaccaaatggctgccacagaacaggacaagacccccttgcagcagaagctggatgagtttggggagcagctctccaaggtcatctccctcatctgtgtggctgtctggcttatcaacattggccacttcaacgaccccgtccatgggggctcctggttccgcggggccatctactactttaagattgccgtggccttggctgtggctgccatccccgaaggtcttcctgcagtcatcaccacctgcctggccctgggtacccgtcggatggcaaagaagaatgccattgtaagaagcttgccctccgtagagaccctgggctgcacctctgtcatctgttccgacaagacaggcaccctcaccaccaaccagatgtctgtctgcaagatgtttatcattgacaaggtggatggggacatctgcctcctgaatgagttctccatcaccggctccacttacgctccagagggagaggtcttgaagaatgataagccagtccggccagggcagtatgacgggctggtggagctggccaccatctgtgccctctgcaatgactcctccttggacttcaacgaggccaaaggtgtctatgagaaggtcggcgaggccaccgagacagcactcaccaccctggtggagaagatgaatgtgttcaacacggatgtgagaagcctctcgaaggtggagagagccaacgcctgcaactcggtgatccgccagctaatgaagaaggaattcaccctggagttctcccgagacagaaagtccatgtctgtctattgctccccagccaaatcttcccgggctgctgtgggcaacaagatgtttgtcaagggtgcccctgagggcgtcatcgaccgctgtaactatgtgcgagttggcaccacccgggtgccactgacggggccggtgaaggaaaagatcatggcggtgatcaaggagtggggcactggccgggacaccctgcgctgcttggccctggccacccgggacacccccccgaagcgagaggaaatggtcctggatgactctgccaggttcctggagtatgagacggacctgacattcgtgggtgtagtgggcatgctggaccctccgcgcaaggaggtcacgggctccatccagctgtgccgtgacgccgggatccgggtgatcatgatcactggggacaacaagggcacagccattgccatctgccggcgaattggcatctttggggagaacgaggaggtggccgatcgcgcctacaacgggccgagagttcgacgaccttgcccctggctgaacagccgggaagcctgccgacgtgcctgctgcttcgcccgtgtggagccctcgcacaagtccaagattgtggagtacctgcagtcctacgatgagatcacagccatgacaggtgatggcgtcaatgacgcccctgccctgaaaaaggctgagattggcattgccatgggatctggcactgccgtggccaagactgcctctgagatggtgctggctgacgacaacttctccaccatcgtagctgctgtggaggagggccgcgccatctacaacaacatgaagcagttcatccgctacctcatttcctccaacgtgggcgaggtggtctgtatcttcctgaccgctgccctggggctgcctgaggccctgatcccggtgcagctgctatgggtgaacttggtgaccgacgggctcccagccacagccctgggcttcaacccaccagacctggacatcatggaccgccccccccggagccccaaggagcccctcatcaagtggctggctcttcttccgctacatggcaatcgggggctatgtgggtgcagccaccgtgggagcagctgcctggtggttcctgtacgctgaggatgggcctcatgtcaactacagccagctgactcacttcatgcagtgcaccgaggacaacacccactttgagggcatagactgtgaggtcttcgaggcccccgagcccatgaccatggccctgtccgtgctggtgaccatcgagatgtgcaatgcactgaacagcctgtccgagaaccagtccctgctgcggatgccaccctgggtgaacatctggctgctgggctccatctgcctctccatgtccctgcacttcctcatcctctatgttgaccccctgccgatgatcttcaagctccgggccctggacctcacccagtggctcatggtcctcaagatctcactgccagtcattgggctcgacgaaatcctcaagttcgttgctcggaactacctagagggataactgttccccctcctccatctctgagcccgtgtcacagatccagaagatgaaagaaggaagtgaacatccttttgctctgtcctccccaccccgatagtgacacatctttcaggcagagctgtggcacagatcccccgttcctgtccccccacacccgtgtcatgtgtctgtttataaacatgtcccctttcccttgcttgcccccttcgggccacccgcctccctcctcaaccttgtttaattcccctttcccaaaccccgaggggctttgcaggggacaaggcgaacggactgcgctgagctgcttatttattgaaaaataaaacgacggaaaagtcaaaaaaa

SEQ ID NO: 89544 - DNA, 640 bp, Homo sapiens
cccacgcgtccgcaaagagggcatctccttgtaaatgcctggagacgatgtcccagtgcagtcctgactccctatttaacttgccccagctcggcctccttcttcccaggcctgctacattaccctccatgatgaaaagggaggggctgagacaggtctgtgttcaaatccaagctccaccacttcttccagtgaatcagtgagcataaatggagagcactctaagggccccaaaacactgtgagtggaagatgaaccctaccctcaagcagtgctggtctcccagtgatttaactctgatgaatcccagtttacccgttctgtaaaatctgaatctgaagggtattgatgatgatgatgatgatgatgatgacgatgacgatgatgatgatgaaatatatgcttcacatctctctctcaagcctgcatggataggacccgggttctaggtactctaagagtactatagaggatgaaatgagcctggagtagctctccatcctcatttggactgttctggaacctgcctgccagtcatttgggtttctttgtctgccagtcatcatccaatgatgattcaagatgataaggtctggacaaatgaagataatgggagtttccttgggcaagtctcaatttt

SEQ ID NO: 89545 - DNA, 676 bp, Homo sapiens
aggatttcgcagggtgtcacttgagttctagtttcctggggtgaggtgggggatgaggaagctgggtgcccctgacctggcccccttctctcagatgtgaagcggaggaagagccccgtgtgtggcttcgtgacccccctgcaggggcctgaggctgatgcgcaccggaagccggaggtagctgggttctggaccgcctgcccacctgcccacctgcccacccaccaagaccagcccctgcctcctgtagccttgcgctgagcaaacagggatggggtgaagggtgggagatgggtgtgcggtgctcccctctttactgatccccctcccccggcccctaccccaggcctgggtcctggaggggaactactggaagcggcgcatcgaggtggtgatgcgggaataccacaagtggcgcatctactacaagaagcgggtcagtgggggagggccagggaggccccagagctttcctcctgcggctgccggctaccgcccgcctcggaagatccctggaaaggggatcctgacccccgagcttgcgcccctcgggccctccattcagtcccgggccgacagcgccaccgtgtggccacagcgtctcctagcggcctccttacctaggggtcggctccgtaagcccagcagggaagatgacctcctggcccctaagcag

SEQ ID NO: 89546 - DNA, 1515 bp, Homo sapiens
cgggggagggccccacagaggcgctgcaagaaatccagatcccaggcgacacctgctgccttgcctgctgcccccgcagaatccctgcatctggagccacccacctggaggaactcatcgggcttcctctgtagacgggaaaaaacaaacgcaccacaaaccgacaatcaaagccatggcggatgcggggccgccaccagttcatctccctggagccaggcggctccaggcctctctcacctttcttgtgtggaacgcaggcttgcaatgttctgagcccacctgtcctcgggctagtcccattttcaaaagttctgagtacgcaggtgagaagacacccccacaaaaccccaaaactagccttaggctgtttttccccaacacaacgcacctccacaccccacaccgccagcagcccacctgggtacccaaagtgagctgccagggggttccgaggaccctgcctggtgccttccagctcataaggagaggccaagagccatggggaggaagccacacggcccagcgctcagggcttgtcatccaagagtgagagaagtggggagagaggtgacggagggtggagtggtgtgtggcgtccaaataggctagccagagagagaggtgcttgtgggattctgctggctggagccaggaggtaagtgtgaacagggaggccaaagatgaaagttatctgaaagagcccgtaccccctataaacacggcagaggaatgtcttaagagccaccaacagtaattccctttccggatgttaacaggttatttgtatcttatgtggcgtcgtaaagcattctggagtggcacacaacgtcatccccttcccggtggtctgaagaggaggaggagaccagggaggggtccttggccagcccctggcggccaaggggtgggtccttctgctctatagaaggcaggaagcccgccagctaaccgcccgggtcagggggagcaggcctgatctctcccaagcctgtgaccgaggtcctgcctgatgtccaaggggcccctgtgccagtacccccacttcccacgccccccagccttcctcacctccagaatcagccgcccaggtgcagcactatctcctttctttttcttggaagccgtctcaggggcctgagtgacgggcctgaccgtccccgctaccgcctgctgccatgcgaccagatggctgacccggcccggcttctcagggcccagaccagcctggcctcgtgcccacctgcttcgctcccaacctcaccaccaggcaagggtttccagaaaaccgagacacgcaaacacccaccaccacgacaacaacacaaaccaaagtgcactgcgaaccgccctttggcctccttcttgtaggtgccttgaaacttcaatgttgagatgaatgtgattaactacttggtcctattttctgtttgtctattttcatagaaaatgtccaagtccacttgccttgttctttcttgaaataaatagaaagatttaactttaaaaaaaaaa

SEQ ID NO: 89547 - DNA, 1407 bp, Homo sapiens
  misc_feature (1)...(1407): n = a,t,c or g
gtggccnatgaatgatagctgtacgaccgccgnaccggnccggaattccnnctcgacgatttcgtgtgagcagaggccggccatggccagcctggggctgctgctcctgctcttactgacagcactgccaccgctgtggtcctcctcactgcctgggctggacactgctgaaagtaaagccaccattgcagacctgatcctgtctgcgctggagagagccaccgtcttcctagaacagaggctgcctgaaatcaacctggatggcatggtgggggtccgagtgctggaagagcagctaaaaagtgtccgggagaagtgggcccaggagcccctgctgcagccgctgagcctgcgcgtggggatgctgggggagaagctggaggctgccatccagagatccctccactacctcaagctgagtgatcccaagtacctaagagagttccagctgaccctccagcccgggttttggaagctcccacatgcctggatccacactgatgcctccttggtgtaccccacgttcgggccccaggactcattctcagaggagagaagtgacgtgtgcctggtgcagctgctgggaaccgggacggacagcagcgagccctgcggcctctcagacctctgcaggagcctcatgaccaagcccggctgctcaggctactgcctgtcccaccaactgctcttcttcctctgggccagaatgagggggtgcacacagggaccactccaacagagccaggactatatcaacctcttctgcgccaacatgatggacttgaaccgcaaagctgaggccattggatacgcctaccctacccgggacatcttcatggaaaacatcatgttctgtggaatgggcggcttctccgacttctacaagctccggtggctggaggccattctcagctggcagaaacagcaggaaggatgcttcggggagcctgatgctgaagatgaagaatcatctaaagctattcaatatcagcagcatttttcgaggagagtgaagaggcgagaaaaacaatttccagatggctgctcctcccacaacacagccacagcagtggcagccctgggtggcttcctatacatcctggcagaataccccccagcaaacagagagccacacccatccacaccgccaccaccaagcagccgctgagacggacggttccatgccagctgcctggaggaggaacagacccctttagtcctcatcccttagatcctggagggcacggatcacatcctgggaagaaggcatctggaggataagcaaagccaccccgacacccaatcttggaagccctgagtaggcagggccagggtatggtgggggccgggagggacccaggtgtgaacggatgaataaagttcaactgcaactgaaaaaaaaaaaaa

SEQ ID NO: 89548 - DNA, 2042 bp, Homo sapiens; identical to SEQ ID NO: 61490

SEQ ID NO: 89549 - DNA, 889 bp, Homo sapiens
tttcgtcagagggacccggctaccctggacagcgcatcgccgcccgcccgggtcgccgcgccacagccgctgcggatcatgattctcgagtcagagggtggttcatgttggactcttaccttcctaccttttttcttactgtcatgtatctgctctcaatatggctgggtaacaagtatatgaagaacagacctgctctttctctcaggggtatcctcaccttgtataatcttggaatcacacttctctccgcgtacatgctggcagagctcattctctccacttgggaaggaggctacaacttacagtgtcaagatcttaccagcgcaggggaagctgacatccgggtagccaaggtgctttggtggtactatttctccaaatcagtagagttcctggacacaattttcttcgttttgcggaaaaaaacgagtcagattacttttcttcatgtatatcatcatgcttctatgtttaacatctggtggtgtgtcttgaactggataccttgtggacaaagtttctttggaccaacactgaacagttttatccacattcttatgtactcctactatggactttctgtgtttccatctatgcacaagtatctttggtggaagaaatatctcacaccggctcagctggtgccgttcgtgctcaccatcacgcaccccatgagcgccgtcgtgaaaccgcgtggcttccccttccggggctcatctttcaacgatcttattggccaaaggtagacattctccttctttaaattttccgtccaaccttcccgcaaaagccccatggataaagatattgcccgagccccctttacacgaaaaaaaataacaaagggtttttcccaaagcaactttaatggaatcggaggcggggc

SEQ ID NO: 89550 - DNA, 5221 bp, Homo sapiens; identical to SEQ ID NO: 61467

SEQ ID NO: 89551 - DNA, 992 bp, Homo sapiens
cataggcaacatttacatgactacaattctgtgaaatgattcattgccttgtgtgtcaggattggattttagacttgcactgtgggtctggttttaggattcctgggccaatcaaaggatgagatatctagccccaaagtcaaatgggattttttgttttctcactcttcatcagttgtttaaatttgtgttaccttttagttttttcatatttggaccatgactttcttaaattttttccctagtatttctgattgccttttaatgtgttcatgcattatttgccattattatgatctcaaaagttttctaggctctcaatcttgtctaacctatcgagtcttctttgtctaagctgtatgccgagattcctttctcgttctgtgccgttctgaactggttattcactaagcccactacagagctgtcatcctggaacttctttccatggctggaagtgctgtttccttttcccgtgtcttcctatttttttggattatccctcattttgctgcagtacatgcttgagtaacttcttaagaagcggtttgtaggaggtaagtttttaagcccttttttatctgatcgtatttacttaaaaaatgtcccgaatctgaatggctattctgtctaacctttaactacagcatatggggctgttcccaccaggccctttgctatcaaaacagcctaccgttaatccagcttccacaacatcgctactatcacctggcattcgatctgctacacacccatccacagctagcgccaacgatactacccctcccactattccattcataacttcacaccatccagtaactgttatctcgctactgcacactattttccccgcacccaccaaccaatctccccatcctactgtccatttctcgataagtcctaacaactttctctccgacacaaactgcatagaactacgccttactcgcgcgctccttgcccgccagacctactcaccctccaattcc

SEQ ID NO: 89552 - DNA, 953 bp, Homo sapiens
ggaattcccgggtcgacgatttcgtgggacatcgggtgacagccctgccgcccccagggatgcggcttacagataatgacaaaggaatccgctgtgtcgggcctctcttttccctggtgaaaaatgaggccagggaactgcgtttgactttcgaaccccttccacctgggagattctaggactctagtatggataagtcttgtctggataactttgtcctggccatctccctgccaactccagttggctggacagttcattggatttttgcgctcccaattgtccgtgcctggtcacataagggaagggccggggagtcggtgcaatggacgcaggccgtaagtggggcccgggaggggacccagaggcttcgaggagcttggaagagggctgcctgctgatgggagtctcctgactccctccctcccgcggccttggccggctgctgtatcttccccggtcctcctccgcctcccaggaggcctccggaggccagctgggccccttgcaggctggacttgcggatgccccgtgccattcaccgtggagcgctgggagggagtcagggccaggactctttaggtggcccctccatcattttctcatagaaatgggattgactgaagcaaggtaggtaacagctgagccccagccctatgtcctgtgatctgcctgaccctcggggctagagctttcagagtgctccaagctcccaggaacttgggagctcctggccctccccggccaccatgaaagacagctggatcttcttaacccctttctactcttccctgtacccccaacctgaactctgggcaaaagttacctgaagtccccgaaagagcaggaatttgagttccccagatgttttattaccggtgatgtggcctttccccaaggaggaaaaccatatctatctaaccacagccaaaaggacctgttgcagtaccaaa

SEQ ID NO: 89553 - DNA, 406 bp, Homo sapiens
tttgggatgccaacggtaagtccggaggcttatggcgtcttaacgggagaggcgagagcctcgtgtccgcgcatcaccccgtggctgggggttagctaggggagggcgggaagggcagaggacgcggtggctggaggacgtgtaaccttgcaagaggcgggaggcggggggcagaagtgattgacccccgcccccccgcccgtgggaccaagaaagggatgtgacaggcgaggacgaatgggatctcaggggctggactggagagtggggtacagggatgtgaggaggaccccgcgagtccgcggtgggatcccaatagagctgtggccaaggaggaggggagcaacgggaaggctgtgggcactcctgtgtgagggaaagctacaggcatcctgcagggccgaag

SEQ ID NO: 89554 - DNA, 3390 bp, Homo sapiens
acgcacacatctgtacttgggtgactaatcggcatatcaagcttacccgtcaaaacagaactgaagatttcctccctcaggctgttcctcatgcactttcccctatggaagcatggtctgagtcagtgtgggattatcagtacacattgaaggatgtgtgtgaagggaaagagtgtagcagaggagataattatttccaggtgaagcgactgtattcagatttgatgttagatttagcagctcagtctgatgcaggttttgttttttggcaagaacatttcctaggtattcccagtgcatacacagggcaactcacagatgcccaggtaatatgttactgccagattgcctgccagacgctcacaccaaagcatgctcctgtcctgccttctgtgtatgaggatgctcacattcccacccacttgccaacagtcattatcatttcttcaaatctttgccaattctatagcggtctccggctgaaccggcgctctcgcctccccgccgaacacagcgtgaggagcccccccagggatatggtgtttgagtctctgggcttgccgagcactaagtcctctgagttccgcagcgcagcaccggaagcggccgagcgcgctcagcccggcgacccctgcgggctccagacccctgcgccgctgcgccccgggtttcgccgcacccaagacccagcgagtgcagcggcggccgccgaggaggttcgaaaacatgggccaaaagaaatgccgggaaggaactgacagataggaattgggatcaagaagatgaagctgaagaggtgggaacattctccatggccagtgaggaagtcttgaagaatagagccataaagaaagcaaagcgcaagaaatgttggatttgaatctgacactggaggagcctttaaaggttttaaaaggtttggtgggtacccttctgaagaagaacgcttttctggatttgggtagtggcgctggagggaagcctttggaaggactgttcgaatggaaacaacataacccagtgcccctcccttcgccagtgcaaaggcagcggcagatccccaaggtagcctttggtaagtagctcccatcccccagccgcaccttggttgataaaaatgtttcaaatcccaaaactaatggggacagtcagcagccctcctcctctggccttgcttccagtaaagcttgtgtcggaaatgcctatcacaagcagttggccgccttggactgctccgtgcgggattggatggtgaagcacgcgaatacaaactccctctgtgatctgacacctatctttaaaagactatgagaaaatatttagcaaacattgaaacagcaaacacgggaaacaagtggcaggaattctgaaagtgaatctaacaaagtggcagctgaaacacagtctccttccctttttggctcaacaaaattacagcaagagtcaacgtttttgtttcatggcaacaaaactgaagatacacctgacaagaagatggaggtggcatctgaaaagaaaacggacccatcatcactaggagcgacaagtgcctcatttaatttcggcaagaaagttgatagctctgttttgggctcattaagctctgtccccctgactggattttctttctcccctggaaactccagtttatttggcaaagatactacccagagtaaaccagtctcttcaccatttcccactaaaccattggagggccaagcagaaggtgacagtggtgaatgcaaaggtggagatgaagaagagaatgatgagccacccaaagtagtagttaccgaagtaaaagaagaagatgctttttactccaaaaggtgtaaactgttttacaagaaagacaatgagtttaaagagaaaggcataggtactctgcatttaaaacctacagcaaatcagaagacacagcttttggtgcgggcagacaccaatttaggcaacatattgctgaacgttctgattccacccaatatgccatgtacgcgaacagggaagaataacgttcttatcgtctgtgttccaaatccaccaattgacgagaagaatgccaccatgccagtcaccatgttgattcgggtaaaaaccagcgaggatgcagacgagttgcacaaaattttactggagaaaaaggatgcctgaacacgcaaagtcggctgcagaattattgccaagtttttttgctgcttccaccgccccttaaagttagtcagtttttcttctcttctttgacatttttaagaacttatagataacttaaaacttttgtgaggaagattaatgtggccaataaaacctttaaatgttaagtgtcaagaaactgcactctcccttcttaagaactgcctaaagtgtaaaatacatttgaatgcaatttttggaagattttttaatgttcgtttattaaactaaccctaagtgatttcttcaaggactgcaatcagcgtatcaatttgctttcccaaaggctcttccaacccgtgggttttggggtccaccgccaccaccagagaggcttttgaacaggtgcctggctgtgttcagaaggaagctggcctgtgtgcttctctccggtgggctcagccgacgtgtgagacttgttctgttaccaaatgaaccgggctgccacgctgtgacaggcgtttgtcctctgctttatttttactttgaagctcaaatgcgagtactaagtgttcacctcagcgttcgaatcattggcctgtaaccctgtgggctgcttcacgagaattcaggacctgcattttcattctaaaaagaaatgaacagcttgtgaaggagttttttggcttcatagtttctattcatgaggtagtgttacttctttatccccctaaagacaaaatgaagataaagggggattgccaggaattggttttaaaagcacaaatgtggtagcttatcatctacaccatggagagtgaacccttacgaaatgaaagtcaaatgagaccatcctagaaaaagaagatgctcataggcatttgtaccatgatcaaccccacgcatatgaaaactatgaccaagtgacgtgcctgggagctttgacacacaagccatgtgaattcactagggaacacgtaataaagcttggccaaggattccaagaaatcataatgcccagagtttgcaagtggcgagaaagtgagcattctcatacacagatgcagctatctcactgtctatctcacactcactgagggtgatgtttcaggagccactggacagaatcttctgcggcaaacctgagaaagaaaactgaaattactgctttgaagtgacgggttactcagaaatactgaaatacatattctataaaatgtaaacttttgattttgactctaataaaataataagcctttg

SEQ ID NO: 89555 - DNA, 1503 bp, Homo sapiens
tttgatttatacaggattatttataatgttttccttcactttgtagctgaaatgtatttttattttatttaaatgttttaatacatgcctaacacacagtttcctcattattattccattcaacattttgacacaaatttttttctgcctatatattgaacacaaatttatcttttcagctgatggttcacaatatagatgtttatcttttaaaatttcttcattcattcttctaacgtgaaaaaaaaaaaaaatcccatccaattaacgaaactttttcttcaactgggtagtcagcaaaaatattatcatagttcacttaaccggttctttcaaagtacatttttccaattcaaggaagcggcaaagaaattgtagaaatgggttccatatcttcctttagtcacatgtagtgccaagaataaggtgtctatttagcatgtttctgactttccatggctcgcagtgaattgtgggtatctatgcagtaaaaccatggaaataaacatattcctcagctgtgaatccaccattcccttcgttacatatttccccaccttgctgaagaagaagctttactaaacatggtggttcaccactgacagcaagaataagggctgttctttgataattatctgaagcattcacatcagcccctttcctccagaagaaattttaccaattttgggattaattgttaataacgggcaaccaatagtggggtatacccatccttatttttcgcttcaagatcagcttcgtattcaagccagtttttcaactaatgaccaaactttgaccacaaacagcatagtgaagaacagtattataacgaatatccctcagatctgggtctgcaccaaagtttagaagaatagtaggcacaatcctcattttgacactgtactgccttaatcaatggggatttgttttcactatcccggacatttattttgcattgttgcctcaattaggaaaagtacaacatctgtatgtccattagcacaggctaggtgcaaaggtgttctgtattttttgtcctgcatatttacatcatatttcttgatctgaaggtattccttcagcttcttcaaatccccgactgaagcagctctgtgaagtttctttaaatccttttctcgaaggttgtagccctggctgcgggtctcattcttcctcttccagaagctgaaaagcttattcatggcggtgcaggctgcagcctttccctcagaccaggatgtttcttgaactcctagccgtccgccctgcccctctgccctggcatccggccggcagccctctccagtacctgacgaaagtggaaatgctggaagggcctcgcgcagccggccgttatggcagttacggccgttatggctgttaaggtcgttatggtccggtcctaggggctcgcagacctgcattctcacctcaggtacccgatctgatggttgacctgctccaaacacagattctacaatgtgccccactcccaatccc

SEQ ID NO: 89556 - DNA, 576 bp, Homo sapiens
cgggctgagttatttacccagaggcttgctgccagccatcgagagacccctctgattcaaatccaggttggttccaccttttccatgagcacaggtctgcatttggaagatggccctgtggcttcctagatagagctaaacctgagctgcagaggccctgctgccaatgggattgattgagtgccctcagagaggaggggctttgggattcagtaaggaaaggggtcagctggaagtaaatgtgcaatttctattgactcttctgttcctttgcctgctctcggtacatctactgccctcgtggagtttcccaaggggacaggcctccctgcaggaaggacagtcccagtcacctgagggacctctcccactccactgctgattactgtcccatcttgaaccctctcctctgggctcttgtctgcctccctcaccttgccccttccccagctcctgctccctgccctctcctctcaacctggtgatccccacctctgcaacccaagaccagttggaggctggtggtttcagcagcccctgtgagccccgccgccgctggggtctgtgcctcccctt

SEQ ID NO: 89557 - DNA, 4436 bp, Homo sapiens
ccgcctcgagttcccgggccgacgatttcgtcggagctggaggaatgccagctcctgagcaggcctcattggtggaggaggggcaaccacagacccgccaggaagctgcctccactggcccaggcatggaacccgagaccacagccaccactattctagcatccgtgaaggagcaggagcttcagtttcagcgactcacccgagaactggaagtggaaaggcagattgttgccagtcagctagaaagatgtaggcttggagcagaatcaccaagcatcgccagcaccagctcaactgagaagtcatttccttggagatcaacagacgtgccaaatactggtgtaagcaaacctagagtttctgacgctgtccagcccaacaactatctcatcaggacagagccagaacaaggaaccctctattcaccagaacagacatctctccatgaaagtgagggatcattgggtaactcaagaagttcaacacaaatgaattcttattccgacagtggataccaggaagcagggagtttccacaacagccagaacgtgagcaaggcagacaacagacagcagcattcattcataggatcaactaacaaccatgtggtgaggaattcaagagctgaaggacaaacactgggtttcagccatcagtagccaatcgggccatgagaagagttagttcagttccatctagagcacagtctccttcttatgttatcagcacaggcgtgtctccttcaagggggtctctgagaacttctctgggtagaggatttggctctccgtcagtgaccgacccccgacctctgaaccccagtgcatattcctccaccacattacctgctgcacgggcagcctctccgtactcacagagacccgcctccccaacagctatacggcggattgggtcagtcacctcccggcagacctccaatcccaacggaccaacccctcaataccaaaccaccgccagagtggggtccccactgaccctgacggatgcacagactcgagtagcttccccatcccaaggccaggtggggtcgtcgtcccccaaacgctcagggatgaccgccgtaccacagcatctgggaccttcactgcaaaggactgttcatgacatggagcaattcggacagcagcagtatgacatttatgagaggatggttccacccaggccagacagcctgacaggcttacggagttcctatgctagtcagcatagtcagcttgggcaagaccttcgttctgccgtgtctcccgacttgcacattactcctatatatgaggggaggacctattacagcccagtgtaccgcagcccaaaccatggaactgtggagctccaaggatcgcagacggcgttgtatcgcacaggttcagtaggtattggaaatctacaaaggacatccagccaacgaagtacccttacataccaaagaaataattatgctctgaacacaacagctacctacgcggagccctacaggcctatacaataccgagtgcaagagtgcaattataacaggcttcagcatgcagtgccggctgatgatggcaccacaagatccccatcaatagacagcattcagaaggaccccagggagtttgcctggcgtgatcctgagttgcctgaggtcattcacatgcttcagcaccagttcccatctgttcaggcaaatgcagcggcctacctgcagcacctgtgctttggtgacaacaaagtgaagatggaggtgtgtaggttagggggaatcaagcatctggttgaccttctggaccacagagttttggaagttcagaagaatgcttgtggtgcccttcgaaacctcgtttttggcaagtctacagatgaaaataaaatagcaatgaagaatgttggtggggatacctgccttgttgccgactgttgagaaaaatctatttgatgcagaagtaagggagcttgttacaggagttctttggaatttatcctcatgtgatgcctgtaaaaaatgacaatccattccgaaaatgctctcctcaacccttaaacaaaaacactgtgattggttccccacattcctgggaatggaaataactccttccttttgatggatgaatccataaaattaaattttcagacttcactagttcctgcgtaacacggacaggttgccctaaggaacctcagctctgcgggggaagaagctcggaagcaaatgcggtcctgcgaggggctggtagactcactgttgtatgtgatcccacacgtgtgtgaacacatccgattacgacagcaagacgggtggagaactgcgtgtgcaccctgaggaacctgtcctatcggctggagctggaggtgccccaggcccggttactgggactgaacgaattggatgacttactaggaaaagagtctcccagcaaagactctgagccaaagttgctgggggaagaagaagaaaaagaaaaagaggactccgcaagaagatcaatgggatggagttggtcctatcccaggactgtcgaagtcccccaaaggggttgagatgctgtggcacccatcggtggtaaaaccatatctgactcttctagcagaaagttccaacccagccaccttggaaggctctgcagggtctctccagaacctctctgctagcaactggaagtttgcagcatatatccggggcggccgtccgaaaagaaaaggggctccccatccttgtggagcttctgagaaaggataacgatagagttgtttcttccgtggcaacagccttgaggaatatggcactagatgttcgcaacaaggagctcataggcgaatacgccatgcgagacctggtcaaccggctccccggcggcaatggccccagtgtcttgtctgatgagaccatggcagccatctgctgtgctctgcacgaggtcaccagcaaaaacatggagaacgcaaaagccctggccgactcaggaggcatagagaagctggtgaacataaccaaaggcaggggcgacagatcatctctgaaagtggtgaaggcagcagcccaggtcttgaatacattatggcaatatcgggacctccggagcatttataaaaaggatgggtggaatcagaaccattttattacacctgtgtcgacattggagcgagaccgattcaaatcacatccttccttgtctaccaccaaccaacagatgtcacccatcattcagtcagtcggcagcacctcttcctcaccagcactgttaggaatcagagaccctcgctctgaatacgataggacccagccacctatgcagtattacaatagccaaggggatgccacacataaaggcctgtaccctggctccagcaaaccttcaccaatttacatcagttcctattcctcaccagcaagagaacaaaatagacggctacagcatcaacagctgtattatagtcaagatgactccaacagaaagaactttgatgcatacagattgtatttgcagtctcctcatagctatgaagatccttattttgatgaccgagttcactttccagcttctactgattactcaacacagtatggactgaaatcgaccacaaattatgtagacttttattccactaaacgaccttcttatagagcagaacagtacccagggtccccagactcatgggtgtacgatcaagatgcccaacagaggaactctttctttctaaccttgttcagattgaggtgaaaagtccatcttgctgatttcatgattgaaatgtgaaagtgaagtggaaggaatgaatgaagtgtgttttttttttttcttttttgaggaattatcagggaagtgaggaaatgtttgggagaggactttctaagctctatttaggtgttagatctaattacttatagattctgtagtctggtgaaggtgtgggtgacgtgatgagaggtttgagaaatgggtgaaatgaaatgggggatatgtaggtcaaatccaaattaaagatgatttttttaatgggaataaagttatgttctgataagtttgtacagaaaaaaataaacatggatgccccatgttttattggcttattactaaatgtccaagattgttatgctaattatgtcttgtaaaatttcttttgttggtgtaaatatgggaaatgccacatgggttaagtgccatcatttgtaatgcaatgtgtcacttgaaaagagaatttgaagaaactgacaacttcaaaaacaaatgagaaggccaagggacctgtgagcaattaaaagcaaaccgcgacaccctttgtctccaccaacacatagtgtactttggaagcacaacgtccaggctggtaccgcagcgccatgcccattcctcgcctcattcataggacactttcactgccattttctattcacataaaagaaaaataaatgtggaaatttcatccttggaaaaaaaaaa

SEQ ID NO: 89558 - DNA, 583 bp, Homo sapiens
tttcgtggcacccagaggcggtcctgtagccgggccggcttggggcttggttctatgtccctgcgggtcggtgcaagggcgaagaggaacccgtgggcctcaggggatcccggggggacggaccagtgttccctagttgtgggagcagacgcgtgggcacattgcgggcgggcagggcctgaagtgcagctatgtttccagtgtcctctgggtgtttccaagagcaacaagaaacgaataaatctctggctgcataaggggagtgaacacaaagtacatttgaccacaaaatgactctttaaaagtcagaactacggtagcatgaagccaaacgagaccccaggctccagaagcagacaagcagatgaggagatgaacagaagagcagaattgcagaatgatgtggcagaaagaagagaaggagcatctgaatgccaagaggagtttggctggcagtggttggagagatcagcctctggatggcaaagctcccagggaagatcatcttcccattccatcccctttccagctccccatccatcccgttgactgccacctccaccactcaataaaacccccacat

SEQ ID NO: 89559 - DNA, 1612 bp, Homo sapiens; identical to SEQ ID NO: 61410
  misc_feature (1)...(1612): n = a,t,c or g

SEQ ID NO: 89560 - DNA, 1073 bp, Homo sapiens
atggctgggagattcatcgcctcccatttctgctgcccaagaaccccctactcttacccggaccgcgatcctccggtcctcctcgtgctggtgtcccaatcccaccgccacgcgaccccccgagcctcccggtgccgccttaccctactcaacttgacccagccctgggtccaggagctcggaagaggggcgccgcgcgcgtttcccgggacccatcaccgcccccctccaagccggatttccacaattcggcttcgacagcgttttgagacgaaagtaacagagcgcccccccacctccctctctcctcctcccagttcccggtcctctgctggggttaaaaaaggagaagtgaaaggtatgcaaatgacaagcaaattggaagagccgggaagaaaggcagctataataaacaagacaaagagaaaggacaaggggaccggccccggagttttagcctggggagatcggaaggatggggtttggcggaaagcggggatctccacgaacaaaaaagcgacccggtccctctcgcggtcctctctcctgagaagagagagcaggagaaagaaggaaagggagcaaacgcctcctcacaccccagaaacagtacacaaaagagagaggaaaacacgcgagtgcacacacggtgatatcttgcgggtgatgaatatgataattggacaagggacggtgagtctgtgcgacagcgagcgagcgagcggggcgagtgggagagggagaggggagagagaggcgggaggggaggggagacgagagaagaggagcaggggagaggcgaggagagggaagaagaggagaagaaaagaagaggagctaagggaagaggagagagcaggagaggaggagagagaagagcggaggagaggagagagcagcagaggaggagagaggagaagggtaaagaagagaagaggagcgaagcggagagggagcaggcggacccggcgagagctcttttgcgccgctctgctttccccggctgcaatggtgtattatttcagagcgctccctcagctgagggctccgctccacaacaagatttactttaa

SEQ ID NO: 89561 - DNA, 2934 bp, Homo sapiens; identical to SEQ ID NO: 61392

SEQ ID NO: 89562 - DNA, 2013 bp, Homo sapiens
atgcacgaatctgtccacgtgggtttcctgtccataccatccaaggagaaaggccttggcctcctccagctgggtctgctccttcctttgaaccccatcggtacctatgcccacacctttcagagctttcctgatcagtgtcaacatgctgctcttcctcttacaaaatgtaccatcaatacagcccaggcacatggctcccacaaagctagccacttatatagtatgggtcacatcaaaaatgactccagcacaatcattcatacagacttctctcacactaaacctttaaacaagcaaggttcagtagctacagaactctccatcatcatcatcatcatcatctggttgcttttggcaaggttcagtagctacagaactctccttcatcatcatcatcatctggttgcttttggcaagcaaggttcagtagctacagaactctcctcctcctcctcctcctcctcatcatcatcatcatctggttgctttcagcaaggttcagtagctacagaactctccatcatcatcatcatcatcatcatcatcatcatcatcatctggttgcttttggcaaggttcagtagctacagaactctcctcctcctcctcctcctcctcctcctcctcatcatcatcatcatcatctggttgcttttagcaaggttcagtagctacagaactctcctcctcctcctcctcctcctcatcatcatcatcatctggttgctttcagcaaggttcagtagctacagaactctccttcatcatcatcaacatcatcatctggttgcttttggcaagcaaggttcagtagctacagaactctcctcctcctcctcctcctcctcatcatcatcatcatctggttgctttcagcaaggttcagtagctacagaactctccatcatcatcatcatcatcatcatcatcatcatcatcatctggttgcttttggcaaggttcagtagctacagaactctccttcatcatcatcatcatcatcatctggttgcttttggcaagcaaggttcagtagctacagaactctccatcatcatcatcatcatcatcatcatcatcatcatcatctggttgcttttggcaaggttcagtagctacagaactctccttcatcatcatcatcatcatcatctggttgcttttggcaaggccctggcaagaattatttggctttaccgaaacacctattccataggtaaccaattccagtcaaaaatgccagagtattactcctcaacccaatgccctatctccttagtggattataaacttactacgacaacctgtcttctttggatccaatccccgcccaagtctgagtcttctctcccaggctacaagcccccaagtcctggcagctctatgcttgacagctcgctgacctccacctcatcagaccattgggtcgcccttctcgccgtcctccagccttcttcccgctcagacactcatccactgtccggggagcctcgacccctcctataccccctccccgatcccgcagtccccttctggaccttgcggacccctctcagcccccgtaccccctaccgcctcttcctcctccactcccacaactccgcccgagctccactgcgcctgtgcggccaacgaggccgcgcgcaggcgatcggggcagaagagcttccggttcctgctgtcaataagacgtggacctgcgagccggggcaaaagggcttccggtctgcgggaaactggaggctagcggtgggcgtggaccgtcgaggtgactggcggttgtcggatctgctgttgtttgctgaccaggcagccgtaggtaatgacggatgcccagaccctgtgggcggagtaaaggaatcatgcactgatacacgcacactcaccgaggggcgcgtccgtctgcgtgcccctcatctcgtagccgaaaggagcgcgttccggggcaggcctccgggtacttcccgcagaggaccgggctttatactctttgctccttttcctccccta

SEQ ID NO: 89563 - DNA, 1853 bp, Homo sapiens
ttttttttttttgaaggaaaggaactttcaatgagaaatcaaaacacaggggaaccaaagtgcaaatcatccaccccccatgggggggccaatcctgaaccccacatcatcccctcagcccccttcaggcccccagcgcaggcccagggctcggatgcttctgcctcaggtagctcttgagctgggggcaggcctctctgggactccagttcctcgaagggtagacggcagggagcttgaagcccattcaggcctagggtgccgttccctcaggggcccttcgagcccagtcaggcacccgggccgtcccggcagtaaatgcccaggcgtttcccgcaacaccagcaccaccctctgggcaagggtctcgaagtagtggacgctagaggcagcctgggccctgtgggcaggaaccttgggtggggtatggcaggaaaggggtcctgggtcctcacgggaagcacagcaccagagcttgctggcgcacagcaggaagtctgtgcagtagcctggaggcacagtcaggtcctggcggtatttctcctccccccagcacgtggcgcaacccctcagcctactatgtccttggtgactgtacttgcagcgggcacggtccggtgatgagaggctggggaaagatgggcacttgcctgccttcggggaaggcggggacccccggtatccctgggagctccagctccacggccgtgtccagcagggagaggtagagacgcacaatcagagcattgaggggtgcccactgatgtagttgatgaagccagggggaaaaaacaaagtggcagggctctgaagggcaggcaccgcagttggcacagtgacatcaagatgttgactgtagccaggggtgccacccctgcttcccgagccaggatcctctcaaaggcagggcaataaactgctgttccaggggcaggtagttcagtcgcccaaagggcaggaccaacttctgtaccaccttgctgctgagttgcgtttcctgaaccaccaggaagtgggcaatggcttccagaagctggggctcccgcaaccggtgccgggccaggtgctgggccaggagcaccatcacgtggggagtcagttcctctggccttgcctctgccaggctgctgatcagatgctgccgtggataccgcagaaaacgggggcagcttagagcagcttccaacccttgcccacctcggagaaggggctgcaaagggggaggtggcttcggcagggcagcggagccttcgctcctgttccagggcacacaccaggggaccatcagatggaaagccaagtaagactgcaaggtgcagacacacgtggatggtgtgaatgtcaaaggaggggcagtttcggatgatgagctgactcaagtcctgcagtgtgacctgctccacaggagggggccgtggccgagaccccaagagctggcccagacgacgaagcgccaccgagtagtggtgggcgcgcaccttgctggggttctggcccagccagcgcagcagctccccagggctcttcgcctgttccagaagccgctgcagtccttgcacaggacctgcactggggcctcctccaacaggccggtccccccatttgctgggccccaaacagcagggctgtactggagggatcagcagcaggccagacagccgagcaggggaggtctgagcagagagcaggactcgaagcatggagttgggtgatggagaccatgactccccgggccctgcgcaggtcgctccctcagtcggtctcggggcccgggggccgggttccccccgcggcctcctcatcggctagccaccgagtccgccatcttccccctcgtgccgaattcgaatcga

SEQ ID NO: 89564 - DNA, 1837 bp, Homo sapiens
ttttttttttttagcattcaataaatatttattataattaaaagaccgtagcaatacccccaccaccaagacccttcacccagaaatagagagattggaattgtaaacaccgtatccagttctgaccaccctgaaagccagggcatcatcgcgcccgttttgtcctaaatgaagggctcccggacaatgtcctcgaaagtggcagatgacctcatcttcccactgtccacagggcacagggcagaccggggtgctctatggggtccctgccgatgcctgggtcccaggggtgttccccaggtggtcaggcaaggacacgcggtcattctgcctcctgcgtcttgtcctcgggcgcctgggaccctctctggttccacaatgtgtttgtttcagccccagctggtaaccatctgtgcgtggtggataatgagggggttgccagcccttgggctctgaagggggtgcggttgaggccgtagggaaaggcttggggactgccgggaaaggcagtgactgtggaaaggctgctggctgtggggagggcggtgggggggtgccagcctgccatgcgtgcaggggtggcggctgcgggcaccccggccaagtgggaaagggtggcggggctcccaggggcacctggcccccaaagggcattcgagccccatagggcgccccagtcccaaatgacatgtggctcccaaaagccacctggagctgctccatctgtgcctggtaggacaagtagctctggaggtaggctgagtaggctgcgttcagtgccgccgcctgcatccgctcaccatccaggtgttggctctgttcccgcagggctcgggtgtcctgttccttcctccacatggcctttcgggcctgaagcctgtggggcttgaaggtgttggccaccttcctggcgaagatctgggagtgttcgtccagccgcaccagcccggagagcaggctggccgtgtcggagctgagccgggccggggagctctccatggggcaggaacggggatgacacagtcttgcgacccctgtcgctgtgaggttgctcatcatggcttggttcacctggtgcaggctcacggcgacagtcgaacgttggacggtgagaagtaggatgatgaaagctgagtggtctatggcgtcctgcaggcagctcagctccccgcgccccggcacctggaaatcctcgcagaaggtggccccgtcgggcacgccaagggcctcccagcttctccccgaaacccgcagggcgatgtgttcgtctgccctggcgtggaggatcacaaagttatagaatttctgttccgatgatgattccagggaggaagggaacagggaggagggggtcaggtgagctgaacaaggagtagatgaaggaggaggaggaggaggaggaggggatgtttctggggtggtaggagtaggtgggcacggcttggtatttggagaggtggtatcttctacagaaagttggagtggcgtctggtctttgacagagcaggggtttttgaccggctccagaataggcaaggggagagactgggggcctgcagacccctcggtgcactccactgggtagttggtgctggtttctggagctgcgggggtatcagggaggccagtggaggttgcatctggggccacttcgggaagcccaggaggtgggctgcttggcagctctggtgggctggcaatctcccccgatggcggccagctcatctcctcaggctcctggcagccaccggggacaggctcgggcaccaagctggcctgggggtcgtcacagagcttgctgggcccatgtgggctgcggtgcacgctgaggaagggg

SEQ ID NO: 89565 - DNA, 2617 bp, Homo sapiens
caagggccctttacattgcgttcttaacggttcagtcaccttaaccgttattattcacttgcgggcgagaagtccgagctagggatcctgaaaaggagggaacaattgttgtagcaggtctaaaagttcaggtccagccccggtttctctggattctgtgcttctccatggaggaaactcaaggagaactgacaagttcttgtggttctaaaaccatggccaatgtatctttggcatttagggatgtgtccatagacctctcccaagaggagtgggagtgcctggacgctgtgcagagggacttgtacaaggatgtgatgttggagaactacagcaacctggtctcactggatttggaatacaagtatattaccaagaatttgctttcagaaaagaatgtttgcaaaatctatttatctcaattgcagacaggggaaaaaagtaaaaacaccatccatgaggacaccattttcagaaatggtttgcagtgtaaacatgaatttgagagacaagagagacatcagatgggatgcgttagtcaaatgctaatccaaaaacaaatatctcatcctctacatccaaaaattcatgctagagagaaatcatatgaatgtaaggaatgtagaaaggcctttagacaacagtcataccttattcaacatctgagaattcacactggtgagagaccctataaatgtatggaatgtggaaaggccttttgtcgagtgggagaccttagagtacatcacacaatccatgctggggagagaccctatgaatgtaaagaatgtgggaaggcctttagacttcattatcaccttactgaacatcagagaatacattctggtgtgaaaccctacgagtgtaaggaatgtgggaaagcctttagtcgtgttagagaccttagagtacatcagacaattcatgctggagagagaccctatgaatgcaaagaatgtgggaaggcctttagacttcattatcaactaactgaacatcaaagaattcatactggtgagaggccttatgaatgtaaggtttgtggcaagacctttagggtacaacgacatattagtcaacatcagaaaattcatactggtgtcaaaccctataaatgtaatgaatgtgggaaggcctttagtcatggctcataccttgttcaacatcagaaaattcatactggtgaaaaaccctacgaatgtaaagaatgtggtaagtcctttagttttcatgcagaacttgctcgacatcgtagaattcatactggtgagaaaccctatgaatgtagagaatgtggaaaagcctttcgtcttcaaacggaacttactcggcatcatagaactcatactggtgagaaaccctatgaatgtaaggaatgtgggaaggcctttatttgtggttatcaacttactttacatctgagaactcacaccggtgagattccctatgaatgtaaggaatgtggaaaaaccttcagtagtcgctatcatctcactcaacactacagaattcatactggtgagaaaccctacatatgtaacgaatgtggaaaagcctttcgtcttcaaggagaacttacccgacatcacagaattcatacatgtgagaaaccctatgaatgtaaggaatgtgggaaggcttttattcatagcaatcaatttatttcacaccagcgaattcacaccagtgagagcacctacatatgtaaagaatgtgggaagatttttagtcgtcgctataatcttactcaacattttaaaattcatactggtgaaaaaccctacatatgtaatgaatgtgggaaagcctttcgatttcaaacagaacttactcagcatcacagaattcatactggtgaaaaaccctataaatgtacagaatgtgggaaggcctttattcgtagcactcatctcacgcaacatcacagaattcatactggtgagaaaccctacgaatgtacggaatgtgggaagacgtttagtcggcactatcatcttactcaacatcacagaggccatactggtgagaagccctacatatgtaatgaatgtgggaatgcttttatttgcagttatcgacttacattacatcaaagaattcacactggtgagcttccatatgaatgtaaggaatgtggaaagacctttagtcgtcggtatcatcttactcaacattttagacttcatactggtgagaaaccttatagctgtaaagaatgtgggaatgcctttcgtcttcaagcagaacttactcgacatcacatagttcacacgggtgagaaaccctataaatgtaaagaatgtgggaaagccttcagtgttaattcagaacttactcgacatcacagaattcatactggtgaaaaaccctatcaatgtaaagaatgtggaaaagcctttattcgtagtgatcaacttactttacatcagagaaatcatattagtgaggaagtcctatgcataatgtaaagagaatacgatggcctttagaaaatgccctttagcagagaatttgtaatttaagaaattttctgtttgttacggaacatgtgggaatcccttttacttcatgctcacaatttatcagaaattatttcgtatgttaaagagtcgaaaga

SEQ ID NO: 89566 - DNA, 2282 bp, Homo sapiens
aatgaaggtggacacccaaatagccccaatacaaatgcctgttcaatcaaccaaacatctaagcagcacatctatgtggtagcatattgccaggccgtgagactgcgaatataaataggaaccgcccctcatctgcaggcgctcacaacctagttagcaaacagtaaaacaattaagcgcgccgtggacataggcccacttgtcctgggaaatgaggggaagctggggtttgcagtggtttgattgaagggggactacatgttagaggcacagactgggtgcaggtacacccaaaggaacgagaagagtggaaggaaacaacatccacaaagtaaccacatgctggcgtatcgaaggccgtgatttacggttttgagactttacctcgccagcaaaggggggccagtctgttagcggtgcagattggaggggtgacattggaagctgtccaggaaaaagaaaatggaactggggagcagaaggcctacgcaagagggcgggacagacaggacttgtgactagtagctctggactgaggaatcctccctgctttctggtgcgggagagctagtggatgatggtgccaataacctggatggggaaagtaagctccctcctggaatgcttcattcacaacctccattttcagcaacatcccatctactggtgcttcctggtcgagatacaagtttcctgaaactgctgctctgttttgggcctcacccggccaacagctcactagctggcaagcagtagtatcaagatggcggccccctaggactggctagtcatgtgacctcgggtttcccaagtttgaagcccggcagtcctttcgggggcaaggttcacctgtcacgaaacgagtgtcaccccttcgactctcgcaagccaatcggcatctgagactgggccactgcggtgaggcgatcggaagattggtcctttccagtcgcctagctagggccaatcacggagcgtcccatacttcgcgggcccgcccgtaggccggggagaagcaggaatatcgtcacagcgtggcggtattattacctaaggactcgataggaggtgggacgcgtgttgattgacaggcagatttcccctaccgggatttgagaatttggcgcagtgccccgccttagaggtggggccttatttgattgccaagtaatattccccaatggagtactagctcatggtgacgggcaggcagcttgagctaatgagtcctcggcgtggccggcgcagctctccaatcgccggacggcgggccccagtctgagcggcgatggcggcggcggcggcggcggcagcgggcggctggggctgcgggcggtcggggctccgggccggggcggcggcgccatcttgtgcccggggccggtggggaggccggggagggggccccggggggcgcaggggactacgggaacggcctggagtctgaggaactgtagcctgaggagctgctgctggagcccgagccggagcccgagcccgaagaggagccgccccggccccgcgcccccccgggagctccgggccctgggcctggttcgggagcccccggcagccaagaggaggaggaggagccgggactggtcgagggtgacccgggggacggcgccattgaggacccggagctggaagctatcaaagctcgagtcagggagatggaggaagaagctgagaagctaaaggagctacagaacgaggtagagaagcagatgaatatgagtccacctccaggcaatgctggcccggtgatcatgtccattgaggagaagatggaggctgatgcccgttccatctatgttggcaatgtggactatggtgcaacagcagaagagctggaagctcactttcatggctgtggttcagtcaaccgtgttaccatactgtgtgacaaatttagtggccatcccaaagggtttgcgtatatagagttctcagacaaagagtcagtgaggacttccttggccttagatgagtccctatttagaggaaggcaaatcaaggtgatcccaaaacgaaccaacagaccaggcatcagcacaacagaccggggttttccacgagcccgctaccgcgcccggaccaccaactacaacagctcccgctctcgattctacagtggttttaacagcaggccccggggtcgcgtctacaggggccgggctagagcgacatcatggtattccccttactaaaaaaagtgtgtattaggaggagagagaggaaaaaagaggaaagaaggaaaaaaaaaagaattaaaaaaaaaa

SEQ ID NO: 89567 - DNA, 2221 bp, Homo sapiens
tttcgtgttttataagaaaggtaaagtaaaggaagctgcccagcgctaccagtacgccctgaagaagttccctagagaagggtttggtgaggacttgaaaactttccgggaactaaaggtgtctctcctcctcaacctctctcggtgtcgcaggaaaatgaacgattttggaatggcggaggaatttgctactaaggccctggagctgaaaccgaaatcttatgaagcttactatgcgagagcaagggcaaaacgcagcagcagacagttcgcagcagccttagaggacctgaacgaggccatcaagctgtgtcccaacaaccgtgagatccagagacttctgctgagagtggaagaagagtgtagacagatgcagcagccacagcagccaccgccgccaccgcagcctcagcagcagttgccggaagaagcagaacctgagccacagcatgaagacatatactctgtacaggatatattcgaggaggagtacctggaacaggatgttgaaaatgtttccattggcctccagacagaggcccggcccagccaggggctcccggtcatccagagcccaccctcctctcccccgcatcgggactcagcctacatctccagctcacctcttggctctcatcaggtttttgacttccggtccagtagttctgtaggctctcccactagacagacctatcagtccacctcacctgccctttctccaactcatcagaactcacattacaggcctagcccaccacacacttccccggctcatcagggaggatcttaccgtttcagcccccctcctgtgggaggacagggcaaagaatacccaagccctcccccttcccctctccggagaggccctcagtatcgggccagccctccagctgaaagtatgagtgtctatagatcccagtctggttcacccgtgcgctatcagcaggaaacaagcgtcagtcagcttcctggcagacccaaatctccattatccaaaatggcccagcggccctaccagatgcctcagctccctgtggcagttccccagcaagggctcaggctacagcctgccaaggcccagattgtgagaagtaaccagcccagcccagccgtccattcaagcaccgtcatccccacaggagcctatggccaagtagcccattcaatggccagtaaataccagtcttcacaaggagacataggagtcagccagagccggttggtttatcaagggtcaattgggggaatcgtaggggatggaaggccggtgcagcatgtccaagccagcctgagtgcaggcgccatctgtcagcatggaggattgaccaaagaggatcttccacagcgaccttcctcagcataccgaggtggcgtgagatacagccagacaccacagatcggacgcagccagtcagcatcctattacccagtctgtcactcaaaactagatctggagcgctcctccagccaactaggttcccctgatgtgtcgcatttaatcagaagacctatcagtgtcaaccctaacgaaatcaaaccgcacccgccaactcccaggccgttgctgcattcccaaagtgtaggccttcgcttctctccatctagcaatagtatctcctccacctccaacctaactccgaccttccggccatcttcttccatccagcaaatggagatcccactgaaacctgcatatgagaggtcatgtgacgagctgtcgccagtgtctccaactcaaggaggttaccccagtgagcccacccgatccaggaccacaccattcatggggatcatagataaaacagcacggactcagcagtacccccacctccaccagcagaatcggacctgggcagtgtcatctgtggacaccgtcctcagtcccacgtctccaggcaacctgcctcagcctgagtccttcagtccaccatcatccatcagcaacattgccttttataacaaaaccaacaatgcacagaatggccatttgctggaggacgattattacagcccccatgggatgctggctaacgggtctcgtggagacctcttggagcgagtcagccaggcctcctcctatcccgacgtgaaggtagctcggactctacctgtggctcaggcataccaggacaacctgtacaggcagctgtcccgagactctcggcaagggcagacatcccctatcaaaccaaagagaccgttcgtggagtctaatgtttaa

SEQ ID NO: 89568 - DNA, 398 bp, Homo sapiens
gggttttctccctaagatttataactagacaaggatgcccactctcagctcttttaattatcattgtgttggaggtcatagctagcgcaataggagaagaaaatgaaataaaagaaatatagatcgaaaaagaagcaataaaactgtctgcttgccgatgatatggttgattgcacagtatgtcctaatgactctacaaaacacctatgaggaatactaaatgaatttggcaagaatgcaggatatattgttgatatgcaaattcaaatgtatttttagatgctagtacaaagaagtggaaaaataatttttaaacttccacttacaatgtcacgatgaaacacaaaatacttaggaatacctttaacaaaatgcatgcaaagatgtgagggtgaccg

SEQ ID NO: 89569 - DNA, 345 bp, Homo sapiens
gcaacggcggcctccaggcctcaggccccctcaccaccctagaggtcaagatcagctctggctagttctcacaggtctgacccaacaagtagcactgacatttttacgtttgctggatgtacacacggaagtggaggaggaggaggagaaggaggagggcagctccttagctcaagagcaagtggcccaaggcctcagaagactagaaggaagttcctggccattcagcatggtttcccacgggtcctcgccctccctcctggaggccctgagcagcgacttcctggcctgtaaaatctgcctggagcagctgcgggcacccaagacactgccctgcctgcatac

SEQ ID NO: 89570 - DNA, 906 bp, Homo sapiens
ttttttttttttaagatcctcatcaataaatggagacgtataggaaaagtcagattacgtctacaaaatgtcagtatcatgctgcggcttcaaatccgaagtgatgttttgatgtgaagtgaaattttagttgtcgtagtaggcaaacaataaggaatgttgatccaataattacatggagtccatggaatccagtagccatgaagaatgtagaaccatagataccatctgaaatggagaatgatgtttcaaagtattctgaagcttggaggatggtgaagtaaagtcctagtataatggtaattagtagggcttgatttatgtggtttcgtttaccttctataaggctatgatgagctcatgtaattggaaacacctggatgcttagaagttactggaagtatttaagtaggtggggacttcctagaggggttaaagtgggtggaaattccttgttgggagggtcagcagccttcctagatccatgtgttggtaccgaggcttagaatgatagaacggctcaggaacgaatcctgcaaagaaaaatacttccgagaccgatgaatagaattataccatatcgtaggtcctttttgtacaataggagtgtggtggccttggtagggttccttcacggaattacgtctcgtcatcaattgatatattgtgaggatattggtgagtaggccaagggttaatagtgtaattgaattatagtgaaatcatattactagacctgatgttagaaggagggctgaaaaggctccagttaaatggtcatggacttggattaactatgtgatatgcatgagtttggtgggtcattatgtattatcatgtagatataggcttactaggagggtgaatacgtaggcttgaattaatgctactgcaaattctagaatt

SEQ ID NO: 89571 - DNA, 431 bp, Homo sapiens
  misc_feature (1)...(431): n = a,t,c or g
ttcttttttnnnctcgtgtggcgtgaattcttatataactgacacaaaacactcgacatctgaatggtgaggacagaggaaagaatcattaaacttaaacatagaaagtacccagtgggaacaagtgagaggacatagacggtgaaaaacagcaagagccccagggatctgtgggactgagactgtaacagaagatccagaattcatgtcatcagagtcctaggaggaagacagagtgagctttagggctgaaaatgtacttggagaaataagaactgaaaacttcccaaatttggcaaaacggacaaacctaccgagtcaataaactgagcaaaccctatataggaaaaacccaaagaaattcaaacctaaacacatcaaagtcaaatttctaaaaaccagagataataaaacattgccagcctggccaa

SEQ ID NO: 89572 - DNA, 415 bp, Homo sapiens
ataaagtctggtggaattcgttattgctgacatacttgttaatgaacagttcactcaaaattatcttagttacctttacctctgttatatccatttattttccccaaatgttgattaaatacctactttgttttattcattaggctttgaaattaaaaaacaaagaaaagagagccttggtattgcatttcagaattcacagcataagtgtatgtctgtgtgtatataaaatgaataatatatctatgttatagagataatttgtattatatgttgatattgtatatgaatatacatataatacatcagagaaaacaagatataattgatctaaaatgaagtgtggagtcagatctggatacaaatttccatgcaagctcttaatagccgtgtgacttctggcaagttatttaaa

SEQ ID NO: 89573 - DNA, 3100 bp, Homo sapiens
  misc_feature (1)...(3100): n = a,t,c or g
ttttttttttttaactcatctgtatttgttacaactttaagcagaatgtgactcgagcactacatttccatccacaagactgggtctgagttatttttgaacagctttacgatatgcttaggtaggcttttaactttgctcctccaaacaatacttttctttggaaaacaagccctgtggagagatccttccatcaagttgcttcagtttaacctatttctagaggactagtacatgcagaattgtcaactacagggaatgaaaagttcaaaaagtagatcctacaagatgtaacgaatacttttctaaacatcaagatacagctcagaacacttcaataacaagatttggtctacttaggcatccggcttgacagctaaacactttagaccacacaaagttaacatcatgttacatacgtcttacagtgcacgttaccccaatctgtgaaaataaaccaacatgaaactcaaaaagcattactagctctgctttagtgcctaaggtatcacagcatcacttagtagacagaaatcttatcttccccttaaagtagttttcatgccatacagactttttctttatttttgttaatattaaagaaaaacatccttgaaaatatattttcagaggaattgtagagtactgaacaggtaagtcatccctcagccagagattagtctacttcttccatgcgtgatgtgtcgtcatctccttcaaggggtggcatttcttcagttacagcagcactggtatcatcagcagtagggtcatcttcgtcaatacccagaccaagtttgatcatcctgtagatcctgttagcatgtgtctggggatcttccagactgaagccagaagacaggagcgcagtttcataaagcaagatgaccagatccttcacagacttgtcgttcttatcagcctctgccttttgccttaaggtctcaataatggaatggtcagggtttatctccaggtgtttctttggctgccatgtaaaccccattgttgaagttgtctccttaagggcttgaagctttccatgaattctctcccatgtttgctgtccagccaatatgtgcttgtgacaaatacagccatggagatgtcaaccaatctggtttgacacaaccaccttttcaacttttttctccgaatatgtctttcatgattttgcagaggttctcaaactttttttttttctcttcctgcttctttttctcttcttcaatcctctggaagttcccaggccttctttggtgactgacaactaaagtcttcccctcaaaattccttccagctgtgggacacagtactcatcaatgggctcaatcatatagatcactttctaagcccatgtttcccgaaagaacgttcccacaaaaggctgagttaagctacctggtcccttggtctcacctgtgatataatagatatgtttctggttctccttcattctggtgcagtagtccttgagagaaaccatctcatcaccagaggcagatgtgtagtaccttaacagctctgaaagcttcttccgattttgagagtcttcgtgtattccaaggctttaaggtttttaagagaactgctcatagaatttcgttgtagttctctttatcttccgccagttcagtaaagagttctaagcattttttggacccaaattcttcctggataactttcaaaattttggcttttgttgcaacatctcacggggatatgttttagaggggagatcctccggagtctaccacccctcttaatgaagttccagataattcaggggattaggctcctcacaagttatccatggatggaaaactccngcggtacataccaatttgaatattgttctttttcgtttctgttttcaaaacagatcaaaagggagcacggtcggtgggacaaattggaagggctctgaattccaaactgtccttcaaactggaaaaaggcttcaacctgcccaaggggatcttccccagtcaattgggtcaaagctcttatagaattctcccgtactccctcaattaggtaatatcgtcggggaattcctggtcccaaaagggctttgttttggttggagctccttccttggatcgatgtaacttttccttaaatcttccttcttcttccttcttgtcacccatccttcttttctttcttcctcatcaaaaccaacatacttccatttcaagggttgggctttccgactctttcgtcttctcttctcttttcctttcttatttggcattccttttcttcagcctcatcatcgcttacttctttatcacgttccttctccacaaaaagagtaatgggatatcccaataaactgagaatgtttcttcacaatctcctttattcttcgttcctccaagtactcagtttggtcttctttcaggtgtaggaataacttttgttccaacggacccataggttcaccctgtgtctgtcctcactgtgaaatgatcccccctgctgaggactccccaaggcgtactgctcatcatcgttatgtttgggggatcacacgttactttctcaggcaaccaaataaggcaggaataaaaaccaacacccgaacgggcccaatcataggaggatatctggcacccagcctggcaaaagcttcccatgaaccgctttgggtccccaggacttggggggataagtaccaaggttaattgatcaaagtcagcccttgggtcaattcccaattcccagtatcccacaaatagtgaagagttcgaatcttgtttgttccggtaataaaggttaaatatgcaagctctttccccagaggtctaattgaatggggatcgtgtcaagcgttcaatactgggattttgtcccaatgcatctgatgaatttgaaatgagctactctcaggaaagatctctttgttcgagtagaaagtattgatgatcaatgacatcaactggggcaatttcctgcctgaaaggcgaacgtcttcaacctcctcctcctccatcggttgttcttgggtctgggtttcctcaggcatcttggctaagtgaccgcacaggaccagagcgcacagccacaccgggacgctgaagcaactgacgcgcca

SEQ ID NO: 89574 - DNA, 824 bp, Homo sapiens
atgacattttgcagcttcaggcttacatccaagccatctcaggggaaagaatgttcctccccccatagtttgactgaaagctccaaggttatttggctgggcctgattctagtcacacggccatccctgtagccaggagagtacaaactgagggagtaggggttgaaacagccccatgcaaaccaaaaggactggtgtatttcaaaggggaaatcaagttgatgccatcagaaggaaggatatggctgctggccccaaaatacagatgtctgttactgacatataaattaaacctgtttattgaaaagtgctgacaaatgcttttttaactttataaaagtgttcaacacatttgactaaaaccatgtaattaatatctgtaaaaagaaggaaaaaatgtaaagtgtagaatcatggagctgacctcctagccttttttcccacctagtagagaaattcacaatttcagtgttcctactaagaagtatttcaacttccatttgagttcctctaggcatgttgtatttattacttcatagggaagtatattacatttttttttctttgagacggcatcttgttgtcacccaggctggagtgcatggtgcagtcacggctcactgcagccttgacctcctgcgcttaagtgatcctcctgcctcaccctcctgagtagctggaaccacaggctcgccaccatgcccagctgatggtttaatttttttttgggaacagaccgttcataattatggttgcccaggcttggtcttgaattctgggccttaagcccatctgccttgcttaaccctcccaagggggggggg

SEQ ID NO: 89575 - DNA, 1468 bp, Homo sapiens; identical to SEQ ID NO: 75034

SEQ ID NO: 89576 - DNA, 3192 bp, Homo sapiens
ctcccaggtgcgcgcttcgctcccggagccgcggaactcggcggccgccatggcgtccaacatggaccgggagatgatcctggcggattttcaggcatgtactggcattgaaaacattgacgaagctattacattgcttgaacaaaataattgggacttagtggcagctatcaatggtgtaataccacaggaaaatggcattctacaaagtgaatatggaggtgagaccataccaggacctgcatttaatcccagcaagtcatccagcttcagctccctactccctccttcctcccttccagcgtttcgacctgtaatgcccacccagggcagattgtaggaaagggcaacctcggatgctggatttcagggttgaatacagagacagaaatgttgatgtggtacttgaagacacctgtactgttggagagattaaacagattctagaaaatgaacttcagatacctgtgtccaaaatgctgttaaaaggctggaagacgggagatgtggaagacagtacggtcctaaaatctctacacttgccaaaaaacaacagtctttatgtccttacaccagatttgccaccaccttcatcatctagtcatgctggtgccctgcaggagtcattaaatcaaaacttcatgctgatcatcacccaccgagaagtccagcgggagtacaacctgaacttctcaggaagcagtactattcaagaggtaaagagaaatgtgtatgaccttacaagtatccccgttcgccaccaattatgggagggctggccaacttctgctacagacgactcaatgtgtcttgctgaatcagggctctcttatccctgccatcgacttacagtgggaagaagatcttcacctgcacagacccgggaacagtcggaagaacaaatcaccgatgttcatatggttagtgatagcgatggagatgactttgaagatgctacagaatttggggtggatgatggagaagtatttggcatggcgtcatctgccttgagaaaatctccaatgatgccagaaaacgcagaaaatgaaggagatgccttattacaatttacagcagagttttcttcaagatatggtgattgccatcctgtattttttattggctcattagaagctgcttttcaagaggccttctatgtgaaagcccgagatagaaagcttcttgctatctacctccaccatgatgaaagtgtgttaaccaacgtgttctgctcacaaatgctttgtgctgaatccattgtttcttatctgagtcaaaattttataacctgggcttgggatctgacaaaggactccaacagagcaagatttctcactatgtgcaatagacactttggcagtgttgtggcacaaaccattcggactcaaaaaacggatcagtttccgcttttcctgattattatgggaaagcgatcatctaatgaagtgttgaatgtgatacaagggaacacaacagtagatgagttaatgatgagactcatggctgcaatggagatcttcacagcccaacaacaggaagatataaaggacgaggatgaacgtgaagccagagaaaatgtgaagagagagcaagatgaggcctatcgcctttcacttgaggctgacagagcaaagagggaagctcacgagagagagatggcagaacagtttcgtttggagcagattcgcaaagaacaagaagaggaacgtgaggccatccggctgtccttagagcaagccctgcctcctgagccaaaggaagaaaaatgctgagcctgtgagcaaactgcggatccggacccccagtggcgagttcttggagcggcgttcccctggcccagcaaccaagcttcccagattgtctttgattttgtagctttccaaaaggatttcccatgggatgagtacaagttactggagcacctttccttaggagagacgtaactcaacttggacccaaataaatccattattgggaggtaaagttgttcccttcaagaaaacccttttcccttggaagccaaaagagtaaacacggcccagcggtggaaccagccattccttgacaagccagcagcctgcgtcaggagaagggctcctcgccaacccacccacacgctcgtctcactcaattcaatgtcacacttctgcctcttgcaaaattgctggaaaaagtaataataaatatagctacttaagatttcccatccatgagtatatattcccaacccttattacagagaattacaactctggcaccctcccctaccccctgcacttcaccctccttcaatgacgaatgcattgttcaagtgtgagtgatcactaaatagaatttttacctctccagtgcccatcttttccccacagtgtctaggacagttctgtctgttctgtgacaccaggatgctgtatatttgatatatgtctttttattttcatgactgaatttctacttcatcacctaattttaaggggcagagggaaaaaaagtcaaatgagacattgtcggcatggagattaaacattgtaggaaaaaagtataccatttttgttagaactttctgatggctttactaagatgtcaggttttgtttgaggactgaatttgacatatatgcaagatatttatttactgctgctgccttgggtctccaggttctacctaggaggtatttgctgttccattgcagcatagggaaactgttcaagcacacaatgtgaatgttgagatcatgtgcagagaggccagtaccaaaacttcagtatctggcccaatggcaagaggctactgttaggtttgcatttgggcagttagaacctcacagataccagctcccaagttgctagtccatcagtgtaaactgaacacaattctctcttgctttctctctctctactccctcacacatttggaccttgtcacttgggtgtttaaggcaccttgccctattcaacaaaatctggatggaggcagccccatgggacttttcctgtaataagggaacttggctctaactattttatttctttttaaatgttttagtatttggatattgggattcaaatgaaaggggatctcattctgtgggctggaaaatcaggacttcatatgttgaggagagcaaacttggggactcaactcagaagacatgtgttgcctgaaacctgcatataataatttttgatttga

SEQ ID NO: 89577 - DNA, 1417 bp, Homo sapiens
cttccctcccggcagcagcatgcgggggttgctggtgttgagtgtcctgttgggggctgtctttggcaaggaggactttgtgggggcatcaggtgcctccgaatctctgtagccgatgaggcccaggtacagaaggtgaaggagctggaggacctggagcacctgcagctggacttctggcgggggcctgcccaccctggctcccccatccgacgtccgagtgcccttccccagcatccaggcgggtcaaagatcttttctggaagtccccacgggcatcagctatgagaccatgatcgaggaacgtgcaagtcgctgctggacgaggaacaaggagcagatgttcggccttccggtcccgggcgcgctccaccgacacttttaactacgccacctaccacaccctggaggagatctatgacttcctggacctgctggtggcggagaacccgcaccttgtcagcaagatccagattggcaacacctatgaagggcgtcccatttacgtgctgaagttcagcacggggggcagtaagcgtccagccatctggatcgacacgggcatccattcccgggagtggggtcacccacggccagtgggggtctgggtttgcaaagaagatcactcaagactacgggcaggatgcagctttcaccaccattctcgacaccttggacatcttcctggagatcgtcaccaaccctgatggctttgccttcacgcacagcacgaaatcccatgttggcgccaagaactccggtcccacacagcaggctccctctgtattggcgtggaccccaacaggaactgggacgctggctttgggttgtccggagccagcagtaacccctgctcggagacttaccacggcaagtttgccaattccgaagtggaggtcaagtccattgtagactttgtgaaggaccatgggaacatcaaggccttcatctccatccacagctactcccagctcctcatgtatccctatggctacaaaacagaaccagtccctgaccaggatgagctggatcagctttccaaggctgctgtgacagccctggcctctctctacgggaccaagttcaactatggcagcatcatcaaggcaatttatcaagccagtggaagcactattgactggacctacagccagggcatcaagtactccttcaccttcgagctccgggacactgggcgctatggcttcctgctgccagcctcccagatcatcccccacagccaaggagacgttgctggctgctttctgaccattcattgggagcacacgtctgaatcacccctactgagcttgaccctttgacacccttctttgtcctcctctctggcccccatccaggcaaccgaaataaagtttgagtgtaccgaggaacagaaacctggggcttgcaaaaaaaa

SEQ ID NO: 89578 - DNA, 876 bp, Homo sapiens; identical to SEQ ID NO: 61810

SEQ ID NO: 89579 - DNA, 629 bp, Homo sapiens
ttttttttttttttggggagttgcaacaattcatctttatttcttattttcctctggagatgcagaatttggtatatttcaccccaggtatatttgggatagttggctcctcgctgggtcaggatggctgggtgccttctcccctggcatggttctcttctctgcaagggcgaggggcagggagctagtagaacctcgcaatgaacagcccgcaatggcagacccaatggagcccagggatgaacttggtcaatccggagaagtccagttgctcccagtgactgcagaagtagccacaaaggctgccccggggaaactccacccccattgggcaatggccgccgcgggacatcatcttgggctgctatgggaggacgagggcgattcccgcgcgcagttgaagccccatggcacttgagcaccatgggcacagcctgccatgggccaccaactcttcaatcacaacttgtagcaatcctggccaggggcaaaactacggcagagccagaggccacccctgaccactttggacacattgggtcacttgctgatttagtgagagcagaggcctccatgcctgctcgggttaattccgtggcttagagagtaagagatcctcaacttcagct

SEQ ID NO: 89580 - DNA, 651 bp, Homo sapiens
caactgtgagaccaccaccagtcaatatagtggatatttctgtcacccccaaatgattccttgtgcttctttgtagccaattccttcctccctgatgtgctgtagctacagattaggccttgaaccttggagcccaataacacctcttcgcatgtccctcaataaatttacctgctattattccctagggattttgtttttattcagtatattctttacattcctgggaaaataaatagaatatgtttcatcaataatcgtccagctttatttaataattagaatcaattatgtagaggaatcaatgtttatgatttaaaatgttcaatagtaaagccaaaaaacctggttccttattcaaaatccaagctggttgggagaaatatatacaggtggaaaagtcccaggaagatcagtttctaaaaatatgagtcatagctccctgcagtatggtgggagtaaaagtcatttttatttttcactggcaggtggcactaaaaaggggggcacatcactaaatgaatgaaaagatggatagatggatgaaagggagaagggagaaaagaccacctcacagtcacttaacttgggataattcccaatatttcacagaatgggaagagaacgaatgtcttttggacagactatacc

SEQ ID NO: 89581 - DNA, 1830 bp, Homo sapiens
cgtataaaattaatgaagaccgataggattgtaggtcacaattctggaacatctatgaaagacttacttaaatttagaagacagtattataagaagtggtatgatgctcgtgttttctgtgaaagtggggcttccccagaggaggtagctgacaaagtgctgaatgcaattaaaagataccaagatgtggactcggaaacattcatttcaacaagacacgtttggcctgaagactgtgaacagaaggtttcagcagaattctttattgaagctgtaattgaggggttggcttctgatggtggcctctttgttcctgcaaaggagtttccaaaattaagctgcggggagtggaaaagcctagtaggagcaacctacgtagaaagagcacagatactgttggaaagatgtatccatcctgcagacatacctgctgccaggttgggagaaatgattgaaactgcttatggggaaaactttgcctgctcaaaaattgctcctgtcaggcacctttcaggcaaccagttcatcctggagttgtttcatggaccaacaggatcatttaaagatttgtctttacagcttatgcctcatatttttgcacaatgtatcccaccaagttgcaattatatgatacttgtagctacttcaggagacacagggagtgcagtcttaaatggttttagtcgtctaaataagaatgataagcaaaggatagctgtggttgcattttttcctgagaatggagtaagtgattttcaaaaagcacaaataattggcagtcagagagaaaatggatgggcagtgggtgttgagtcagattttgatttttgccagacagctataaaaagaatttttaatgattctgattttactggctttcttactgtggaatatggaacaatcttaagttcggctaactccataaactggggccgactacttccgcaggtagtttatcatgcttccgcatatcttgatcttgttagtcaaggatttatttcttttggaagcccagtcgatgtctgtattcccacaggaaactttggtaacattttagcagcagtgtatgccaaaatgatgggaatcccgattcgaaaatttatctgtgcctctaatcagaaccatgttttgactgattttataaaaacaggacattatgatctaagggaaagaaaactagcacaaaccttttcaccgtcaatagatatttcttccaaatctttcaaacctagaacgacatttacacttgatggctaataaagatggacagctaatgacagaattatttaatcgattagaaagtcagcatcatttccagatagaaaaggctctagttgagaaacttcagcaggattttgtagctgactggtgctctgagggagagtgcctagcagctattaactccacctataatacttcagggtatattttggatccacacactgctgttgcaaaagtggttgcagatagggtgcaagacaaaacttgccctgtgattatctcatctacagcccattactcaaagtttgcacctgctatcatgcaggctttaaagattaaagaaatcaatgagacttcatcaagtcagctctatttgctgggttcatacaatgcattacctccactgcatgaggctttattagagagaacaaaacagcaagagaagatggagtaccaggtctgtgcagctgatatgaatgtcttgaagagtcatgtggaacaacttgtccaaaatcaattcatatgaaagctttcagagtaaatttttttttctagctataagcatgcaataataaatctcaaacactgatttggagtaaaaaaaaaaaa

SEQ ID NO: 89582 - DNA, 3486 bp, Homo sapiens
ttcccaggtgcttgctgttaccaggccatatgggttattcacagattgaaatatcttagctgggcacggtggctcacccctataatcccagcactttgggagaccgaggcgggtggatcacctgaggtcaggagttcgagaccagcctggccaacatggtgaaaccctgtctctactaaaaaaatacaaataaattggctgggcatggtggtgggtgcctgtaatcccagctacttgggaggctgaggcaggagaatcgattaaacccaggaggcagaggttgcagtgagccgagatcacaccattgcactccagcctgggcgacagagtaaggctccatctcaaaaaaataaataaataaaagttaagattcaggctggtcacagtggctcacacctgtaatcccagtacttttggaggctgaggtgggtggatcacctgaggtcgggagtttgagaccagcctggccaacatggtgaaaccctgtgtctactaaaaatacaaaattagccgggcgtggtggcacatgtctgtaatcccagctacttgggaggctgaggcaggagaatcgcttgaacccgggaggcagaggttgcagtgagctgtgatcacgccattgcactccagctgagcgacagaatgagactcaccgggcgccggacttcgccatgagcgcggtgctgggtcaccagccgccgttcttccccgcgctgacgctgcctcccaacggcgcggcggcgctctcgctgccgggcgccctggccaagccgatcatggatcaattggtgggggcggccgagaccggcatcccgttctcctccctggggccccaggcgcatctgaggcctttgaagaccatggagcccgaagaagaggtggaggacgaccccaaggtgcacctggaggctaaagaactttgggatcagtttcacaagcggggcaccgagatggtcattaccaagtcgggaaggcgaatgtttcctccatttaaagtgagatgttctgggctggataaaaaagccaaatacattttattgatggacattatagctgctgatgactgtcgttataaatttcacaattctcggtggatggtggctggtaaggccgaccccgaaatgccaaagaggatgtacattcacccggacagccccgctactggggaacagtggatgtccaaagtcgtcactttccacaaactgaaactcaccaacaacatttcagacaaacatggatttactatattgaactccatgcacaaataccagccccggttccacattgtaagagccaatgacatcttgaaactcccttatagtacatttcggacatacttgttccccgaaactgaattcatcgctgtgactgcataccagaatgataagataacccagttaaaaatagacaacaacccttttgcaaaaggtttccgggacactggaaatggccgaagagaaaaaagaaaacagctcaccctgcagtccatgagggtgtttgatgaaagacacaaaaaggagaatgggacctctgatgagtcctccagtgaacaagcagctttcaactgcttcgccccaggcttcttctccagccgcctccactgtaaaggacatcgaacctcaaagattttatgtcccagccgagggtgaagagcgacgcccgaggccgaggagcaaagagggagcacggccccgaggcctgcgacgcgggccaagatctccccccacccacgtcggaggagccctgccgtgacaagggcagcccccgcggtcaaggctcaccttttcgctgctgagcggccccgggacagcgggcggctggacaaagcgtcgcccgactcacgccatagccccgccaccatctcgtccagcactcgcggcctgggcgcggaggagcgcaggagcccggttcgcgaggggcacagcgccggccaaggtggaagaggcgcgcgcgctcccgggcaaggaggccttcgcgccgctcacggtgcagacggacgcggccgccgcgcacctggcccagggccccctgcctggcctcggcttcgccccgggcctggcgggccaacagttcttcaacgggcacccgctcttcctgcaccccagccagtttgccatggggggcgccttctccagcatggcggccgctggcatgggtcccctcctggccacggtttctggggcctccaccggtgtctcgggcctggattccacggccatggcctctgccgctgcggcgcagggactgtccggggcgtccgcggccaccctgcccttccacctccagcagcacgtcctggcctctcagggcctggccatgtcccctttcggaagcctgttcccttacccctacacgtacatggccgcagcggcggccgcttctctgcggcagcctcagcttcggtgcaccgcaccccttcttaatctgaacaccatgcgcccgcggttgcgctacagcccctactccatcccggtgccggtcccggacggcagcagtctgctcaccaccgccctgccctccatggcggcggccgcggggcccctggacggcaaagccgccgccctggccgccagcccggcctcgggtggcagtggactcgggctctgaactcaacagccgctcctccagcgctctcctccagctccatgtccttgtcgcccaaactctgcgcggagaaagaggcggccaccagcgaactgcagagcatccagcggttggttagcggcttggaagccaagccggacaggtcccgcagcgcgtccccgtagacccgtcccagacacgtcttttcattccagtccagttcaggctgccgtgcactttgtcggatataaaataaaccacgggcccgccatggcgttagcccttccttttgcagttgcgtctgggaaggggccccggactccctcgagagaatgtgctagagacagcccctgtcttcttggcgtggtttatatgtccgggatctggatcagattctgggggctcagaaacgtcggttgcattgagctactgggggtaggagttccaacatttatgtccagagcaacttccagcaaggctggtctgggtctctgcccaccaggcggggaggtgttcaaagacatctccctcagtgcggatttatatatatatttttccttcactgtgtcaagtggaaacaaaaacaaaatctttcaaaaaaaaaatcgggacaagtgaacacattaacatgattctgtttgtgcagattaaaaactttatagggacttgcattatcggttctcaataaattactgagcagctttgtttggggagggaagtccctaccatccttgtttagtctatattaagaaaatctgtgtctttttaatattcttgtgatgttttcagagccgctgtaggtctcttcttgcatgtccacagtaatgtatttgtggtttttattttgaacgcttgcttttagagagaaaacaatatagccccctacccttttcccaatcctttgcg

SEQ ID NO: 89583 - DNA, 918 bp, Homo sapiens
ccagtctgtggtattttgttgtggtggctctagcaagtgaatacagtaagcaataagcaaaaacgtttatagattgtccaaaagccttaatattcacatgcaaagccacactggagagaaactatatgaatgtaagacgtgggagagccttcattgagtcttcagtcctttctacatacaggagaaatcacgtaggagagaaattgtatgaatgtaaggagcatgaaaaagcctgtgaatgttcactatattttaatattcacatgcaagttgtctggtcgtagaccatgtgaaaatagaggagaaaaaaggaaagaaagtttcttttactgtgaacgcaaggaatgtgaccccatacaccatactggaacttggagtggactgaaatcccattaggattgtggaaaagcttacattaatgttttctaccttctagaaggtgtaagaagtcgaactggagagaagccttttacctgtaatgcatgtaggaagccttacattaattccacagaattttttttacacatgtaaaattacctcagaaccctgggaaggtaaggaatatggtataacctttaaatatttcacatgccataataagtacatgaattctgataatactgtaccgtttcttgagtagtgttagtaccttatactatcaaaataatcctaaatcctccctctcagaccttccatcattactatatttcacttttatgcctataagcacacacaaattagcatatgtaatctaatacattgtagctatttttcagaagttatcagatcaattaagtattagaaaaataaacatttttattttaccctcacttcttccttctatgctcaaagttggatgtaattcttatacttgatcctcaatacttaaagcatttccccccctctgaaaaaaaaaaa

SEQ ID NO: 89584 - DNA, 1885 bp, Homo sapiens
gggctttgataatgtgattattctttattcagaattgaaattttcataaggataatcaagtttttggcatacaaactgttattgtgatttaatgtaatttttttgagagagtcgtttgttattttttaagtaccacttttcctccaacaaggagtagtcatagcaattcagaaaagtagggaaggtgcaaggtgtgaggaatttccattctagcatgggttgtaactatcaaaattacaaaattgattttatactccacatgaaaaatgataataagtgaagaacaattttccagtaatttttcttagcaaaatagaaaacaaaataatcaataacagaaaattgtgaaaataaaaacccaatacacatgtagagaataaggatataggcactaaatataattctttaaagctgccagaacacataagggcagaagtgatgcagccatcaaagttggactgagtaaatccatcccctccacatgcaaggaaaggtttgtgatgcagagtcatttggccaggacagttggcagcagcatttgtaacctgtgaatgtctccatttttggcatttggtagcaattggctgaggcaaacccggcaaaatgttttccagctgctggaagactaactcttgcacatcctcaatgctgtgttccaagtatgtaactccaaatgggacagtggtgtgaatcacgagggaaggcccaatttctgatgactctatattgcgcttcttattatcaatggagacgaagcgtatgcagggattactggtgatgtactgcccagcccaagggacatcaatcttcgtaccagcttcataaaagaggcccagagcatatcgagaggagtagctcacagcctccagttgctgcctttggcattcactaattaaggtggtgatgtcaccttgaagctgcagaatctcaggaactggcattgtgagaacaataagatcaaactgctcaggggagcctgtttgtttggatacttcccatttgtcatctcttaggttgatctgtgtcacacgatgtctgaagtagacttctgcacctgattctttcaagtaatgcttaataattgaagaaattccttgaggtgccacaaagttacagtctccttctttcatcaccattccttcaataggcgagcttagaggcctcaaaacgccataggctaacagttcatcataaaaacgttggtgttttttggcataatgaggagtgcaggtgatgtactgagcacccaagtcagctgtgcactgaggattatgaggactgcaggctgtagtcattcttccccctgagtcctcagccttgtcccacacagcaaggtacaagggaccggacgtctgcctcctcagcagcgcagcgcacaagcttcctgtcatcccggcgcccacgatcagcacctgcgccatggcgagagggagcagcgatccgcgctgagtctctgcggcggggccgttcggcccgggctttctggaaaggcggccgaaccggcgctagcgctctttggttccgtgctccctgggccgacctgggccctgagctttcctccggccggcctgcagggggcggaaaggaggcggccggagctgagaggcccctccgtccttgaggagcaaacctggggctgcggagaaccggggctgtctgtcttctcgctttgggggccgggcgccctgcccctcgcccagaaaagcctggaaatggtgtgggctattgttgggagaacccgcctcgcaacagagctgacgttgaccacagcagagaagcagcttaacctatctactgcgataactctcatgcctgttgggatttttgctgttttactattctagatttgaaagtgggaagaagaatttaccagcgataccacggt

SEQ ID NO: 89585 - DNA, 673 bp, Homo sapiens
gtggattaccatctaagaattttgcctgccacacatactgcagtcttacctagtgccgctgacgttcgaactcagatctgcccatatagagctcaaatccagaactaaggggcacattgcttttggaatatcacatacctgccgttccttgtacaagctctggaaatggtgctgttggtcaatgtagggtggcacatagaggccaggcagattactataagcagtagaggggatatgtgctactgtctgctgcaaacctggaagtgtctggtggggttccagccctgcatttggcaaagctgcttctggagttggaacatcttgcaggaatggtgatggtattggccaaaaagaggacaaatttaatatttatttaaacagctcactcccagccccttctcaaattcccaagagaagcaatgtaccattccttcgggaagaaggcatcctttgctgtttgctgggacatcttagagactattcaaatcctgcattctcttcctttttttctagcttaactcctgggcgggccacttacttggttggggaaacttgaagccgagagaattcagcggttttgggggcttcgttcttctaatgcttggacaggcccggttccttttctgggcgaaccaaaaaagaaccactttgcgagtttccagggcttcgtgcg

SEQ ID NO: 89586 - DNA, 732 bp, Homo sapiens
atttactggcttcttaaaacgcggtggcatgtttttcacttttttgctaaagagacagaggctccaagtggtacacaagcctattagtgcatatgtttcaaatgaaatacctttttagatcaaacactacctgcttcctctgtgagacttgtgattacagcgaccatgcccactgctgagtcatcattgtcactgtgcccagcaacttgaccctcccatgcatgaggattatgctctgcggtttacagatcacattctcatgtatcatctcattgtcccaagaaagtgcaaatgaagctgccctaacagtattggcggtatgtgtcctaaaccctgtttcccatgcatgaacgctttccactgccattggaacccagggcaggtcttatatttcaagttttttgacagggactttataaattttatctcaaaccttaaaaaaaaagacatttgtgatatatgttttgcttgaaggttggctaaatcactcatccccgttaatctgagtttaaacaaaagccacttgtaccattttattttccccttccctttggcttctctcaattagtctttcttttattaagatttggcaggcagttgagaaatggatcccttccaaacagaaaggtttaggtgaaaggcggaagaacttatttaaaaaggaaagaataggccccatggggggtcacccggatcccccccctttgaggcccggggaaaacccggaccccg

SEQ ID NO: 89587 - DNA, 5664 bp, Homo sapiens
  misc_feature (1)...(5664): n = a,t,c or g
gcgcgaccgtcccgggggtggggccgggcgcagcggcgagaggaggcgaaggtggctgcggtagcagcagcgcggcagcctcggacccagcccggagcgcagggcggccgctgcagggtccccggctcccctccccgtgcgtccgcccatggccgccgccgggcagcctgtgcttgctctacctgtcggcggggctcctgtcccggctcgggcgtcagctttcaacttggaacactcgggaggacaacgtgatccggaaaatatggagaccccggggaacctcttcggctttctcgctggcccatgcactggcaaactgcagcccgaggacaagcggctgttgctccgtgggggccccgcgggcagaagcgcttcccactgcagagagcccaacagaacgggagggctgtacaagctgcgacatcacccgcccgggggccatgcacgcgggatcgagtttgataacgatgctgaacccccacgtcaggaaaggcaagggaagatcagtgggtgggggggtcaaccgttccagaggccaaggtcccagggggggnaaggtcgtttacattttgtttaaccgatattttaaaaaaagggcagcattgttaatacgaagcagggattcccgagacatctttggggcggtgttatgtcctgagtcagaatctcaggattgaagaacgatatggatgggggagattggagcttttgtgatgggcgattgagaggccatgagaaatttggcccttgccccagcaaggtgtagccagcctacttttacctaaagactttccattaacattgtatttggaagccccggggtacttaataactggaaagggattgttcgtgtagagcaaaagaataacactttttttgacatgaacatctttgaagatgggccttatgaagttggtggagagactgagcatgatgaaagtctcgttcctgttcctgctaacagttacttaggtttttctttggactcagggaaaggtattgtttctaaagatgagatcacttttgtatctggtgctcccagagccaatcacagtggagccgtggttttgctgaagagagacatgaagtctgcacatctcctccctgagcacatattcgatggagaaggtctggcctcttcatttggctatgatgtggcggtggtggacctcaacaaggatgggtggcaagatatagttattggagccccacagtattttgatagagatggagaagttggaggtgcagtgtatgtctacatgaaccagcaaggcagatggaataatgtgaagccaattcgtcttaatggaacccaaggactctatgtttggcatggcagtaaaaaatattggagatattaatcaggatggctacccagatattgcagttggagctccgtatgatgacttgggaaaggtttttatctatcatggatctgcaaatggaataaataccaaaccaacacaggttctcaagggtatatcaccttattttggatattcaattgctggaaacatggaccttgatcgaaattcctaccctgatgttgctgttggttccctctcagattcagtaactattttcagatcccggcctgtgattaatattcagaaaaccatcacagtaactcctaacagaattgacctccgccagaaaacagcgtgtggggcgcctagtgggatatgcctccaggttaaatcctgttttgaatatactgctaaccccgctggttataatccttcaatatcaattgtgggcacacttgaagctgaaaaagaaagaagaaaatctgggctatcctcaagagttcagtttcgaaaccaaggttctgagcccaaatatactcaagaactaactctgaagaggcagaaacagaaagtgtgcatggaggaaaccctgtggctacaggataatatcagagataaactgcgtcccattcccataactgccctcagtggagatccaagagccaagctctcgtaggcgagtgaattcacttccagaagttcttccaattctgaattcagatgaacccaagacagctcatattgatgttcacttcttaaaagaagggatgtgggagacgacanattgtatgtaacagcaacccttaaactagaatataaatttttgcaccccgagaaggaaatccagacaaattttcttatttaccaattcaaaaaggtgtaccagaactagttctaaaagatcagaaggatattgctttagaaataacagtgacaaacagcccttccaacccaaggaatcccacaaaagatggcgatgatgcccatgaggctaaactgattgcaacgtttccagacactttaacctattctgcatatagagaactgagggctttccctgagaaacagttgagttgtgttgccaaccagaatggctcgcaagctgactgtgagctcggaaatccttttaaaagaaattcaaatgtcactttttatttggttttaagtacaactgaagtcacctttgacaccccagatctggatattaatctgaagttagaaacaacaagcaatcaagataatttggctccaattacagctaaagcaaaagtggttattgaactgcttttatcggtctcgggagttgctaaaccttcccaggtgtattttggaggtacagttgttggcgagcaagctatgaaatctgaagatgaagtgggaagtttaatagagtatgaattcagggtaataaacttaggtaaacctcttacaaacctcggcacagcaaccttgaacattcagtggccaaaagaaattagcaattggaaattggttgctttattttggtgaaagtagaatccacaggatttgaaaaggtaacttgtgagccacaaaaggagataaactccctgaacctaacggagtctcacaactcaagaaagaaacgggaaattactgaaaaacagatagatgataacagaaaattttctttatttgctgaaagaaaataccagactcttaactgtagcgtgaacgtgaactgtgtgaacatcagatgcccgctgcgggggctggacagcaaggcgtctcttattttgcgctcgaggttatggaacagcacatttctagaggaatattccaaactgaactacttggacattctcatgcgagccttcattgatgtgactgctgctgccgaaaatatcaggctgccaaatgcaggcactcaggttcgagtgactgtgtttccctcaaagactgtagctcagtattcgggagtaccttggtggatcatcctagtggctattctcgctgggatcttgatgcttgctttattagtgtttatactatggaagtgtggtttcttcaagagaaataagaaagatcattatgatgccacatatcacaaggctgagatccatgctcagccatctgataaagagaggcttacttctgatgcatagtattgatctacttctgtaattgtgtggattctttaaacgctctaggtacgatgacagtgttccccgataccatgctgtaaggatccggaaagaagagcgagagatcaaagatgaaaagtatattgataaccttgaaaaaaaacagtggatcacaaagtggaacagaaatgaaagctactcatagcgggggcctaaaaaaaaaaaagcttcacagtacccaaactgctttttccaactcagaaattcaatttggatttaaaagcctgctcaatccctgaggactgatttcagagtgactacacacagtacgaacctacagttttaactgtggatattgttacgtagcctaaggctcctgttttgcacagccaaatttaaaactgttggaatggatttttctttaactgccgtaatttaactttctgggttgcctttgtttttggcgtggctgacttacatcatgtgttggggaagggcctgcccagttgcactcaggtgacatcctccagatagtgtagctgaggaggcacctacactcacctgcactaacagagtggccgtcctaacctcgggcctgctgcgcagacgtccatcacgttagctgtcccacatcacaagactatgcccattggggtagttgtgtttcaacggaaagtgctgtcttaaactaaatgtgcaatagaaggtgatgttgccatcctaccgtcttttcctgtttcctagctgtgtgaatacctgctcacgtcaaatgcatacaagtttcattctccctttcactaaaaacacacaggtgcaacagacttgaatgctagttatacttatttgtatatggtatttattttttcttttctttacaaaccattttgttattgactaacaggccaaagagtctccagtttacccttcaggttggtttaatcaatcagaattagaattagagcatgggagggtcatcactatgacctaaattatttactgcaaaaagaaaatctttataaatgtaccagagagagttgttttaataacttatctataaactataacctctccttcatgacagcctccaccccacaacccaaaaggtttaagaaatagaattataactgtaaagatgtttatttcaggcattggatattttttactttagaagcctgcataatgtttctggatttacatactgtaacattcaggaattcttggagaagatgggtttattcactgaactctagtgcggtttactcactgctgcaaatactgtatattcaggacttgaaagaaatggtgaatgcctatggaactagtggatccaaactgatccagtataagactactgaatctgctaccaaaacagttaatcagtgagtcgagtgttctattttttgttttgtttcctcccctatctgtattcccaaaaattactttggggctaatttaacaagaactttaaattgtgttttaattgtaaaaatggcagggggtggaattattactctatacattcaacagagactgaatagatatgaaagctgattttttttaattaccatgcttcacaatgttaagttatatggggagcaacagcaaacaggtgctaatttgttttggatatagtataagcagtgtctgtgttttgaaagaatagaacacagtttgtagtgccactgttgttttggggggggctttttttctttttccggaaaatccttaaaccttaagatactaaggacgttgttttggttgtacttggaattcttagtcacaaaatatattttgtttacaaaaatttctgtaaaacaggttataacagtgtttaaagtctcagtttcttgcttggggaacttgtgtccctaatgtgttagattgctagattgctaaggagctgatacttgacagttttttagacctgtgttactaaaaaaaagatgaatgtcggaaaagggtgttgggagggtggtcaacaaagaaacaaagatgttatggtgtttagacttatggttgttaaaaatgtcatctcaagtcaagtcactggtctgtttgcatttgatacatttttgtactaactagcattgtaaaattatttcatgattagaaattacctgtggatatttgtataaaagtgtgaaataaattttttataaaagtgttcattgtttcgtaacacagcattgtatatgtgaagcaaactctaaaattataaatgacaacctgaattatctatttcatcaaaaaaaaaa

SEQ ID NO: 89588 - DNA, 367 bp, Homo sapiens
gggtgaaggcacaagactgatgtccttggaaggtggaaggttttcatagatgaagatgtggcggctcaaagggttaccctcttctggttccttgactattgtgccctcctgggctccatcccaccctggcacccaggtctgtcagctgcctctgaactagtgccaaccccagcagctccagtcttgtggaattgttcacccctgtggtgttttgatggtggcagctggtgcatggatgtacacgggcttctgccaagtgtcggggtgaccatatcactaaggcccacatcctctcactctctggcgtcaccggattgtatgcaaaagtttaggacagtggttctccaggtgtggtccttgggcctgt

SEQ ID NO: 89589 - DNA, 355 bp, Homo sapiens
aatacagggtgggttttttaaagtggattttttcatggtctggacttgcccaattttctgtgctatgctgtgggaagggacaaggtcctaaactaccctcacaggacttaaataaagacaaagaacacatacaggtgggtgggaaggcagtcagatgactcaattctgtgcccaccacccatggcccctgatgggtcatgccttctgcttagacaacagcctcctagaccccacagatgggggcaatggcataaactcagacctgcagccgaggcctgactcaccacaatggccctgccctgcactgccagtgacagacctgtcactttctcactgatccttcattttcctatga

SEQ ID NO: 89590 - DNA, 3117 bp, Homo sapiens
atggacattttctacaaagagacccaggccaatcttccagctgggctgtgcagcacattacaccctcccatggaaaataaagcagaaggcaccggggtgcagctgctcactccagactcttggaatatcccgctaacagatgctcggaggaaggccccctccccggtggctacagctggccaaagccagggccctggcccgtcggcgtccaccaccgtctctccatctgacactgccaactgctctgtcactaaaatccccacgccagtgcccaagtccatccccatcagcgagactccaaatatccctcctgtctccgtccagccacctgctagcatcgggcctccccttggcgtcccgcctcggagccctcccatggtgatgaccaaccgcggcccggtgccgctgcccatcttcatggagcagcagatcatgcagcagatccgcccgcccttcatccgcgggcctccgcaccatgcctccaaccccaacagccccctgtccaaccccatgcttcccggcatcgggcccccgcccggtggccccagaaacctgggccccacttccagccccatgcaccggcccatgctatcgccccacatccaccccccgagcacccccaccatgcccgggaaccccccaggcctgctgcccccgccgcctccgggcgccccgctgccgagtcttcccttcccgccagtgagcatgatgccaaatggcccgatgccggtgccccagatgatgaatttcgggctgccgtcgcttgccccgctggtgccgcccccgaccctgctcgtgccgtaccccgtgatcgtgcccctaccggtgcccatccccatccccatccctatccctcacgtcagcgactccaagccccccaacgggttctccagcaacggggagaacttcattccgaacgcccctggcgactccgcggcggcgggcggcaagccaagcggacactccctgtccccccgggactccaagcagggctcgtccaagtccgcggactcgccccccggctgctcgggccaggccctgagcctggcgcccacgcccgccgagcatggccggagcgaggtggtggacctgacgcggcgcgccggcagccccccgggccccccgggcgcgggcggccagctcggcttcccaggcgtgctgcagggcccgcaggacggcgtcatcgacctgaccgtgggccaccgagcccggctgcacaacgtgatccaccgcgcgctgcacgcgcacgtcaaggcggagcgcgagccgagcgccgcggagcgcaggacctgcggcggctgcagggacggccactgcagcccgcccgccgccggcgacccaggcccgggcgccccggcgggccccgaggcggccgcggcctgcaacgtcatcgtgaacggcacgcgcggcgtccttcgccgagggcgctaagagcgcggagccgcctcccgagcagccgccgccgccgccgccgcccgcgccccccaagaagctgctgtcgcctgaggaaccggcggtgatgcgagctagagtcggtcaaggagaataacgtgtgcttccaactgccacctggacggggaggcggccaaaaagctgatgggcgaggaggccctggcggggggcgacaagtcagacccgaaccttaataaccccgcggacgaggaccatgcctatgctctgcggatgctgcccaagaccggctgcgtgatccagcctgtgccaaaacccgcggagaaggctgccatggcaccgtgcatcatctcctcgcccatgctcagcgccgggcctgaggacctggagccgccgctcaaaaggaggtgcctccgaattagaaatcagaataagtaaaaggaacgttcactcacagggtacgctcatggagagagggcgcagagcaaaccatgtcacgccatccaatgacaccagctggtcagctcaccaccccctctggctaaaactcaagcaaataaagccgcttcctgtcattaagcatctcagaggaagcagccctccctcgatggcctctagcccagagaagcccgcgcatcttggacccaccaagcaggcccagccttcctgctgccaccatctctgcttctccccagaggaacttagggatttcacccctggcttttaaaaaaaacgaaataccgacaagccacaaggaccaatgtaggtattctccccgccccatcttcaaggctcagcgactgaggctggaagatgatatggattggaacacaaaaaatctttttttaatctttttaaaaactgctgtggttttgctgctacactaagaattgtgatttgcattgtacggttttggacctatattgttcacgttttgatggcggagaggggtggtcctggaggcccaatgcttcagagtcatctctgtcctgcccgggatgcacttttaaatgaagagttagaatattttattggctaatatacttttcttgttatttttacaaaggccacctttatcctttttgatgccatattttcagtgttacacttttatggcttttaattttcgatttgacagatgtaagaagcagcatgaatagtttatactgtggtttttcagagactgaatgccaagagaactcggtaaatgtttattcttctcagctttctctttaaattcccctaaatagcgccccatttgggaacagagcaagagtgttgaactgaagaccaaaatgccctcaaggtgtaaaataatccgagggggaatatttgctgggcgtcaggaaagactcagatgaaatttcaaccctgatggttttcggtgatccaggaagtcagtgagacaatctctctatatgcagagccctttcatgataattagaatggcttggacaaaccaatgaaaacaagagggaaagtgagaaagatcacccatgattctgtttcactgtttgctttctcctgtcatggttaagagaaatgtgcaattccatcctcaatcagtgggtggaggataacagggtagattcacttgtgtgcacttgtacagttgtagctgcgaagtccaagaagtcctctagagcatgtgtactggcactgagttggtgagacagttgtgggagtatcccattctgatgagtacag

SEQ ID NO: 89591 - DNA, 1595 bp, Homo sapiens
tttcgtgggccagtcgcggccgggacatcgggcgctgcggccggggacccgctgctgagatagacagaatatggcagagctttctgagccagagggaccagtagattggaaggaacgatgtgtagctctggagtcccaactcatgaaatttagagttcaagcaagcaagatacgagagcttttagcagagaagatgcaacagcttgagagacaagttattgatgctgaacgtcaagcagaaaaagcttttcaacagaaacaaataagaatacaagaagctaaaataatagaagagaaagcagctaagataaaagaatgggtaacagttaagttaaatgagctggaattggagaatcagaatcttcgtttgatcaaccaaaaccaaactgaagagataagaacaatgcagtcaaaactacaagaagttcaaggaaagaagtcatccactgtctctacactaaagctttcggaaggccagcgcctgagcagtttgacctttgggtgctttttatctcgagcaaggagtcctcctcaagtagtaaaatctgaggaaatgagcaagatatcatcgaaagaacctgagttcactgaaggaaaagacatggaagaaatggaaattccagaaaagtctgttgataaccaagttctagaaaacaacagaggccagagaacattgcatcaaaccccttgtggctcagaacagaatcggaaaacaagaacaagctttgccacagatggtggcatctcccagaattctggggctcctgtgagtgactggagctctgatgaggaagacgggagcaaaggaagatccaagtccagatgcacatccaccctctccagtcacacatctgaggaaggggtccagtgtagcaggatgggaagtgaaatgtatctgacagcatctgatgacagcagctctatatttgaggaagagacttttggcataaagagaccagaacacaagaagctatattcttggcagcaggaggcacagtggaaagctctaaatagtcctcttggaaagggaaattctgaattaagtaaaaaggaacaagatagttcctcggatgaactgaataaaaaatttcaatcccagagactcgattattcatcttcatcgagtgaagccaacaccccaagccctattttgaccccagctttaatgccaaagcatcctaactcactctctggaaaaggaacacaattagtgccttcatcacacctgccacccccaaagttaaggattcctaatgttttcagtataagtgtagcactagccaaaaggcacttaagccagccacagttaagctctgacaggatgtttggtacaaatagaaacgctataagcatgatacgaccactgagacctcaggaaactgatcttgatctagttgatggagacagtacagaagttttagagaatatggacacgagttgtgatgatggattattttcctatgactccttggactctccaaattcagatgaccaggaacactgtgactcagcaaagaaggaaagcagaatttatgctgtagccaaatcaggtattcgaatgtctgaggccttcaatatggagagtgttaataaaa

SEQ ID NO: 89592 - DNA, 426 bp, Homo sapiens
cagaaagatgtttaacaaatacttgaagagccactatttaagataaatgagagtcctttccaatttgagcctcgcagagtggttcctacagagaagggtggcaagaagggctgttctgccatcaatgaggtggtgacccgagaatatgccatcagcgtccacaagcccatccatggagtgggattcaagaagcatacccctcagagcactcaaagagatccggaagtgtgccacaaaggaaatgcgcgttgataccagcctctacaaagctgtcggggccaggcgaataaaggatgtcccatgtcttatccataagcagtagtccagaaaacatagcgaggatgaaaattcaccaaacgagctcttatactttggttacctatgtacctgttaccacttgcagaaatcacagacaaggtggatgaa

SEQ ID NO: 89593 - DNA, 1926 bp, Homo sapiens
ctaatgcatcattcaggactctttcccacagattagtgttgagattatcacacggcttacacagtagggaggaaatgcatagccaggactcttaccaagtccggtaaataaggaatacctagatactactgtttctgtcaatgccatagacacttagatgacccgttaattttacttcatcccaacaatgaccgtgcagaatctgcgtccctgacgcaaagcaggaagcaaatatttgggcaagaaaataaagtcagttacagatttcacaagtatcttgtacaccagtctgtaatttttaattagaattagctaaaagacattgtacctttcgcgtgtatgactgagcataacagtgcttaacagtgtctttattaagtgaatgcctgaaagtattcaacattaaattcaatttatttcacattaatgtttgcaaatacatcatcaattcttacatatttcaaatcaacttcaagtacagaaggcttcctctcaaataagtctcctgaggtgacataaagactgaaagaagcctatgacttgagtccaagtctcttaaccaacaatcaccatatcgtcactggtgaactcatacgtggggacttcaaggttgagaggagcaggacccaatctgatcctgccagatgcatcatagtgtgacccatggcaagggcagtaataaccaccaaaatctcctgcatttgcaatgggtacacagccaagatgagtgcaaacacctatcaggataacccattcaggtttctttactcgatctagatcatgctgtgggtccctcaactgtgataattcaactgcagcttcctgctcaatttccttctgggttctatgacgcacaaacaggggtttgcctctccatttgaaagccatgttcttgccttctggaatatcggataacttgatttcgattttcgccagggccaacacatcagcagaagcactcatgctggaaacgaactgggtgacggcattcttggcagcatatgcgacacccacagtagttactccagttaccaaataggagaaacctttcctagcctcgctgctttctcttgaagacttcgtactatctaaaacttcaaggcggcggtattcagagaagtcaggcaccttgatgtctgtgtgggaataacaaacagaagcagggacattgaggcccacggaggcgaccaaaggccggcgcacggcctggccgctcagcgactcccggctgaggaagggccgcttcaggtccaacacaggctgctccggggtggcgggcaccgtggcctgcattcaagtgcgtcagcgcgcccgccaccccgcgggacgtggccgacaggacgggcgcgaacggccgcgagcgggctgctaccgtcaacatggcgacagccgctccaaccgccaagccggtcacaggggacgaccttccaaccacggtgcaggcgcgaggaggcgcgggacgcgtgacgacagcgcgccgccggaaaggaaattctgcagtcctgcagggcggggcaaacctggagaggcgctgcgtcgggggacggggctacaagccgtcgctgggggcggggcttgcggcccacctgtaggtcccggtgccacctcgtcagtgtcccgagagatccccagaagaacgagagggctgaacaggggaccccactgacgtccggggggccgactttacgatcctttaggatgaagaaactaagactcagagaagacaaatgacatgcccaaagacacattgataagaacgcatctggtagtggtgttcgagtccagcgttgcagcagagagatgggtaactgtatggccgaacagctgtcctctcgtggaagaaggaggccaatgtccaggagtggcaggcatactggaacttggacttctgtaggccaacctgggttccacttggtagatgggggt

SEQ ID NO: 89594 - DNA, 1172 bp, Homo sapiens
cgaaactccgtctcagaaaaaagaaaaaaaagtcagactactgcaggagctccagtggcttctgcaaatgagggcttggcaattatcagtggacggacacagagtgtccagcaccaggccatgggccttcctgcttcctgagtttcacaagtaggatgcacatgaggggtgcaacccatacctctgttgaaggaaggctgtagtactttccaggacacagcctggacgaatgatgccaaactttctatgcacagataagtcaaccacagttgagccaaggtaacactcagggatctggctatccctagtttgtcccccatcaatgaccaaggacaactgaggccagaggtcttataactccatggcattcagagaactgtcctgggagctgaggttggcactagtgagagcaagaggatgctcatacatcttggccaagtcttgcataaaggcataatcaggaatccggataccttgtaagaggagtaaagggggttaggtcgttgttgagctcctctgaacgttccatcaccagggacacttggcctggcactaagtctttcagaacctctggggggcttacttcataacaccaataacttggccttcctgcaacccttgagacggaacacaatgcgcaaggccactgaacagcttggcggggcagccaagccatgtggcattatggggggaaggctaccatggtggctggggacagctcaaccatgggtgaacactttggggtttgcccctcgcttctggccccaattggaagccaatgggggcctcggatcccgctggctggatccaatataaaaaacaggtttcccaaagggcgagttctgggctttggtaaatcgctaaaggcacatgtcgaaaaaaggacggtaagccggccacggggtaatcccttataccccccgtgtagccctagggtggacggctcgtgttcgagttgtgaccacctaactctggcgagactgtcgttgagagtaaggatgtgaggaaaagaacgtcccaacgggcctggtcctcgtaagcgctataaaggatgcagccttacgtatgctattttgtctgtaagactcggaaccgtcggggtctgatcgtagggactgagcaggcctcggggctcggtggaagatgcgtgacgcgagatggtgaggagtcgc

SEQ ID NO: 89595 - DNA, 377 bp, Homo sapiens
accaggcactgcatggtataaatcctgcctacttactctctctctcctcttgacacatgcactgtcactgattctgtgttcagcaccctggctcctaaaatataccatgcatttcttaccaacagaagtgtgtggggatgctctcaggaagggtggtcaccacctcctgaccctcttcctctcagctgttgtcttaactgactacttcctatccttcagatctcagtcaccttgtctgtcttgttatgtactattctgccagacatgtcaaagcacctgacatgtagtaggtgacaagtaatatatgtcaaaattaaccccaaaaattaaaaaagaaattaaataccataataaaatccaaaaaaggggggggcctg

SEQ ID NO: 89596 - DNA, 5893 bp, Homo sapiens
agtgtggtggaattcgctggagctggtgctgaaaaagggggtttgcagaggctgccctggggctggtgctgaaagaagagcccacagctgacttcatggtgctacaataacctcagaatctacttttcactctcaggagaacccacatgtctaatatttagacatgatggcaaactgggcggaagcaagacctctcctcattcttattgttttattagggcaatttgtctcaataaaagcccaggaagaagacgaggatgaaggatatggtgaagaaatagcctgcactcagaatggccagatgtacttaaacagggacatttggaaacctgccccttgtcagatctgtgtctgtgacaatggagccattctctgtgacaagatagaatgccaggatgtgctggactgtgccgaccctgtaacgccccctggggaatgctgtcctgtctgttcacaaacacctggaggtggcaatacaaattttggtagaggaaaaaagggacaaaagggagaaccaggattagtgcctgttgtaacaggcatacgtggtcgtccaggaccggcaggacctccaggatcacagggaccaagaggagagcgagggccaaaaggaagacctggccctcgtggacctcagggaattgatggagaaccaggtgttcctggtcaacctggtgctccaggacctcctggacatccgtcccacccaggacccgatggcttgagcaggccgttttcagctcaaatggctgggttggatgaaaaatctggacttgggagtcaagtaggactaatgcctggctctgtgggtcctgttggcccaaggggaccacagggtttacaaggacagcaaggtggtgcaggacctacaggacctcctggtgaacctggtgatcctggaccaatgggtccgattggttcacgtggaccagagggccctcctggtaaacctggggaagatggtgaacctggcagaaatggaaatcctggtgaagtgggatttgcaggatctccgggagctcgtggatttcctggggctcctggtcttccaggtctgaagggtcaccgaggacacaaaggtcttgaaggccctaaaggtgaagttggagcacctggttccaagggtgaagctggccccactggtccaatgggtgccatgggtcctctgggtccgaggggaatgccaggagagagagggagacttgggccacagggtgctcctggacaacgaggtgcacatggtatgcctggaaaacctggaccaatgggtcctcttgggataccaggctcttctggttttccaggaaatcctggaatgaagggagaagcaggtcctacaggggcgcgaggccctgaaggtcctcaggggcagagaggtgaaactgggcccccaggtccagttggctctccaggtcttcctggtgcaataggaactgatggtactcctggtcccaaaggcccaacgggctctccgggtacctctggtcctcctggctcagcagggcctcctggatctccaggacctcagggtagcactggtcctcagggaattcgaggccaaccggtgatcccaggagttccaggtttcaaaggagaagctggcccaaaaggggaaccagggccacatggtattcagggtccgataggcccacccggtgaagaaggcaaaagaggtcccagaggtgacccaggaacagttggtcctccagggccagtgggagaaaggggtgctcctggcaatcgtggttttccaggctctgatggtttacctgggccaaagggtgctcaaggagaacggggtcctgtaggttcttcaggacccaaaggaagccagggggatccaggacgtccaggggaacctgggcttccaggtgctcggggtttgacaggaaatcctggtgttcaaggtcctgaaggaaaacttggacctttgggtgcgccaggggaagatggccgtccaggtcctccaggctccataggaatcagagggcagcccgggagcatgggccttccaggccccaaaggtagcagtggtgaccctgggaaacctggagaagcaggaaatgctggagttcctgggcagaggggagctcctggaaaagatggtgaagttggtccttctggtcctgtgggcccgccgggtctagctggtgaaagaggagaacaaggacctccaggccccacaggttttcaggggcttcctggtcctccagggcctcctggagaaggtggaaaaccaggtgatcaaggtgttcctggagatcccggagcagttggcccgttaggacctagaggagaacgaggaaatcctggggaaagaggagaacctgggataactggactccctggtgagaagggaatggctggaggacatggtcctgatggcccaaaaggcagtccaggtccatctgggacccctggagatacaggcccaccaggtcttcaaggtatgccgggagaaagaggaattgcaggaactcctggccccaagggtgacagaggtggcataggagaaaaaggtgctgaaggcacagctggaaatgatggtgcaagaggtcttccaggtcctttgggccctccaggtccggcaggtcctactggagaaaagggtgaacctggtcctcgaggtttagttggccctcctggctcccggggcaatcctggttctcgaggtgaaaatgggccaactggagctgttggttttgccggaccccagggtcctgacggacagcctggagtaaaaggtgaacctggagagccaggacagaagggagatgctggttctcctggaccacaaggtttagcaggatcccctggccctcatggtcctaatggtgttcctggactaaaaggtggtcgaggaacccaaggtccgcctggtgctacaggatttcctggttctgcgggcagagttggacctccaggccctgctggagctccaggacctgcgggacccctaggggaacccgggaaggagggacctccaggtcttcgtggggaccctggctctcatgggcgtgtgggagatcgaggaccagctggcccccctggtggcccaggagacaaaggggacccaggagaagatgggcaacctggtccagatggcccccctggtccagctggaacgaccgggcagagaggaattgttggcatgcctgggcaacgtggagagagaggcatgcccggcctaccaggcccagcgggaacaccaggaaaagtaggaccaactggtgcaacaggagataaaggtccacctggacctgtggggcccccaggctccaatggtcctgtaggggaacctggaccaaaaggtccagctggcaatgatggtaccccaggacgggatggtgctgttggagaacgtggtgatcgtggagaccctgggcctgcaggtctgccaggctctcagggtgcccctggaactcctggccctgtgggtgctccaggagatgcaggacaaagaggagatccgggttctcggggtcctataggaccacctgggtcgagctggaaaacgtggattacctggaccccaaggacctcgtggtgacaaaggtgatcatggagaccgaggcgacagaggtcagaagggccacagaggctttactggtcttcagggtcttcctggccctcctggtccaaatggtgaacaaggaagtgctggaatccctggaccatttggcccaagaggtcctccaggcccagttggtccttcaggtaaagaaggaaaccctgggccacttgggccaattggacctccaggtgtacgaggcagtgtaggagaagcaggacctgagggccctcctggtgagcctggcccacctggccctccgggtccccctggccaccttacagctgctcttggggatatcatggggcactatgatgaaagcatgccagatccacttcctgagtttactgaagatcaggcggctcctgatgacaaaaacaaaacggacccaggggttcatgctaccctgaagtcactcagtagtcagattgaaaccatgcgcagccccgatggctcgaaaaagcacccagcccgcacgtgtgatgacctaaagctttgccattccgcaaagcagagtggtgaatactggattgatcctaaccaaggatctgttgaagatgcaatcaaagtttactgcaacatggaaacaggagaaacatgtatttcagcaaacccattccagtgtacccacgtaaaaaccactggtaggccagtaaattttcctgacaataaacctgtttggtatggtcttgatatgaacagagggtctcagttcgcttatggagaccaccaatcacctaatacagccattactcagatgacttttttgcgccttttatcaaaagaagcctcccagaacatcacttacatctgtaaaaacagtgtaggatacatggacgatcaagctaagaacctcaaaaaagctgtggttctcaaaggggcaaatgacttagatatcaaagcagagggaaatattagattccggtatatcgttcttcaagacacttgctctaagcggaatggaaatgtgggcaagactgtctttgaatatagaacacagaatgtggcacgcttgcccatcatagatcttgctcctgtggatgttggcggcacagaccaggaattcggcgttgaaattgggccagtttgttttgtgtaaagtaagccaagccaagacacatcgacaatgagcaccaccatcaatgaccaccgccattcacaagaactttgactgtttgaagttgatcctgagactcttgaagtaatggctgatcctgcatcagcattgtatatatggtcttaagtgcctggcctccttatccttcagaatatttattttacttacaatcctcaagttttaattgattttaaatatttttcaatacaacagtttaggtttaagatgaccaatgacaatgaccacctttgcagaaagtaaactgattgaataaataaatctccgttttcttcaatttatttcagtgtaatgaaaaaggtggcttagtatttatgaggaaattcttcttcctggcaggtagcttaaagagtggggtatacagagccacaacacatgtttattttgcttggctgcagttgaaaaatagaaattagtgcccttttgtgacctctcattccaagattgtcaattaaaaatgagtttaaaatgtttaacttgtgatcgagacctacatgcatgtcttgatattgtgtaactataatagagactctttaaggagaatcttaaaaaaaaaaaaaacgtttctcactgtcttaaataaaatttttaaatagtatatattcaggggcattttggaaaacaaagggaatttacttcgacttcttaaatttttgtaaaagactataagtttaaacatctttctcattcaaatttaaagatatctttctcctcttgatcaatctatcaatattgatagaagtcacactagtatataccatttaatacatttacactttcttatttaagaagatattgaatgcaaaataattgacatatagaactttacaaacatatgtccaaggactctaaattgagactcttccacatgtacaatctcatcatcctgaagcctataatgaagaaaaagatctagaaactgagttgtggagctgactctaatcaaatgtgatgattggaattagaccatttggcctttgaactttcataggaaaaatgacccaacatttcttagcatgagctacctcatctctagaagctgggatggacttactattcttgtttatattttagatactgaaaggtgctatgcttctgttattattccaagactggagataggcagggctaaaaaggtattattatttttccttaatgatggtgctaaattcttcctataaaattcc

SEQ ID NO: 89597 - DNA, 2866 bp, Homo sapiens
tttcgtgcattcctgccgtcacctttgtcgctgcgagggcggcggttgggatctggcctttccagccccgagagggacctagtgcctctacccagatttctgtcgctctgtcacctgcgctatgccctgctttactcacaggagctgtagagaggaccccggtacatctgaaagccgggaaatggacccagtggcttttaaggatgtggctgtgaacttcacccaggaggagtgggctttgctggatatttcccagaagaatctctacagggaagtgatgctggaaactttctggaacctgacctctataggaaaaaagtggaaagaccagaacattgaatatgagtaccaaaaccccaggagaaacttcaggagtgtcacagaagagaaagtcaatgaaattaaagaagacagtcattgtggagaaacttttaccccagttccagatgacaggctgaacttccagaagaagaaagcttctcctgaagtaaaatcatgtgacagctttgtgtgtgaagttggcctaggtaactcatcttctaatatgaacatcagaggtgacactggacacaaggcatgtgaatgtcaggaatatggaccaaagccatggaagagtcaacaacctaaaaaagccttcagatatcacccctccttgagaacacaagaaagggatcacactggaaagaaaccctatgcttgtaaagaatgtggaaaaaacattatttaccattcaagcattcaaagacacatggtagtgcacagtggggatggaccttataaatgtaagttttgtgggaaagcattccattgtctcagtttatatcttatccatgaaagaactcacactggagagaaaccgtatgaatgtaaacaatgtggtaaatcttttagttattctgctacccatcgaatacatgaaagaactcacattggagaaaagccttatgaatgtcaggaatgtgggaaagcattccatagtcccagatcctgtcacagacatgaaaggagtcacatgggagagaaggcttatcaatgtaaggaatgtggaaaagcattcatgtgtccccgttatgttcgtagacatgaaaggacccactctaggaaaaaactttatgaatgtaagcagtgtgggaaagcattatcctctcttacaagttttcaaacacacataagaatgcactctggagaaagaccttatgaatgtaagacatgtgggaaaggcttttattctgccaagtcatttcaaagacatgaaaaaactcacagtggagagaaaccgtataaatgcaagcaatgtggtaaagccttcactcgttccggttcctttcgatatcatgaaaggactcacactggagagaaaccctatgagtgtaagcaatgtgggaaagccttcagatctgccccaaatcttcaatcgcatggtaggactcacactggagagaaaccgtatgaatgtaaggaatgtgggaaagctttcatatttgtgaataaccttcaaagtcatgaaaggacacaaacacacataagaatacactctggagaaagacgttataaatgtaagatatgtgggaaaggcttttattgtcccaaatcatttcaaagacatgaaaaaactcacactggagagaaactctatgaatgcaagcaacgttcagtagttccttcagtagttccagttccttttgatatcatgaaaggactcacactggagagaagccctataaatgcgagcaatgtgggaaagccttcagagctgtgtcaatcctttgaatgcatggtaggactcaccctgaagagaaaccctatgagtgtgagcaatgacggaaagccttcagatctgccccacacctttgaatacgtggtaggacacacaatggagagaaaccctatgcatgtaagaaatgtgggaaacccttcggatctgcccagaaccttcgaattcatgaaaggacacaaacacacataatgcactctgtagagagaccttataaatgtaagatatgtgggagaggcttttattctgccaagtcatttcaaacacatgaaaaatcttacactggagagaaaccctatgagtgtaagcaatgtgggaaagcctttgtttccttcacttcctttcgatatcatgaaaggactcacactggagagaacccctatgagtgtaagcaatttgggaaagccttcagatctgtcaaaaatcttcgatttcataaaaggacacacactggagagaaaccctgtgaatacatgaaaagactcacactggaaggaaacactatgaatgcaagcaatgtggcaaagctttcacttcttccagttcttttcaatatcatgaaagaattcacactggggagaaaccctatcagtgtaagcaatgtgcgaaagcctttatttcttccacttcttttcaatatcatgaaaggactcacatgggagagaaaccctatgagtgtatgccatgtgggaaagccttcatttcttctagttcccttcaatatcatgaaaggactcacactggagagaagccctatgaatataagcaatgtgggaaagccttcagatcagcctcgcaccttcaaatgcatggaaggactcacactggagaaaaaccctatgaatgtaagcagtatgggaaagcgttcagacctgacaagattctttgaatacagataatgaatgtaaacaattaactgtttataataactgtatactaacaaatgatattctttttaaataagaagctataatatcccattggtgtcatgtattagatcagccttatactgttaaattgttattatttggacattgtgagtcagtataaccatgtggataaaatgccagacatctttttattcgaaaaatt

SEQ ID NO: 89598 - DNA, 1764 bp, Homo sapiens
ttttttttttttcagttttaacaaaggattttattttgttccctaaaaagtaaaatctagaaaatagcaacccactgcaagaagagttctatactaaaacattttcaatcattctctcttctcttcacatggtgtactctttcatgtacacatcatcggaaaacagactgataaatgcaaaccctgtgtgaaaggcacatggcactaatattgctcacacctgctacacctccttgggagccaagggaagccttttctgcaatctccccattttgatagaaacttatcacaaatttttttatagcaaaatatttaaaggtctctttccctgctcttcacttatctactaggaaggtatagaattaaaaagctttttttcccccagctgtgatcaagatgtattaaaagaatatgaaagagcatctgggttattctagaagttctgtgatcaaaacatattaaaaaaaattaaagcgcatctgggttattctagaagttcctgggctttatacttggatatttacagaggaagttgaacttcaagttctgccactcttcaaaatgggtgacaggagaggacgtgataggacagttaaaaaaaaattgatagtcattctctgatggagtgaagcaagctttgtcaaccatcaacaaatatgacttcattggtcacaagccctgcagagatccaacaagatttgagttttaaatacagaacatatttcaaacagaaccagcagagtgctgatgtatgaatggaattgattgctgaaggcagagagtataaagaatctcaagaaacttttagtgccattttcatttaataagccattggtatagcaacctaaaaaccttggctgtgatgacaccaggatgtgtttatggaattgctgcaggaaaacacaattggcagctgacatcctctggctcacagcaccaacttctccaagagacttaaggctggggtgtgtagcggaggtatttcttgccagatgggagctctttggtgaagactcctttcgggaaaagttttttggcttcttcttcagggatggttggaaggaccatcacactatccccatccttccaatcaactggggtggcaacccttttttttctggctgttcagctggaagaagaagatgactaaccctgaggaatcttcatcaaaagttccctgcccagtgggtaggctgggggtaggagggttaggacagcttcaagcttccttatcagggaccaaaaaacaaacaccacacgagctgtcaacagggcatgccccttttccacccttcctctgctggaacccaaccatgccccaacaggaatggcaaagctccccgaattccctatccatcgaatgatgggaaaaaggtaacttttctgtggggctcttcaccaattgtaaagcattgataatccttgctcccaggcaagatggtcctcaacacttgtctatttgaaagggcaatcaacttaacatttcctcttggcaaaatctggtgcccaactttgcagctcttgcaaagcttctgggtgcacaccatggggtaaagcccccaggggttgggagaaagaatggccccatgagtctcccagaaagtcgtgggaaaggattgcggcgaacggtggtattggcctaaaagttgggagccacgtccccgagaagcagacctccgggcatggcgacggtgatgagggggcgccgctgggacagcaagcaaccggttggttctggcgaagaagcagcctgtcccagcgcgc

SEQ ID NO: 89599 - DNA, 741 bp, Homo sapiens
tttttttaaggtagccactctttatacgtgaatgacgggaacaagggtgtgttcctcattatcgacttcctgtattaaattgtgtgaaatagtctcccgtgggttgatttgtatagacttcattcatatattttttctgcaaatgctgctccttggccaggctgaggttgctgctgtccagagctctgcgcaggtcgcgctgccgccgccactgctgccgctcaaacagcagggtggccctggaaggcagtgggagcaaagagcctggctctatgggctcgctggaaaaaggggcggggcagtcaccagcttctcctggatttgctgcttctggactaggcggatctgctccagctgctcctgggtcatgcccttccagcggtcagggaccacgcggtggggccccaaggagctggctgcctgctgcgggttctcggagagcaggtccccacgcaggaggttggtgatctcggctaagttgtcctcttgttcttgctttttctcttgctttttcctttccactgactcgatggcctggctcttgttgaagtctttcacagatgcacaaactgcctttctggtggtgctttccagcttctggaggtgcttggctgtctcgtcaaactgcagccttgtctctgtgtagagggcctctgcgcatttttgttcagcacgggcgttcttccattccctttgctgctgcaaagaccattctctgttttgttcctcttggaatttctt

SEQ ID NO: 89600 - DNA, 3013 bp, Homo sapiens
gggcagagggaggaaggacagcagaccagacagtcacagcagccttgacaaaacgttcctggaactcaagctcttctccacagaggaggacagagcagacagcagagaccatggggcccccctcagcctctccccacagagaatgcatcccctggcaggggcttctgctcacagcctcacttctaaacttctggaacccgcccaccactgccaagctcactattgaatccatgccgctcagtgtcgcagaggggaaggaggtgcttctacttgtccacaatctgccccagcatctttttggctacagctggtacaaaggggaaagagtggatggcaacagtctaattgtaggatatgtaataggaactcaacaagctaccccaggggccgcatacagcggtcgagagacaatatacaccaatgcatccctgctgatccagaatgtcacccagaatgacataggattctacaccctacaagtcataaagtcagatcttgtgaatgaagaagcaactggacacttccatgtatacccggagctgcccaagccctccatctccagcaacaactccaaccccaaggaggacaaggatgctgtggccttcacctgtgaacctgagactcaggacgcaacctacctgtggtgggtaaacaatcagagcctcccggtcagtcccaggctgcagctgtccaatggcaacaggaccctcactctattcaatgtcacaagaaatgacacagcaagctacaaatgtgaaacccagaacccagtgagtgccaggcgcagtgattcagtcatcctgaatgtcctctatggcccggatgcccccaccatttcccctcttaaacacatcttacagatcaggggaaaatctgaaccttctcctgccacgcagcctctaacccacctgcacagtactcttggtttgtcaatgggactttccagcaatccacccaagagctctttatccccaacatcactgtgaataatagtggatcctatacgtgccaagcccataactcagacactggcctcaataggaccacagtcacgacgatcacagtctatgcagagccacccaaacccttcatcaccagcaacaactccaaccccgtggaggatgaggatgctgtagccttaacctgtgaacctgagattcagaacacaacctacctgtggtgggtaaataatcagagcctcccggtcagtcccaggctgcagctgtccaatgacaacaggaccctcactctactcagtgtcacaaggaatgatgtaggaccctatgagtgtggaatccagaacgaattaagtgttgaccacagcgacccagtcatcctgaatgtcctctatggcccagacgaccccaccatttccccctcatacacctattaccgtccaggggtgaacctcagcctctcctgccatgcagcctctaacccacctgcacagtattcttggctgattgatgggaacatccagcaacacacacaagagctctttatctccaacatcactgagaagaacagcggactctatacctgccaggccaataactcagccagtggccacagcaggactacagtcaagacaatcacagtctctgcggagctgcccaagccctccatctccagcaacaactccaaacccgtggaggacaaggatgctgtggccttcacctgtgaacctgaggctcagaacacaacctacctgtggtgggtaaatggtcagagcctcccagtcagtcccaggctgcagctgtccaatggcaacaggaccctcactctatttcaatgtcacaagaaatgacgcaagagccatatgtatgtgggattccagaacttcagtgagcgcaaacccgcagtgacccagtcaccctgggatgtctcctatgggcccggacacccccatcatttcccccccagactcgtcttacctttcgggagcgaacctcaacctctcctgccactcggcctctaacccatccccgcagtattcttggcgtatcaatgggataccgcagcaacacacacaagttctctttatcgccaaaatcacgccaaataataacgggacctatgcctgttttgtctctaacttggctactggcccgcaataattccatagtcaagagcatcacagtctctgcatctggaacttctcctggtctctcagctggggccactgtcggcatcatgattggagtgctggttggggttgctctgatatagcagccctggtgtagtttcttcatttcaggaagactgacagttgttttgcttcttccttaaagcatttgcaacagctacagtctaaaattgcttctttaccaaggatatttacagaaaagactctgaccagagatcgagaccatcctagccaacatcgtgaaaccccatctctactaaaaatacaaaaatgagctgggcttggtggcgcgcacctgtagtcccagttactcgggaggctgaggcaggagaatcgcttgaacccgggaggtggagattgcagtgagcccagatcgcaccactgcactccagtctggcaacagagcaagactccatctcaaaaagaaaagaaaagaagactctgacctgtactcttgaatacaagtttctgataccactgcactgtctgagaatttccaaaactttaatgaactaactgacagcttcatgaaactgtccaccaagatcaagcagagaaaataattaatttcatgggactaaatgaactaatgaggataatattttcataattttttatttgaaattttgctgattctttaaatgtcttgtttcccagatttcaggaaactttttttcttttaagctatccacagcttacagcaatttgataaaatatacttttgtgaacaaaaattgagacatttacattttctccctatgtggtcgctccagacttgggaaactattcatgaatatttatattgtatggtaatatagttattgcacaagttcaataaaaatctgctctttgtatgacaaaaaaaaa

SEQ ID NO: 89601 - DNA, 1425 bp, Homo sapiens
ttttttttttttggtaaagacttttaagagaaagaagtattttaaaaagtagcagtgctctgaggctcagggtgtaggatcgggggcacagcctggtcccgggaggccccttgtgcacaggtggtggcccagggccacagtgctcgctcttgggggacgcgcggccgggggacgcagcctgtgtccggcccggggctcccggcgggcttccggcggcagggacaatggcgaggccgctcaccacttgaggaagacccatcccggccagaacggtgtagcccaccaccagggaagaggacctttagcagacggtcactcttcttcctccagctccttggccaggattttccagggaaggtgatgaagagggaaaggtgccgcccgccaggcccttgcagcagcacggacgccacgctgcccggcacgccctgggccttctcaatgcccaggcccaggccgatgcccagggggatcatggggcttacggtgaccgccagcttggccgcgtcccgcaggggcatggcacttccggccatgctgatgcccagggccacgggcaccagtgtctcgtggacggccacccccacgaacaggctcaccactttctccccctcctcctgcaggcccagggccaggccctcaaagaccgagtgggccgacagcgcgaaggccaggctgagcaggcgcacggggctggcgcgcgagaggccctgcacgctcaggctggggccgtggccgtggggctccacgtacagcgcgtggccccgcgcgccccccatgaaggggctctcatactccgagtcgctgcccacgtccgatccggcgttgaaggtctccaggtcgatgaaggacggcattctcttgcgcaaaggtcaggatcagctgctccaggaagacggtcatgaagaagcccagcaggaggatggtttcggcccagcgggtaatcggtgctgatgtggccgaggctccaggaccttctggagcttttccctcaacagcgggcaagcagagctgttgaagcacgtggccagaaacacccctcctccaaaggtgttgcagagagagaggatctttttcgagcgatgggccttctcaaaatctgtctcgatgatcttcacggggagcagggagccgagcagcatgaagaagaacacgcccaccatgcacaggattttggccactagcaatttcaccatggtggcggcttgggctgctctggtcactgcagggccaaaccatctgtgggcgcacacccaagtcccacgatgtgctaccgagcccaaccacacagttggaggctcatgtctcagtccagcaactcccgggggcccctcgtccgccgactggcgccgctgcacgcccaacggccgcgcagtctcgaccccacagacgcggcccggagaggccccgctcggcgcggctggt

SEQ ID NO: 89602 - DNA, 791 bp, Homo sapiens
ctgcttcccgcttacccccagcgacgctaacgttaaagcagttcgtaagaaggcaacaagttcttctcctctacagaaggattttgcaaacaattcggcaagttccaaatgattctgatcgcaaatacctgaaagattgggcaagagaagaattcagaagaaacaaaagtgccaccgaagaggatacaatccggatgatgattactcaaggcaatatgcagctcaaggagttagaaaaaacacttgctttagcaaaatcttaactatagcattattctgaaggattttcaaagtctccatgtgttttgttgcatttaggattaacaatggacaacacaaagcccagtcttactatttatatgtacagtatttggtgatagagagcaaaggaaaaacacatcagaacagttgccttaacactgaaaaacataccctgcattttgaaaatgtttatggatgtctcagcagttcttaaaagaagaaaaaaaccactaacaaatggccagtagatgctggacacaatcattagggaagtgtaaatcaaaactactatgaggtcgggtgtagtggctcatgcttgtaatcccagtactttaggaggctgtggtaggtggatcacttgaggtcaggagttcaagacccagcctggccagcatggttgaaacctcatctctactaaaaatacaaaaattagcttggtgtggtggtgcattgcctgtagtcccagctacttgggaggctgaggcaggagaatcacttgaaacccagaagtggaaggttcaatgaacctg

SEQ ID NO: 89603 - DNA, 731 bp, Homo sapiens
cttgcctcaggaagactgttggtgaagatgacatccactacgatgttgggcttgtccacaggaaacgggcacagtggttgactggtaaataggcccacttggaaggtgccttctgctgccttggcactcctattcaagtcaacgtgaaagacaggccattccactcttcagaaaggcacttttctcccaccaggggaatggagtgctgttgtctgttgcttctggagtcattgtgaaccagtagtcaccagcctccttgaaatagaagcactcaaactttagtgttccctgggactggttggtcaggaggtacttggtagttacagtctgattggtgttggcctccaacagcaggacagatacattcctcagtgtcccattagcaccatcaaaatactggaaatccacataccctgtgtcgttgcttagtgctacatggcctggctctctcaagagaagatattcagcttctccaagaacatagtcacagagtaccaccaacaatagatttgaaaagtctttcaacattggtttcattctgattgacaaaatcccaggtctttagtctcctcatgtcctttctcacgtccagattgtgatttttttccccaaaaacacctttcgagactgacgggcagcaaccccaggccgtccgggcgcgtggcgaggcggacgggaaggctcaggggcggcgaggtagagcgccaagcatcccgcgtcacgaaatcgtc

SEQ ID NO: 89604 - DNA, 6775 bp, Homo sapiens
ttgcacggatggtgtaaaatcagacccaggcagcctgggtcagtgcccatcattcagagtgaccctctgtcccctccatgcccagcggggccgatgggcagctaggaggcgagggaccgtctggctcaatcgagagccaaagagaaggagcttaattccgtcgcttctgagctgtctgcacggcaggaggagagtgaacattctcataaacatttaattgaactccgccgggaatttaagaaaaatgtacctgaggaaatcagagagatggtggctcctgtattaaaaagcttccaagccgaggtggtggcccttagtaagagaagtcaggaggcggaggctgcttttctgagtgtttacaagcaattaattgaagcaccagccctgtgggaactcaagctcaagtccaggcctgcccttggagactctcgggttcagcaaggacaacatgacccaaagacagacaaccagaatacacaacagaaagcaggcttcaaggaaggatggctggcagaggcctcagagagggaggcctttggacctggttttaaagaccccgtgcctgtgtttgaggcggcacgcagcctagacgacagactgcagccccccagctttgaccccagtgggcagccccggcgagacctccacacttcgtggaagaggaaccccgagctcctcagccccaaagcgctaaaggctacgcaggcagagctgctagagctgcggcggaagtacgacgaggaggcagcatccaaggcagatgaagtcggcctgatcatgaccaacctggagaaagctaatcagcgagctgaggctgcccagcgggaggtggaaagtctccgggaacagctggcctctgtcaacagctccatccgcctggcttgctgctctccccaggggcccagtggggataaggtgaacttcactctgtgctcgggccctcggctggaggccgcgctggcctccaaggacagggagatcctgcggctgctgaaggacgtgcagcacctccagagctcactgcaggagctggaggaggcatccgccaaccagatcgccgacctggagcggcagctcacggccaagtccgaggccatagaaaagctggaagagaagctccaggcccagtctgactatgaggaaattaaaacggagctgagcatcctgaaagccatgaagctggcctccagcacctgcagcctcccccagggcatggccaagcctgaagactcactgcttattgcaaaggaggccttcttccccacgcagaaattccttctggagaagcccagcctcctggccagccctgaggaagacccatcagaggacgattccatcaaggattcactgggcacggagcagtcctacccctcccctcagcagctcccacctccaccagggccagaagaccccctgtctcccagccccgggcagcccctgctgggccccagcttggggcctgacggcactcggactttctcgctgtcccccttccccagcctggcatcaggggagagactgatgatgcccccagccgccttcaagggagaggcgggcggcctgctggtgttccccccagccttctatggcgccaagccccccacagcccctgccaccccggcccctggccctgagccactgggcggtcctgagcccgcggatggtggtgggggcggagcggcggggcccggggcagaggaggagcagctggacacggcagagatcgccttccaggtgaaggagcagctgctgaaacacaacatcgggcagcgggtgtttgggcattacgtgctggggctgtcgcagggctcggtcagcgagatcctagcccggcccaagcccttggcgaaagcttcacggttaatagggcaaggagcccttcatcaagatgaagcagttcctgtcggatgagcagaatgtactggcgctcaggaccatccaagtgcggcagcgaggcagcatcaccccgagaatccgcacgcctgagacaggctcagacgacgccatcaagagcattctagagcaggccaagaaggagatcgagtcgcagaagggcggcgagcccaagacctcggtggccccgctgagcatcgccaacggcacgacccccgccagcacctcggaggacgccatcaagagcatcctggagcaggcacgccgtgagatgcaggcgcaacagcaggcgctgctggagatggaggtggcgcccaggggccgctcggtgcccccctcgcccccggagcggccatcactggccaccgcgagccagaacggggccccggccttggtgaagcaggaggagggcagcgggggccccgcgcaggcgccgctcccggtcctgtcccccgccgccttcgtgcagagcatcatccgcaaggtcaagtccgagatcggcgacgccggctacttcgaccaccactgggcctccgaccgcggcctgctcagccgcccctacgcctccgtgtcgccctcgctgtcctcctcctcctcctctggctactctggccagcccaacggccgcgcctggccccgcggggacgaggcccctgtgccccccgaggacgaggcggcggcaggggcggaggacgaaccccccaggacgggcgagctcaaggctgagggcgcgacggccgaggcgggcgcgcggctgccctactacccggcctacgtgccgcgcaccctgaagcccaccgtgccgccgctgacccccgagcagtacgagctgtacatgtaccgtgaggtagacacgctggagctcacccgccaggtcaaggagaagctggccaagaacggcatctgccagaggatcttcggggagaaggtgctgggcctgtcacagggcagcgtgagcgacatgctgtcccggccgaagccatggagcaagctgacgcagaaggggcgggagcccttcatccgcatgcagctgtggctctctgaccagctcggccaggcagtgggccagcagcctggtgcctcccaggccagtcccacagaaccaaggtcctcaccatccccaccccccagccccacagagcctgagaagagctcccaggagccgttgagcctgtccctggagagcagcaaggagaaccagcagccagagggccgctccagctcctcgttgagcgggaagatgtactcaggcagccaggccccagggggcatccaggagatcgtggccatgtcccccgagctggacacgtactccatcaccaagagggtgaaggaggtcctcacagacaacaatctagggcagcggctgtttggggaaagcatcctgggtctgacacagggctccgtgtctgacctgctgtcccggcccaaaccctggcacaagctgagcctgaaggggcgggagccttttgtccgcatgcagctgtggctcaatgacccccataacgtggagaagctgagggatatgaagaagctggagaagaaagcctacctgaaacgtcgctatggcctcatcagcaccggctcagacagtgagtccccggccacccgctcagagtgccccagcccctgcctgcagccccaggacctgagcctcctgcagatcaagaagccccgggtggtgctggcacccgaggagaaggaggcactgcggaaggcctatcagctggaaccctacccctcgcagcagaccatcgagctcctctccttccagctcaacctcaagaccaacaccgtcatcaactggttccacaactacaggtcccggatgcgccgggagatgttggtggaggggacccaggatgagccagaccttgatccaagcgggggtcctggaatcctaccgccaggccactcccacccagaccccaccccgcagagccctgactctgagactgaggaccagaagccaaccgtgaaggaactggagcttcaggagggccctgaggagaacagcacacccctgaccacccaggacaaggcccaagtgaggatcaagcaggaacagatggaggaggacgctgaggaagaggcaggcagccagccccaggactcaggggagctggacaaaggccaaggtccccccaaagaggagcatcccgaccctccgggtaatgatggactcccaaaagtggctcccgggcccctccttccaggtggatccaccccagactgtccctcacttcatccccaacaggagagtgaggccggggagcgacttcacccggaccctttaagttttaagtcagcctcagagtcctcacgctgcagcctggaggtgtcactgaactcgccctcggccgcctcctcaccaggcctcatgatgtctgtgtcacctgtcccctcctcctcagctcccatctccccatccccacctggcgccccccctgccaaagtgccgagtgccagccccactgctgacatggctggagccttgcaccccagtgccaaggtgaaccccaacttgcagcggcggcatgagaagatggccaatctgaacaacatcatttaccgactagagcgggctgccaatcgggaggaggccctggagtgggagttctgaaggcagggtgagggggcaagggacataccctggtaactaccttccttctcgcacttactctcctcaacaggatggggtaagggagggaggaactcaaccatcaaaatgtggacagcaatgttatgccgtttacgttttttgttgtaatcctagttctatgaagctgtgtgagcaggtgggtcaaatgccattgcctccacttttctgcacccccctgctcctcttcaccctgacccctctgcaggaggcagaagcaaaatggcaccacatattcacctgaaaactccaaactcttttagaaaaataaataaatatttatagacctcttttagatattttaataaaggatcctttggaatttatcccagctgatgctgttttgatattacagagagttataaaatcaggatgctgtcacaactgttgcgaagtatacactgaagttgtgtcgtttttgccactagatgagattaaaagaagacaattattcaaagccatcacaaaacactataagactgaccaaaatttagataacctttgaaccacgatttttttccacatctgtctgtgagacacagcgcaatgctactgcccttccagaaactgtgctaaaaagagaaagtccaaaagactctaaacaaaaacctcgacgccgttgaggatgtgtttcattctggtggtctgttttgcaagcttgataacagaatgtccgtgccattgtaaatgttgtagagatgtgggccgtggcccaaccgtcctatatgagatgtagcatggtacagaacaaactgcttacacaggtctcactagttagaaacctgtgggccatggaggtcagacatccatcttgtccatctataggcaagaagtgtttccagatcctttggaaaggtgggcatggggcaggtgcttggagagtggcgtttgagccagagcgaccccatttcccgtgtgaaccataggcacaacccaggaagtttccccacttgtaggagtgtgggtattccagagcaagactgtggccaccatcttcccctcttggtgttttccgaaagtgacagtgttggtcatcccatgaccactgaagcttagtaaccagcgccaaaaagtagattcatcaaactagagaccccagctccccttctcgccatcttctttctcaagttgaccgtggtgctgtttctggaaggcatctgcaactccaagtccatgcagaactctggaaggccaagttcatcgcagcatgttcaccatatcccagcctccaaatctatcctcctaccttccaacgcatgacctgttggggagcagagacttaacccccaactcagaggaacccttcctccagcgtctttggcatggtttctagggtgagagttcccaatttggatagaacggccaccatattggttactgaatctctctcccttgtttttattacgtttcctttttcaaactgtccatgggaaggctgaattgagtgactccccagaatgaagatgagaaggtgaatataatcaatgccaatgtaatgccagcgggtgagatggccgatggaggtttcaaagatgtagctagcattttgaaaccatatgggcaaaacccggcaaccagaaggggacagataaggaccgttccagaaatcccaactctcacacccagcccaggctgcagtctccacaccaaacagtcaacaaaacacaaaccctgaaggaaaaccttttccatacacccaggctatgcattgaagagttttccactgtatacatttttatccagatgaaggtatttttatattttgacaataggaaacagtgaccattttcagagtaatccaaatctggaaccaatgaaacatctttttagccaccaccaccctgttgccaattaagaccaacccgtggggggaccccacccactttttacctgttgaaaccccaacacaacgttgaaatcccaggcttataccgcagactcccgattccctagagaacctaaatttggcctttaagtgtgacgggatttgattaagcaccttagtatagtcttttgaacacggaaatccctgttgtacttaaagctagcggacccgtgaacaactttgtcaggttcacgtcctataacgggttaaaaaacacacacacacatacacaaaccgtttctatgagagattgatgaactttgtttaaaattttaaaaaaatggaacactgttctgtaaacgagtcgctaaatacagaattgtataataaaaaaaaaa

SEQ ID NO: 89605 - DNA, 747 bp, Homo sapiens
tttcgtgcccaggttcccccttgggtttccatccagccctggtctggggaagagatttcattccctggatgaagttggagagctgctctgtctccgtgagccccccatagctttcccacccacagctagggctctttgtgccgcggcctctgtcccagcctcgtgttgccaggaccgtgagcatagggaagccgaggcgggggctgacaccacactccaggcctggccatggagtcagaggggaggccttcctctgcagcctcagcctttcttatccaaatgccttaaagctgtcttcacagccctgtcccttgaggtcagcgggattcgcacgatgtactatgtttgtgggggacatatgctcgccctgccttgttgtgtgtccggccaggggcctggactgtgcagtcatcttggtcatggcaaagctttccagaaatggctgagttcccacagttgtccacgggccagggccaccttcagtcactgggggcggcacaggaggcagccccgaggtggctcccaggagggcggggcagctgcttgcctctgtccacactcccacgcggcctgctgggtttgggctgattcataggtggaggaaaatcccacgagccgtacagctctgtcccccttcctggagagaatagccttcttgtgcttttctctgttacgcatttttaaagacctggagtctcttttcttaacgtaagaagtctgcctgggctgcagagggagtagaaacag

SEQ ID NO: 89606 - DNA, 1324 bp, Homo sapiens
tttcgtgcctggtccaggtggcccaggctgggggcatcgcctcgaatgacacccaccgccctcaggttctgccaatccccgtgcccaccgggtgggcgcggccgggaagctcctgcccctccctgctggtcggcgtcacgcgtgacgtcccgcgtgatggctgggagggcccggcggcgacagcggaggcagagaggaaggcggttctgagagcttcagagagcgatggaaagcaaaatgggtgaattgcctttagacatcaacatccaggaacctcgctgggaccaaagtactttcctgggcagagcccggcactttttcactgttactgatcctcgaaatctgctgctgtccggggcacagctggaagcttctcggaacatcgtgcagaactacagggccggcgtggtgaccccagggatcaccgaggaccagctgtggagggccaagtatgtgtatgactccgccttccatccggacacaggggagaaggtggtcctgattggccgcatgtcagcccaggtgcccatgaacatgaccatcactggctgcatgctcacattctacaggaagaccccaaccgtggtgttctggcagtgggtgaatcagtccttcaatgccattgttaactactccaaccgcagtggtgacactcccatcactgtgaggcagctggggacagcctatgtgagtgccaccactggagctgtggccacggccctgggactcaaatccctcaccaagcacctgccccccttggtcggcagatttgtgccctttgcagcagtggcagctgccaactgcatcaacatccccctgatgaggcagagagagctgcaggtgggcatcccggtggctgatgaggcaggtcagaggcttggctactcggtgactgcagccaagcagggaatcttccaggtggtgatttcaagaatctgcatggcgattcctgccatggccatcccaccactgatcatggacactctggagaagaaagacttcctgaagcgccgcccctggctgggggcacccctgcaggtgggactggtgggcttctgcctggtatttgcaacccccctgtgctgtgccctattcccccagaagaggtaagtgctgtccctgggctgggtgggggactctggattggactctgcatctctggaccagctgacctagggtcttccagggtgttcaggaggaggcctggcaggcactccactgattctgggagtgggggaatgacagtgagccagtccttctggcagtagaaggagaggatttttcagcctgggaggaggtgggatggcaatccctgggcctgagt

SEQ ID NO: 89607 - DNA, 456 bp, Homo sapiens
ttcccgggtcgacgatttcgtgtcttcactgtgagttgacagactcagctggttttgtttactcagcgagcttgagagcatgccgaggtggcgtccccgtctgcagagccgcctttgcctgcaaatatcaccccctttctgctacctgccagccagggctgtgggtggggtggacccagtagggacaagccccaccctgccacccactcacccaccggcctgcccttgcctttcttcctctgccaggctctttctgggcagccccaggtttggccctccttcccggcattgtcagagaagcttccaacacctcaaaatccaccctagggggaccctctccattttctttaacatggaaccaaaactctcctggtttctatgtgtgcagaaacgtttggtaaacagaatgcttaagccgtgacttgctggaaggggcaaatcccagctgacacccca

SEQ ID NO: 89608 - DNA, 2944 bp, Homo sapiens
gagtcccttgggagaggaaacgtttctgaaagactgtaggattaccttccctgaacttccggtcaggtgcggtgctgccctgccgcgccctcttacccctggatgccgacgaaaccgcaaaactccagccccgggaagcgcgtctcaaggaccaccaccagcgagcggctttgggagagtgatctgcgccaccctcgcagcccattaaataggcactccccgtttgattgacaggagaagtcaccaatgcgcgtcctggggctttccctcgtcctcacgcggggtgagccgcctctctactcatctggcccaatcgggggcgccggggaggctgtggggcggggctcggtgtccggtagccaatggacagagcccagcgggagcggcgggggcggtgcggtcgcggctggcggcagaagcggccgcaggggtctgggcagggctgggcagtgctgccggagcaaaagcggtagcgggagcccggccggagctgggtctggagacgccgtggcagcctgaacggagtgtgcgacggattgggaggtttgtctacagattttgagcgttcgaagttgacccctgactaagtatactttgctgctccctcagcctttgaaaaaatgtctgtcacatatgatgattccgttggagtagaagtgtccagcgacagcttctgggaggtcgggaactacaagcggactgtgaagcggatcgacgatggccaccgcctgtgcagcgacctcatgaactgcctgcatgagcgggcgcgcatcgagaagggcgtatgcgcagcagctcactgagtgggcccggcgctgggaggcagctcgtggagaaagggccccagtacgggaccgtggagaaggcctggatggccttcatgtccgaggcagagagggtgagcgagctgcacctcgaggtgaaggcctcactgatgaacgatgacttcgagaagatcaagaactggcagaaggaagcctttcacaagcagatgatgggcggcttcaaggagaccaaggaagctgaggacggctttcggaaggcacagaagccctgggccaagaagctgaaagaggtagaagcagcaaagaaagcccaccatgcagcgtgcaaagaggagaagctggctatctcacgagaagccaacagcaaggcagacccatccttcaacccttaacagctcaagaaattgcaagacaaaatagtaaaagtgcaagcaagatgttcttaagaccaaagagaagtatgagaagtccctcaaggaactcgaccagggcacaccccagtacatggagaacatggagcaggtgtttgagcagtgccagcagttcgaggagagacgccttcgctttttccgggaggttctgcttggaggttcagaagcacctagacctgtccaatgtggctggctacaaagccatttaccatgacctggagcagagcatcagagcagctgatgcagtggaggacctgaggtggttccgagccaatcacgggccgggcatggccatgaactggccgcagtttgaggagtggtccgcagacctgaatcgaaccctcagccggagagagaagaagaaggccactgacggcgtcaccctgacgggcatcaaccagacaggcgaccagtctctgccgagtaagcccagcagcacccttaatgtcccgagcaaccccgcccagtctgcgcagtcacagtccagctacaaccccttcgaggatgaggacgacacgggcagcaccgtcagtgagaaggacgacactaaggccaaaaatgtgagcagctacgagaagacccagagctatcccaccgactggtcagacgatgagtctaacaaccccttctcctccacggatgccaatggggactcgaatccattcgacgacgacgccacctcggggacggaagtgcgagtccgggccctgtatgactatgaggggcaggagcatgatgagctgagcttcaaggctggggatgagctgaccaagatggaggacgaggatgagcagggctggtgcaagggacgcttggacaacgggcaagttggcctatacccggcaaattatgtggaggcgatccagtgatgagtcggggacaggccagcggggggacggaggcggcgggcccaggagcctcagccagccacgtgggcatccactccttttcctgcaagagatgatggttccattgctcttggcttcatggtgttcctggaaggcagatgagctggtcatttcgcctgggactcggcacctttccgagtgcagctggagggatctgagcgcaggaagacgcagaacaacagaaatagccgcccctccccgcccactgtgcctgttggcctatcatagatctctatgttcttgactttgtctctcctttccgagtcaatggtgggttacactgatcttgttccactgattactctctctgacgagtccatcacctgcaacttaaatgaacaagcttacatcccattttgagtgaagattttgaggtttttaatttaaaggctgtgtacagttatacttttttatacacctgttcatttctacttaaattatggcacagattgatgcgcaccagtcttgaggaaacgatctccctattcccttaccctgttactcagccacgccgtgtgtaggcttagcctcaggtggcagatgtttgaggaaaggaattatgccaggaaggtgggaccgggttatggtcgggtttctattgggaatgctctttgtgcttttgggcatctgaatggaagctttacatagaaccttaggtagaactcccccaaatcgccatatttaaaaattattttcactctattcttgcttaaaactgtactcttttgcaaattaacaattttatcactgattcagagttaaaaagaagactaacttttcaagccaaatgcatctgtaaagatgctttagattagactgt

SEQ ID NO: 89609 - DNA, 1507 bp, Homo sapiens
  misc_feature (1)...(1507): n = a,t,c or g
tttttttttactaccacaaacaattaggaattttttatcgttatagatgttgttaaaggactccagtagcaaagatcaaagtctccgaattttgcctttggagaagggggtttcatttcagacatcaaaggtaaggctctcaagtcaatttatgctctgctgggttgagtcagtcaggatacaaattaaggtccatatatttcagtgacaagaaggaaacggttatgtaaatacacaagtattaacatcaatctgtattaaattatgtaaacatatacatcttctgaggtcagcacatagatcctccttcctttgaggcggagctcttactggaagcattgcttcgaatctgtttgggaagttgattcatcgttcaagtgctttgtagtgaacctgagggcatttagcagcccctccacactgtctggggcctgctccttcaaaacttttatgcagcctttcatatcgatcttggatgtcttgcagaaagctcccacagggtggacatggtcatagaggatgatgactcccaccatcaccctcatgcagaacatcagggtctcttcactcgtaaacctacttctgtactccggagtttccagcatgactttacagacacttgtcattgtgctgaggcagtctgtggtgttctctattggcaaagttttgttttcagagacaaagtgcattgtggcattgctaagggttttcagcattggcgtggcttctgcatagaagagggacattcgattggccatctcattattgacttcattctcaatgtctaggtgcatgttgttgatgcggttgcgactgattgtccttctgtagtagctgaagtcattcctaaataagccgggttcctcatcttcagctcatcgaatcgaagggtaaaaantgtaaaatttcggcaaactcctttagccagggcctgttccctttccaggtgttgggttggtgtgtagggtggacaagtcagagattccaataaactctgaagagctttttctagtctaatggaaaactcgtaaaatctctttagcctcacaacaagagggcacaccgcattccaagctttttcttgaagcttgaatgtccattgggattttgaattgcatctcggatctctgggcctgcgcctttgtaagcctgcaggtctgcaaggatgctctcagaatcctgaaggacggcgctgatctggttccagatttctctctctccttctgtaggctgagcattttcaaaatccaggaaaaagtgtggatagttttcaatttccctggtaaggactttgagcaggtttcccatcccagcaaacctggaaatatctcctgtgattcagtttcaccaatccaggctgatgggatgaaccagcttagctgctgtctggccaaagtaagttggacttcccaaatcaggacggtggcctcctagagtcctgtagcttttctgtccttaagatggtggtacccgagtcgccgccgccctgctctgccgcccgctccgc

SEQ ID NO: 89610 - DNA, 1050 bp, Homo sapiens
ccggcctgacctctcgatccttcagcacttcagaggttaattttgttgggggatcggatttctttcctggcctggggaatggtgatccctgctagctagtcctttagttacagagttgctgggtgcctgggattccctggcccagtgtgggctggctcagctggctaaaggacttgccatcctgtgagattcattcagcttctttgtccgctgttctccaagggccgcaatgtagtgaaatgctctggcctaagaaccttacaagctgggacgacagcagctccgtcagcagcggcatcagcgacaccatagacaacctcagcactgatgacatcaacaccagctcctccatcagctcttatgccaacacacctgcctcctctcgaaaaaacctggatgtgcagactgatgctgagaagcactcacaggtggagaggaattccctgtggtctggtgatgatgtcaagaaatcagacggaggctcagacagcggcataaaaatggagccaggttccaagtggaggcggaatccttctgatgtgtctgacgagtccgacaaaagcacgtcgggcaagaagaatcctgtcatctcccagacaggctcatggcggcgaggcatgacagctcaggtgggcatcaccatgccaaggacgaaggcttcagccccggcaggcgcactgaagaccccaggaactggtaagaggccggggctgtcttggccctggggcaccaacgccagcagctcctccgcagttagcaaggatggcctgggctttcagtctgtcagcagcctccacaccagctgtgagtccatcgacatctccctcagcagtggaggggtccccagccacaattcttccactggcctcatcgcctcctccaaggacgactccttgactccctttgtcagaactaacagtgtgaagaccacactgtcagaaaggttggtgctgtgcctctggctgcctttctcagaaagacacccttccaaaaataaaaagattagcttaggaatcccaaatgtcgaatagcctttgcctgtaagatttc

SEQ ID NO: 89611 - DNA, 4228 bp, Homo sapiens
gtgaaccatatatgtttcatcatcatggagatcttggagaattatctgagcaccaggttcatatgtattcgatctcagaggcatctattggacaacaaaacactctttcagttctttggggtctctacttaggagtggaatttctaagtcatcatgtaactgcatttaatctttccttgctttctttagccaactttgctgacagatacctaagtgtagtgtctaggggctgactgccgggagacggagccaggctgtgtagaggggattggctttggggaacttgctttgaccacagcacgtctatgttgacctggacccacatttgctccaatccacattcctggggagggtggttctcctgtattgactgttttccttcaggtgcttggatgaagctgaaaagacactaagaccttctgtgcctcagatccctgagtgcccgatttgtgggaaaccgtttcttaccttaaagagcagaaccagtcacttgaagcagtgtgctgtgaagatggaggttggcccccagctcctgcttcaggctgtgcggctgcagacagcacagcctgagggtagcagcagcccacccatgttcagcttcagtgatcacagtagaggtctgaaacggagaggacccaccagcaagaaggagccacggaagaggcggaaggtggacgaggcaccgtccgaggacctgctggtggccatggctctgtcccggtcggagatggagccgggtgcggctgtaccagcgctcaggctggaaagtgccttttctgagaggataagaccagaagcaggtttgtgtgatcagaagagtgaccctgggagaggccatcagcaggtcccggagaataaaagtcgcaagaagaaacccccggtatcccccccattgttgttagtccaggactctgaaaccacaggccgacagatagaggaccgtgtggccctgctcctctctgaggaagtggaattgtctagcacgccaccacttcctgccagcaggattttaaaggaagggtgggaaagagcgggccagcgacctcctcccacctgaacgcaagcaaagctttctgtgggagggcagcgcactgactggggcctgggccatggaggacttttacacggccaggctggtccctcctctcgtgccccagcggcctgcccagggccttatgcaggagcccgtgccgcctctggtgccacctgagcactcagagctgagcgagcgaaggtcacccgctctccacggcacccccactgcaggctgtggctccaggggcccgtcgccttcggccagccagagggagcaccaggccctgcaggacctcgtggacctggcgagggagggactgatgcgccagcccgtggcccggcagtgggggcctggctggctcggaagggactgcagggttggacgtggtgcccggcggccttcctctgactgggtttgtggtgccatcgcaggacaagcacccggacaggggcggccgcaccttgctctccctcgggctgctggttgctgactttggcgccatggtcaataacccacacctgagtgatgtccagtttcagacggacagcggggaggtgctttacgcccacaagttcgtgctttatgcccgatgcccgctcctcatccagtatgtgaacaatgaaggcttctccgctgtagaggacggggttctgacccagcgtgtcctgctgggtgacgtgagcaccgaggccgcccgcacgttcctgcactatctctacactgcggacactggccttcctcctggccttagctctgagctgagctccctggcccacaggtttggcgtgagtgagctcgttcacctgtgtcgaacaggtgcctattgccactgactcagagggcaaaccatgggaggagaaggaagcagagaattgcgaaagcagggccgagaatttcccaggaactcttgaggtcaatgtgggcagatgaagaggaggaagcgaagactttgttgaaatccaaggaccacgaagaagatcaagaaaacgtgaatgaagcagaaatggaagaaatttatgaatttgcagctactcagcgaaagcttctccaggaagaaagggcagcgggtgccggcgaggacgctgactggctggagggtggcagtccggtttctgggcaactcctagcaggtgtccaggtgcagaaacagtgggacaaggtggaggagatggagccgttggagccaggaagagatgaggccgccaccacctgggagaagatgggacagtgcgctctcccgccaccccagggccagcactcaggggcacggggagcagaggcccctgagcaggaggcgccagaggaggcgcttggccattccagctgctccagcccttccagggactgccaggcagagagaaaagaaggctctcttccgcactcagatgatgccggggattacgaacagcttttctcatcaactcagggagagatctcagagccgtcccaaataacaagtgagcccgaggaacaaagtggcgctgtcagggaaagggggctggaggtttctcatcgcctggctccctggcaggcatctccaccgcacccgtgccgcttcctattggggcctccccagggcgggagtccccgcgggtctcatcacacaagtgggtcgtccctgtcaacaccccggtcccgtggcggaacttcccaggtgggctccccaaccttgctgtctccagctgtgccatcaaagcagaaaagggacaggagcatcctcacgctgtctaaagagccagggcaccagaaaggcaaagagcgtcggtccgtgctggagtgcagaaataagggggtcctgatgttcccagaaaaatctccgtctattgacctaacccagtcaaatcctgaccattcgagctccagatctcagaaatcttcatccaaactgaacgaagaagatgaggtcatcctcttactggactcggatgaggagctggagctagaccaaaccaaaatgaagtccatttctagtgatcctctggaagaaaagaaagctctagaaattagccctaggtcctgtgagctgttttccatcattgatgttgatgcagatcaggaaccttcccagagcccaccaagaagcgaagctgtgctgcagcaggaggatgagggggcgctgccggagaatcggggctctttgggcaggagaggggctccctggctgttctgtgaccgtgagagcagccccagcgaggccagcaccacagacacctcgtggctggtgcccgccaccccgctggccagcagaagccgtgactgttcttcccagacccaaatcagcagcctcaggagcgggctggccgtgcaggcggtgactcagcacacgcccagggcctcagtaggaaacagggaagggaacgaagtcgcacagaagttttctgtcatcaggccccagacaccaccgccccagacaccgtcctcatgcctcactcccgtctctccaggaacttctgacggcagaaggcaaggccacagaagcccttcccgtccccaccccgggggccacccgcactcctctccgctggctccacatcccatctcaggggaccgcgcccacttcagcaggcggttcctgaaacactcgccgcctgggccaagcttcctgaaccagaccccagcgggtgaagtggtggaagtcggagacagtgacgatgagcaggaggtggcctcccatcaggccaacagaagccccccactggacagtgaccccccaattccaattgacgactgctgctggcacatggagcccctctcgccaattcccattgaccactggaacctggagcggaccggccccctgagcaccagcagccccagccgcaggatgaacgaggccgccgacagccgtgactgtcgctccccgggactcctggacaccacccccatccgaggaagctgcactacccagaggaaattgcaagagaagtcctcgggcgcgggctccctggggaatagcaggccgagctttctgaattcggctctgtgggacgtttgggacggggaagagcagaggcctccagagacccctcctccggcccagatgccaagcgctggtggagctcagaagcccgaagggttagagacacccaaaggtgctaatcggaagaagaacttgccccccaaagtgcccataacgccgatgccacagtattccattatggagacgccggtgctgaagaaggaactggatag

SEQ ID NO: 89612 - DNA, 1938 bp, Homo sapiens; identical to SEQ ID NO: 61686

SEQ ID NO: 89613 - DNA, 2348 bp, Homo sapiens
ctatagctctgctgattgtagatggcctggcctgggatgaccaaggaggtctggctctgcttcacatatcccccagcaagcttatcctctagcaagatagctcaggcatgtccttgtcatggtgaggtgcacaatcacacgagcctttttcaagtctctgctgtgtcacatttgtcaatattccattggtccacagtaagtcacatgaccctgggcaggatgcctgcaaagaatgaaagagcactgcaaactgaggtggttaacgcgaatgataaccacaagtgctgttttttgcttttctctccaacccagctgtgaagtttgggaggatgtccaagaagcaaagggacagcctgtatgctgaggtgcagaagcaccagcagcggctgcaggaacagcggcagcagcagagtggggaggcagaagcccttgccagggtgtacagcagcagcattagcaacggcctgagcaacctgaacaacgagaccagcggcacttatgccaacggcagcgtcattgacctgcccaagtctgagggttattacaacgtcgtttccggtcagccgtcccctgatcagtcaggacttgacatgacctggaatcaaacagataaagcaagaacctatctatgacctcacatccgtacccaacttgtttacctataggctctttcaacaattgggcagttagcaccagggataacccatgactgaaatcgaccgaattgcacagaacatcattaagtcccatttggagacatgtcaatacaccatggaagagctgcaccagctggcgtggcagacccacacctatgaagaaattaaagcatatcaaagcaagtccagggaagcactgtggcaacaatgtgccatccagatcactcacgccatccaatacgtggtggagtttgcaaagcggataacaggcttcatggagctctgtcaaaatgatcaaattctacttctgaagtcaggttgcttggaagtggttttagtgagaatgtgccgtgccttcaacccattaaacaacactgttctgtttgaaggaaaatatggaggaatgcaaatgttcaaagccttaggttctgatgacctagtgaatgaagcatttgactttgcaaagaatttgtgttccttgcagctgaccgaggaggagatcgctttgttctcatctgctgttctgatatctccagaccgagcctggcttatagaaccaaggaaagtccagaagcttcaggaaaaaatttattttgcacttcaacatgtgattcagaagaatcacctggatgatgagaccttggcaaagttaatagccaagataccaaccatcacggcagtttgcaacttgcacggggagaagctgcaggtatttaagcaatctcatccagagatagtgaatacactgtttcctccgttatacaaggagctctttaatcctgactgtgccaccgcgtgcaaatgaaggggacaagagaactgtctcatagtcatggaatgcatcaccattaagacaaaagcaatgtgttcatgaagacttaagaaaaatgtcactactgcaacattaggaatgtcctgcacttaatagaattatttttcaccgctacagtttgaagaatgtaaatatgcacctgagtggggctcttttatttgtttgtttgtttttgaaatgaccataaatatacaaatataggacactgggtgttatcctttttttaattttattcgggtatgttttgggagacaactgtttatagaattttattgtagatatatacaagaaaagagcggtactttacatgattacttttcctgttgattgttcaaatataatttaagaaaattccacttaataggcttacctatttctatgtttttaggtagttgatgcatgtgtaaatttgtagctgtcttggaaagtactgtgcatgtatgtaataagtatataatatgtgagaatattatatatgactattacttatacatgcacatgcactgtggcttaaataccatacctactagcaatggaggttcagtcaggctctcttctatgatttaccttctgtgttatatgttacctttatgttagacaatcaggattttgttttcccagccagagttttcatctatagtcaatggcaggacggtaccaactcagagttaagtctacaaaggaataaacataatgtgtggcctctatatacaaactctatttctgtcaatgacatcaaagccttgtcaagatggttcatattgggaaggagacagtattttaagccattttcctgtttcaagaattaggccacagataacattgcaaggtccaagacttttttgaccaaacagtagata

SEQ ID NO: 89614 - DNA, 397 bp, Homo sapiens
ggaacgacatttccctgaatgtctttcctttatggcaccaagttaaaatctgctgattttctactgtgcatgaggtttggcagtcaggactagagaagtcattacccgctttgtagagccagcatactcagagacataaaggtggcacacaggcgcaccatgcacacagccttctggatcattgtactcattcctgccactgttaatgaagagtgtctctacaacagacaccagctgcctaactttcagccagacatctccatgagctctcccaacatgaagacatttagtgtggattgctacaacacctgccacgtccaccaggccactgattctgactgtcgtggtgatcatctctgaagctaacaccctcctttaggtcttaccttatttttat

SEQ ID NO: 89615 - DNA, 2072 bp, Homo sapiens
tttcgtattttagcttctctgaggtgtgttcaccggatcagagatagcagagcgccgagttggggccacgaaggcgtgaggggagtcgtcgtccctcctgcacgaaagcgtctaagccttggcgacgccgccctgggggacccacgtcaggcctgggatagggaccgctgtccccgggtccctaccaatgtcgcccgtcgctcccggcccagctctacccgcagagtctgatggcagcggccactctgaggacgccaactcagggcactgtgacctttgaagatgtggccgtacacttctcctgggaggaatggggtctccttgatgaggctcaaagatgcctgtaccgtgatgtgatgctggagaacttggctcttttaacctctctagatgttcatcatcagaagcagcaccttggagaaaaacatttcataagcaatgtgggccgagccttgtttgtgaagacctgcacattccatgtgtcaggggagccttccacctgcagagaagttgggaaggacttcctggccaagttgggatttctccatcaacaggctgctcacactggggagcaatccaatagcaaaagcgacggtggggccatcagtcacagaggaaaaactcattacaactgtggagaacacacaaaagcattcagcggtaaacacacacttgttcagcagcagagaaccctcactacagaaagatgttacatatgcagtgaatgtgggaaatcctttagcaaaagctacagtctcaatgaccattggagacttcacactggagaaaagccttatgaatgtcgagagtgtgggaagtcctttaggcaaagctctagtctcattcaacaccggagaggtcacactgcagtacgacctcatgaatgtgatgaatgtggaaaattatttagcaacaagtctaacctcattaaacatcggagagttcacactggggaaaggccatatgagtgcagtgaatgtgggaaatcctttaaccaaaggtctgcactccttcaacatcggggagttcacactggggagaagccttatgagtgcacggaatgtgggaaatcctttagccataactccagccttattaaacatcagagaattcatagtggataaaaggccttatgagtgcacggaatgtgggaagtcatttagccaaaactctagcctcattgaacaccatagggttcacactggagaaaggccttataagtgcagcgaatgtggaaaatcctttaggcaaaggtctgcactccttcaacatcggggagttcccactggggagaggccttatgagtgcagtgaatgtgggaagttctttccctacagctccagtctcggaaaacaccagagagttcacactggatcaagaccctatgagtgcagtgaatgtgggaaatcctttactcaaaattccggcctcattaagcacaggagggttcacactggggagaagccttatgagtgcacggaatgaaagaaatcctttagccataactccagccttattaaacatcagagaattcatagtcgataaaagccttatgagtggcaaatgtggaaatctgttagcaccctggagaaagtccttgagtacacagtgaatgtcagaaagcttcagctgaaggccatatctcattgagtgccacacagttcacaagggaaagacacttttgatatgtagggatgtccagttgatataacagctctgaaggagatcccttatgagggtggcatcagcctgaattgaacatcctatatctgaacatctgcataaatccaggtatgtgtgaactgcattgcaccttttgccctgcccagggcccatgtcagatttatgtctctgctgatactatagtggaagccattttacctctaccgcctggcaggtgaccaccagtgtgcaccactcacccatcccagtgtattcaggtaagtgaaccttggtgttctgttcatgggaggaatttgtaaatagcccaagcatttattccgttttttttttttcctttctgatgagttaggccatggacctgacccagttttgccagaggaatctgctgg

SEQ ID NO: 89616 - DNA, 3142 bp, Homo sapiens
  misc_feature (1)...(3142): n = a,t,c or g
ttttttttttttagattttccaactacacagtttattaagtaaagtatctcaacaatatctcagagcagtaaaaaccaaggcatccccaaacactgcatgcgtgacttagaccagcaaagaagtcctcaaactttgcaccaagtcccaacattggccagcagggggcaagtggtgaagtcttccggaacccaagtgccttggcgctgactggcccccattcgatgagtgagcttggatgacagggccggcttggagataggacaatcggcttcacagggtccttttcatgtccgatccccttaagcattcccgagggagccacaaggaacttgggggcggtccgtgcaaagcgtcggcattgaacagggggtctgttttggagtctgaatggctctggctggcctcttgggtggccttcaagccaaactgggaaacgacttgtctataacccctggggaactcgaagtgttccatgctcactcgggaagcactgataaccttccccataggggaaacggactcacaaacacaggactccgtcagtagtttctgcaggggaaacttaaaatcatgaaaagggtcatcaatcaacagatctcagaagtcactgtgcagggactactgagggccgcgagaggaagtgcaaacctcagctgaaaagcaactcagggtggctgagtgagccctcacttcccggaccacccgcacgtgcagccaacacctcccaaactaacttggggccaaagtggctctttccctccaaagtggaggctgctgggtctcttcggtctcctcctcgccccaagtcctgtttctccctctgggcgtcggaaccaacctctgcggtgcggatcattttcctttcgnccatggggcggcgggccaatgagagcctcaatgtccctcaatagtttatcacttccttttccagaagggcgtttgccagcgcctgcaacttgtcccaggttgtcctgcagcaccttctcggtgtgtctgtaggccttggccaccagcagtcttgcttcatggtccatcatctgctgcaggccttggctgaaggggcgccgcccgatgcccatgaggccctcctgcgcctcagggaaggagatgggcccgatgccaggtgccatcccaaactgcttcaccatggagtaggcgatgcgggtgaccttcctcaggtcgtcctgtgccccagaagtgacctcgttgaaggacagtgcttccgaggcccgtcctcccagggccatgcacatccgctcaaacagctgctccttggtgaagaggtgctggtctctggggagcatctgagcaaagcccagggcggcgtttgtccgaggggttatggagaccttcatcacggcctccgtgtgctccagcatccagcccaccaaggcgtggcccgactcatgaaacgcaaccactttctgttcttccttggacaggatcttgctctttttggcagtccctgcgaggacgcgctccacggcgtactcgaagttgagagtgtgcacgagaagtgtgtccctaccgcgccgcgtgcagcacagcctcttgccagatgttggcgatgtcagccccactgaatcctggtgtcagctctgccagacgctgggagtaaaaggtgctggactgggtcagcttcaggctcttcaggtgctgctcaaaaatctcccgcctctcctgcagcgtggggagatcaatgaagacgtgccggtccagtcggcctggcctcatcagagcaccgtccaaaatgtcagctcggttcgtggacgccaggacgatgacatggtctgtggtacccattccatccatttaaaccagaagctggttgagcgtctgctcctcctccgtgttggagaagccggacatggtggtggagcgcttcttgcccaccgcgtcgatctcatcgatgtagacgatgcagggggcccgggctcgggcttccttaaaaaggctccgcacacgggcagcgccgaggcctccaatgacctccacgaactctgggccggccatcgccaggaagggcacctgagcctccgtggccaccgccttggccagcagcgtcttcccacagccgggggggccgagcagcagtgcgccctttgggaccttggcgccaagctggaggaagcgttctgggctcttcagataatccacaaactcgcggacttccagtttggcttcgtgcattcctgccacgtctttgaagctgactcctttccccatcttcccatccacaatggtgaaacgagccattttaagctgattaaaagcactgaatccaccttcccttccagtcatcccggccagacggaaaacataccacaggatggccaggcccactgccgtcatccccacagagtacagggcatttccaaagaatcctgttcgcttgtaggaaactgggatcctgtccttggcctcgatattcagctcatcttcagctgctcgaagcttctcttcaaacttgtcaatatttgcaacctgcattcggtacatcaaggctagccgaggccgcccaaacaccacggctccagggtgcaggtagacttccaccacgtcgctctcaggcaccacctggacgcgctgcacctcgcccttggccagcatctcgtggacaaagtcgttccaggaaatgctgcctccgctggtgctgagagcattcaggaggctcatgacaaccgcgatgaccagcaaggtgcgcagccgctctcggtacatctggtcgtcccgctcacggcgtctcctctcctcttcgtcctcttcaggcgccttccccttcgacttatccttctccttattcttctgcttcaaccttgaggtgttaaaatagaaagtaccacctaaaagttgccagagtctgactggattctgaactaaatgttgtttcaacaacaatccgttgatcccttcaaaggtaggggttagcagtctcaattgtaagctctgcagagctcggcctccagcctcggcgaggtcccccggaggcctgctggccatgtacggccgccccctcccgggcctggcggggaaccctggactccaggccgggcctgggccccacagcggccgaggacccgggcctggaccccggcggagggcacggagcagcagcagcagcacggccatgttggcctgaaa

SEQ ID NO: 89617 - DNA, 2102 bp, Homo sapiens
  misc_feature (1)...(2102): n = a,t,c or g
ctgaattcctgggtcgacgagttcgtctctggttcagcttccttttcctgtttggttttaagtaggctatattaatcattttgctgtcttcagagggtctgtggtcctctgatcaacataggctggtgggagtacaggactcgcctcctcagggttccctgtgctgccacttttcagccatggccacaagtgaacagagtatctgccaagcccgggcttccgtgatggtctacgatgacaccagtaagaaatgggtaccaatcaaacctggccagcagggattcagccggatcaacatctaccacaacactgccagcaacaccttcagagtcgttggagtcaagttgcaggatcagcaggttgtgatcaattattcaatcgtgaaagggctgaagtacaatcaggccacgccaaccttccaccagtggcgagatgcccgccaggtctacggcttaaactttgcaagtaaagaagaggcaaccacgttctccaatgcaatgctgtttgccctgaacatcatgaattcccaagaaggaggcccctccagccagcgtcaggtgcagaatggcccctctcctgatgagatggacatccagagaagacaagtgatggagcagcaccagcagcagcgtcaggaatctctagaaagaagaacctcggccacagggcccatcctcccaccaggacatccttcatctgcagccagcgcccccgtctcatgtagtgggcctccaccgccccccccacccccagtcccacctccacccactggggcttaccccacctcccccacccccacttgccagccggaggaagcccagggggtccagccacgacgagagcttccatgttcaggactggccgcttgccattagctgggggncaagctgagaagagtccaacggccagaagacgcatctggaggctccagtcccagtgggacctcaaagtccgatgccaaccgggcaagcagcgggggtggcggaggaggcctcatggaggaaatgaacaaactgctggccaagaggagaaaagcagcctcccagtcagacaagccagccgagaagaaggaagatgaaagccaaatggaagatcctagtacctccccctctccggggacccgagcagccagccagccacctaactcctcagaggctggccggaagccctgggagcggagcaactcggtggagaagcctgtgtcctcgattctgtccagaaccccgtctgtggcaaagagccccgaagctaagagcccccttcagtcgcagcctcactctaggatgaagcctgctgggagcgtgaatgacatggccctggatgccttcgacttggaccggatgaagcaggagatcctagaggaggtggtgagagagctccacaaggtgaaggaggagatcatcgacgccatcaggcaggagctgagtgggatcagcaccacgtaaggggccggcctcgctgcgctgattcgtcgagcccatccggcgacagaggacagccagaagcccagccagccccagactccagtgcaccagagcacgcacaggagcctgggcgcgctgctgtgaaacgtcctgacctgtgatcacacatgacagtgaggaaaccaagtgcaactcctgggtttttttagattctgcctgacacggaacaccaggtctgctcgtcttttttgtgttttatatttgcttatttaaggtacatttctttgggtttctagagacgcccctaagtcacctgcttcattagacggtttccaggttttctcccaggtgacgctgttagcgcctcagctggcggtgacagccggcccagcgtggcgccaccacacaccgcagagctgtccaggcacagctccgtccccagcgctcatggtgttgaaactgtctgtcatgcaccacggtgtctgtgtccacacagtaataaacggtttactgtccgcaccctcgggctcaggccctcgcattggtccatcaccctccgggctggggatgccccttttcaaaaaagggcccgggaccacggtgaccaggagtcgtaggagcaagatggcggtcttcgacaggaagctgggctcagaacattcccaagccccgggaagg

SEQ ID NO: 89618 - DNA, 7642 bp, Homo sapiens
atggggagcggcgccggggagctgggccgggctgagaggctgccagtgctctttctcttcctgctgtctttgttctgcccggcgctctgtgagcagatccgctacaggattcccgaggaaatgcccaagggctccgtagtggggaacctcgccacggacctggggttcagcgtccaggagttaccgactcgaaaactgcgcgtcagttcggagaagccttacttcaccgtgagcgcagagagcggggagttgcttgtgagcagcaggctagacagggaggagatatgcgggaagaagccagcttgtgctctggaatttgaggctgttgctgaaaatccactgaacttttatcacgtgaatgtggagatcgaggacattaatgaccacacgccaaaattcacgcaaaattcctttgagctgcaaataagtgagtctgcacagcctggcacaagatttatactagaagtagcagaagatgcagatattggcttaaactctctgcagaagtataaactctctcttaacccaagtttctcattaataattaaggagaaacaggatggtagtaaatacccggaactggcactggagaaaaccttagaccgggaacaacagagttaccatcgtttagtcctgactgccttggacggtggacatccacccctaagcggcaccactgagctccggatccaggtaaccgacgccaatgataatcccccggtattcaaccgagacgtgtacagagtcagccttcgggaaaacgtgccaccaggcaccactgtgttgcaagtgtcagccactgaccaagacgagggcatcaactcagaaattacttattccttctacagaaccgggcaaatctttagtctgaattcaaagagcggagaaattaccactcaaaagaaactggattttgaagagaccaaggaatattcaatggttgtagaagggagggatggtggtggactggttgcacaatgtacagttgaaattaatattcaagatgaaaatgacaatagcccagaagttacattccattctctacttgaaatgattctggaaaacgcggtgcctggaacactaattgctttgatcaaaatacatgaccaagattctggggaaaatggggaggttaattgtcaattacaaggcgaagtcccttttaagattatctcttcatccaaaaattcgtataagttggtaacagatggaaccctagaccgagagcaaaccccggagtacaatgtcaccatcacagccacagacaggggcaagccgcccctctcctccagcataagcgtcatcctacatatcagagacgtcaacgataacgctccggttttccaccaggcgtcctacttagtcagtgtacccgaaaacaaccctcctggggcctccatcgcgcaagtctgcgcctcggacctggacttggggttgaacggccaagtctcctactctatcatggccagcgacctagagcctctggcactggcctcttacgtgtccatgagcgcgcaaagtggggtggtgttcgcgcagcgcgcctttgactacgagcagctgcgcaccttcgaactcacactacaggcccgcgaccagggctcgcctgcgctcagcgcaaacgtgagcctgcgcgtgttggtgggcgaccgaaacgacaacgcaccgcgggtgctgtaccccgcgctgggtcccgacggctctgcgctcttcgatatggtgccgcgcgctgcagagcccggctacctggtgaccaaggtagtggccgtggacgcagactcaggacacaacgcctggctgtcctaccacgtgctgcaggctagcgagcccgggctcttcagcctggggctgcgcacaggagaggtgcgcacagcgcgtgccttgggcgacagggacgcggcccgccagcgcctgctggttgctgtgcgtgatggtggacagccgccactctccgccaccgccacgctgcacttggtctttgctgacagcttgcaggaggtgctgccggatatcactgaccgccctgtaccctctgacccccaggctgagctgcagttttacctagtggtggccttggccttgatctcagtgctcttcctcctggccgtgattctggccgttgccttgcgcctgcgacgctcctccagccctgccgcctggagctgcttccaacctggtctctgtgtcaagtctggacctgtggttccccccaactacagtcaggggactttgccttattcctacaacctatgtgttgcacatacaggaaagacggagtttaatttcctaaaatgtaggtggaagaaagaacctgatgaagcagcgcgcacagagatccttttgagaaaattccaaagcgaggcagcaatggcagctccaaccaaatgccagctccgcggaagattagtcctgctatgctcgctcctggggatgctatgggaggccagggccagtcagattcgctactcagtgcctgaagagacagaaaagggctatattgtgggcaacatctccaaggacctggctctggagccccgggagctggcggagcgccgagtccgcatcgtctctagaggtaggacgcagcttttctctctgaacccgcgcagcggcaccttggtcaccgcgggtaggatagaccgggaggagctctgtgctcagagcccgcggtgtctggtgaactttaaagtcctggttgaagacagagtgaaactgtacggaatagaaatagaagtaactgatattaacgacagcgccccaaagttccaggccgaaagtctggaagtaaaaattaacgaaatcgcggttcctggagcacgttatccacttccagaagctattgatccggatgttggcgtgaactccctccagagctaccagctcagccccaatcaccacttctccctgaacgtgcagactggagacaatggagccataaacccagagctggtgctggagcgcgccctggacagggaggaggcaactgcccaccacctggtcctcacggcctcggatggcggcgagccgcgtcgctccagcacagtgcgcatccatgtgacagtgttggatacaaatgataatgccccggtttttgctcaacggatttaccgagttaaagtccttgagaacgtgcccccaggcacctggctgcttactgcaacagccagcgacctggatgagggaatcaacggaaaagtggcatacaaattctggaaaattaatgaaaaacaatctctgctattccagcttaatgaaaatactggggaaatatcaacagcaaaaagtctagattatgaagaatgttcattttatgaaatggaaatacaagctgaagatggtgggggattgaaagggtggacaaaagtgctcatttcggtggaagatgtaaatgacaatagacctgaagtgaccattacatctctgtttagcccagtgagagaagacgcacctcagggaacagtaattcttcttttcaatgctcatgaccgagactccgggaagaatggtcaagttgtctgttctatccaggagaatctatcttttacattagaaaattcagaagaagattattacagattgttgacggcccaaattcttgaccgagaaaaagcctcagaatataatatcacggtgactgcaacagacagaggaactccgcccctgtccacagaaattcacatcaccctgcaagtgactgacatcaatgataatccacctgctttctctcaagcctcctactcagtctacctcccggaaaacaacgccagaggtacttccatcttctccgtgattgcctatgaccctgatagcaatgagaattctagagttatttactccttggcagaggataccatccaagggtctcctctctccacctatgtctctattaactcagacactggtgtgctgtatgctctgtgctcctttgactatgagcagtttagagatttgcaaatgcaggtgacggcaagtgacagtggaagcccaccacttagcagcaatgtgtcattgagactgtttgttttggaccagaatgacaatgccccagaaatcctgtaccctgccctccccactgatggttctactggtgtggagctggcaccccgctctgcagagcctggctacctggtgaccaaggtggtggcagtggacagagactcaggccagaatgcttggctctcctaccgcctattcaaggccagtgagccagggctcttctcggtggggctgcacacaggtgaagtgcgcacagctcgggccctgctagatagagatgcgctcaaacagagccttgtggtggctgtacaggaccatggccagccccctctctcggccactgtcacgctcacagtagccatagctgacagcatcccagacatcctggctgacctgggcagtcttcagatccctgcagacctggaggcctcagaccttaccctctacctcgttgtggctgtggcagtcgtctcctgtgtcttcctcaccttcgttatcacgctgctggccctcaggctgaggcactggcactcctcgcatctgctgcgggctaccagtgatgggttggctggtgtgcccacctcacactttgtgggtgtagatggggttcgagctttcctacagacctattctcaggagttctccctcaccgctgactcaaggaagagtcacctgatcttcccccagcccaactatgcagacacactcatcagccagcagagctgtgagaaaaatgagcctttgtgcgtctctgttgattccaagtttcctatagaagacacccctttggttccgagtgcactttctccaactggaaaagcggggacccagcgagaacccgagcgaacgatgggagggagctgcgcgcagaggcgccgggccggcccgcggcaggtgctatttcctttgctgctgcctttgttctaccccaccctgagtgagccgatccgctactcgattccggaggagctggccaagggctcggtggtggggaacctcgctaaggatctagggctcagtgtcctggatgtgtcggctcgcaagctgcgagtgagcgcggagaagctgcacttcagcgtagacgcggagagcggggacttacttgtgaagaaccgaatagaccgtgagcaaatatgcaaagagagaagaagatgtgagttgcaattggaagctgtggtggaaaatcctttaaatatttttcatgtcattgtggtgattgaggatgttaatgaccacgcccctcaatttgataaaaaggaaatacatttagaaattttcgaatctgcatccgctggtacacgactatcgcttgaccctgccacggatcctgatataaacataaactcaattaaagattataagataaactctaatccttatttttcattaatggttagagttaattccgatggtggcaaatacccagagttatctctggagaaactcctagaccgggaagaacagagatctcatagcttgatattgactgccttggacggaggggacccaccaagaagtgccaccgctcacatagaaatttctgtcaaggataccaatgataaccccccggttttcagcagagacgaatatagaattagtcttagtgaaaatctgccccctgggtcccctgtgttgcaagtgacagccactgaccaggatgagggggtcaatgctgagataaactactacttccgaagcactgcccagagcacaaaacatatgttctcattggatgagaaaacaggtatgattaagaataaccagtcatttgattttgaagatgtagaaaggtacaccatggaagtggaagcgaaggacggaggtggtctctctacccagtgtaaagtaatcatagaaatccaagatgaaaacgacaacagcccagaaataatcatcacttctctctctgatcagattttggagaattcacctccaggaatggttgttgccctcttcaaaacacgggatctggatttcggaggaaatggagaagtcaggtgtaatatagaaacagacattccattcaagatttattcttcttccaataactactacaaactggtgacagatggagccctggaccgagagcagacaccagaatacaatgtcaccatcgtagccactgacaggggcaagccgcctctttcttccagtagaagcatcaccttgtatgtcgctgacatcaacgacaacgccccagttttcgaccagacgtcctacgtggtccacgtggccgagaacaacccgccaggagcctccattgcgcaagtgagcgcctctgacccggatttggggctcaatggccacatctcctactctatagtggcgagtgacctagagcccctggcggtgtcgtcatacgtgtcagtgagcgcgcagagcggggtggtgttcgcgcagcgcgcctttgatcacgagcagctgcgcgccttcgcgctcacgctgcaggcccgcgaccacggctcgcccacgctcagcgccaacgtgagcctgcgcgtgttggtgggagaccgcaatgacaacgcaccgcgggtgctgtacccagctctgggtcctgacggctccgcgttcttcgatatggtacctcgctctgcagagcccggctacctagtgactaaggtggtagcggtggacgccgactcgggacacaacgcctggctgtcctaccacgtgctgcaggccagtgagcccggactcttcagcctggggctgcgcactggggaggtgcgcacggctcgagccttaggcgacagggacgcagcccgccagcgcctgctggtcgctgtgcgtgacggtggacagccgccactctctgccaccgccacgcttcatctggtcttcgcagacaacttgcaagagatactgccagacctcagcgaccgccctgtactctctgacccccaggctgaactgcagttttacctggtggtggccttggccttaatctcagtgctcttcctcctcgccgtgattctggccattgccttgcgcctgcgacgctctctcagccctgctacttgggactgcttccatcctggtctctgtgtcaagtctggacctgtagttccccccaactacagtgaggggactttgccttattcttataatctgtgcattgcacatacgggtacaaaagagtttaatttcctaaaatgcagtgtgcccctacattccaatgaagacatggtttgcagtgtttctcctggagccttaattccacctcatggtggggaggatttgacttcacatcctgagactctgacttcgcaagccccgcccaacacggactggcgtttctctcaggcccagagacccggcaccagcggctcccaaaatgggcgatgacaacggcaactgggccaaacaaaccagttttgacaacagagatgcttgcaagccatgatcttggcgtccgccagtgaagctgctgatgggagctccaccctgggagggggtgccggcaccatgggattgagcgcccgctacggaccccagttcaccctgcagcacgtgcccgactaccgccagaatgtctacatcccaggcagcaatgccacactgaccaacgcagctggcaagcggtgatggcaaggccccagcaggtggcaatggcaacaagaagaagtcgggcaagaaggagaagaag

SEQ ID NO: 89619 - DNA, 1627 bp, Homo sapiens
gtaaatgtgccacgtcttctaagaagggggagtcctgaacttgtctgaagcccttgtccgtaagccttgaactacgttcttaaatctatgaagtcgagggacctttcgctgcttttgtagggacttctttccttgcttcagcaacatgaggcttttcttgtggaacgcggtcttgactctgttcgtcacttctttgattggggctttgatccctgaaccagaagtgaaaattgaagttctccagaagccattcatctgccatcgcaagaccaaaggaggggatttgatgttggtccactatgaaggctacttagaaaaggacggctccttatttcactccactcacaaacataacaatggtcagcccatttggtttaccctgggcatcctggaggctctcaaaggttggggaccaggggcttgaaaggaatgtgtgtaggagagaagagaaagctcatcattcctcctgctctgggctatggaaaagaaggaaaaggtaaaattcccccagaaagtacactgatatttaatattgatctcctggagattcgaaatggaccaagatcccatgaatcattccaagaaatggatcttaatgatgactggaaactctctaaagatgaggttaaagcatatttaaagaaggagtttgaaaaacatggtgcggtggtgaatgaaagtcatcatgatgctttggtggaggatatttttgataaagaagatgaagacaaagatgggtttatatctgccagagaatttacatataaacacgatgagttatagagatacatctacccttttaatatagcactcatctttcaagagagggcagtcatctttaaagaacattttatttttatacaatgttctttcttgctttgttttttatttttatatattttttctgactcctatttaaagaaccccttaggtttctaagtacccatttctttctgataagttattgggaagaaaaagctaattggtctttgaatagaagacttctggacaatttttcactttcacagatatgaagctttgttttactttctcacttataaatttaaaatgttgcaactgggaatataccacgacatgagaccaggttatagcacaaattagcaccctatatttctgcttccctctattttctccaagttagaggtcaacatttgaaaagccttttgcaatagcccaaggcttgctattttcatgttataatgaaatagtttatgtgtaactggctctgagtctctgcttgaggaccagaggaaaatggttgttggacctgacttgttaatggctactgctttactaaggagatgtgcaatgctgaagttagaaacaaggttaatagccaggcatggtggctcatgcctgtaatcccagcactttgggaggctgaggcgggcggatcacctgaggttgggagttcgagaccagcctgaccaacacggagaaaccctatctctactaaaaatacaaaagtagccgggcgtggtgatgcgtgcctgtaatcccagctacccaggaaggctgaggcggcagaatcacttgaacccggaggcggaggttgcggtaagccgagatcacctccagcctggacactctgtctcgaaaaaaaaaa

SEQ ID NO: 89620 - DNA, 432 bp, Homo sapiens
cgggccgaactgccgggtcgacccacgcgcacgcaggtatgcctctgtctggaggggaagggaaggtggtggtggtgactgacagcctggagccctgggcggtgggtgctggattctaggtggctcagagggcacgcctgccccggctctaagcttcctgagagcagctcgtcattccttgggggcctcatgggaagatcatggttgtggccccaccaatgcccacctgggtatggctcaaggagcaacagtgtagagagaccaagagcatttggggcaggaggtccctgacactcagggctttggggtggggaaggacaggagttggagggaggccttggaccctcagctgtcacacaggtgggcgtcccccagtgaaaggcacagactgccaagggaggacgggaggccgactgaagaaaaccatcgtct

SEQ ID NO: 89621 - DNA, 5276 bp, Homo sapiens; identical to SEQ ID NO: 61414

SEQ ID NO: 89622 - DNA, 1606 bp, Homo sapiens
caacataattcaactatcagcctcatatatatatatatatatatattttttttttttttgagacatatgacaatttctgaatagcaactggaatattcaaccaacaatggtcatggtcagttttgtattttttccttaacttatatacttcattctttccaactattttaaagctaaatcttttttaaaaaagttttaaaaataagtcacaggcaaatcatgaagagttgggtttatttcaacagtaaatctgaaactcttgccttaagcaagagtactacagtaattatatcaggaatagacaatttcctacactgtcaaatatataaaagttccttttgcactttcttcaacactgatcaacaagcagattcagtccacatttgctttgatctaactactgagttaacccaagcttcttcttcagagactctggcatctcgggtggaggagggcgaggaagtctgaagtagacccttcacgggagtccataggataaaaccacctgtaggtgcaggtcaggggtaccaagtcatgatcgatacggggcaaaacaagtcccttccattacaccttttaaaatcccaagtctctttggaaggacccagaggaaggcactggctaaccttttttccttaatccaacaccggttaccccaggaattcaggcaggggtgagaaaacaattggcacaaaagactcgagctatggtaacctgctaccaaatggttacaaccaggctgctctggcttttgaacattcaactgcgggggcctatggaacccacaaaacttgtacagtggcttcaaacagtacgttcaaggcatggggaacttcaattcatggtgtatggtatctgtctcatccagagagggagcaaccccccttgtagaatgacttttaggcccttacttaccttatacattttggggagctgccatccccctcaaaagtgtttggcataacctgggctggggtttgaaattcgaacccttagcagccttcccataggaccccagggcaattgtcagcaaagaaattcaggcacctggcagaggcagcccaaatataagtgatgtgccgcccagagataagtattctcctctccaagcatattgctatacaagactttaaagacttcataaaagccaaacttgcagagtccctgcatggagtagccaaggaaagtcggagcccatcctttagccaaaccacgaacaccatcctctttaagtgtaactgagaatccgttaaatatgcccttgtacttttgggggtccacctgcatacggcatttcactaaatccaggggaaccacagcagtgtgtgtcagaccacaacttaagaccccaccaaagccacacagtgcataatacttcgcggagccaaattcacaactgtactcttccacggcggcggctgccaggttgcgagggcggcggggctggcccgtgggccctggggagctgctgcggaggtccccgagaccatcgtgcaccagctgcagatgtggcgtgttgaaggggttcgcccgcgccaggtgcgccacggacgagaacattccctaagatggcgatcacacaaccactcccttggaaaggttgcgg

SEQ ID NO: 89623 - DNA, 417 bp, Homo sapiens
  misc_feature (1)...(417): n = a,t,c or g
ctgaaacttcactacttatgtagtctcatcgtgagcacacgagaacccagcccactatgaagcgccttggcttagccttcatctaggctctcacggattccatgattggagctgattcatctgaggagaactgattgcggagaaaggaaagattctgtgatgggtatggcccttatcagccaggtccacaacatccactatacccacagccctaccagccactataccagcagtagtacctttgaatatcatcagtaactgcacgacatgattattgaggctcgaatggcaaagaccactcccacatcgcatattctcatctttcataccatatcgcactactaccactttctgaagaatcgtcatagagccatgcanatgaagaacactataatgtactagatactctccgtttca

SEQ ID NO: 89624 - DNA, 579 bp, Homo sapiens
ttttcaagcattggcggtttgacggtagggaagggaataggatgaattgaagtaactgatggaattattttactagaacagaaactctcaaggaatgggtcagactctcagtaagatacagattgtggtacacacatggatttagaatggtccacctgaattctttctgagaatgctgccctgggttggagcatatctttggaatgaggaggacatgggaatgtgtcagtaatctcagttgttccctcgtggcaatctacatattgtatccttggctgtgtccatgttatgaggagcgctaaaatatctgttggagaaatgtccctttaaatatattacgagtacaggacatgccccagcgtgccaggtattgccgttctttatctggtagctcttagaagtagaattcacatttgtacagggcattatgtcttttggggaaaacatttctatttagaatgtaaactatatcatcctcagggtaaccctgtaaagtgaggagtgcaaatatttttcccatttaacagagggagacatcaagaattgctggggatgatggagcaactcaacaacaggcat

SEQ ID NO: 89625 - DNA, 3201 bp, Homo sapiens; identical to SEQ ID NO: 75280
  misc_feature (1)...(3201): n = a,t,c or g

SEQ ID NO: 89626 - DNA, 521 bp, Homo sapiens
  misc_feature (1)...(521): n = a,t,c or g
ttctcgcgtcgacccacgcgtccgcatgtacctaagaacacagcatcaaaatacatgagataaaaactgatagaactgcaaggaaaaatagttgcatccactatgaagttggagttacagttggaggcttcaacatctctctatcagaaataacacaaagccagcaggtaaaaaatcagtaaggactaactcattgtatgaggccaacattaccctaatatcaaaaacaaagatattacaagaaaagaaaatgacaattcgttatctctcataaatatagatgcaaaaaaactcaacaacatattagcaaatcaaacctaacaatatataaaaggaattatatactgtgacagagtggaactcaacaaaatcttcgattaactagatataatagacatctgtaggctacttcatccaacgacaacagaatacactttcttctcaagctcagaacattaaccaggataaaccacattctgggccacaaaacacatcttaacaaatttaaaagaatagaaatn

SEQ ID NO: 89627 - DNA, 8182 bp, Homo sapiens
tgacttatccgctcgacccacgcgttcgagacagtggtaccttttttccttttaggtgatgaaatggtctctgcaagatgttttgttcttgaattggaaatttttaaggctgatatatgctggtacttcatcttctatatgtggactataatttcttcccttaggataactacataaagagacaaaaaaaagaaaaaagagcaaagatctgtgctgtgtcaagtatgacagccatcactcatggctctccagtaggagggaacgacagccagggccaggttcttgatggccagtctcagcatctcttccaacagaaccagacttcatcacctgattcttccaatgagaattccgtagcaactcctcctccagaggaacaagggcaaggtgatgccccaccacagcatgaagatgaagagcctgcatttccacatactgagctggcaaacctggatgacatgatcaacaggcctcgatgggtggttcctgttttgccaaaaggggaattagaagtgcttttagaagctgctattgatcttagtgtaaaaggccttgatgttaaaagtgaagcatgccaacgtttttttcgagatggactaacaatatctttcactaaaattcttatggatgaggctgtgagtggctggaagtttgaaattcatagatgtattattaacaatactcatcgcctagtggagctttgtgtggccaagttgtcccaagattggtttccacttctagaacttctcgccatggccttaaatcctcactgcaagtttcatatctacaatggtacacgtccgtgtgaattaatttcctcaaatgctcagttgcctgaagaagaattatttgctcgttcttcagatcctcgatcaccaaaaggttggctagtggatctcatcaataaatttggcacattaaatgggttccagattttgcatgatcgtttttttaatggatcagcattaaatattcaaataattgcagctcttattaaaccatttggacaatgctatgagtttctcagtcaacatacactgaaaaagtacttcattccagttatagaaatagttccacatttattggaaaacttaactgatgaagaactgaaaaaggaggcaaagaatgaagccaaaaatgatgccctttcaatgattattaaatctttgaagaacttagcttcaagaatttcaggacaagatgagactataaaaaatttggaaatttttaggttaaagatgatactcagattgttgcaaatttcctcttttaatggaaagatgaatgcactgaatgaaataaataaggttatatctagtgtatcatattatactcatcggcatagtaatcctgaggaggaagaatggctgacagctgagcgaatggcagaatggatacagcaaaataatatcttatccatagtcttgcaagacagtcttcatcaaccacaatatgtagaaaagctagagaaaattcttcgttttgtgattaaagaaaaggctcttacattacaggaccttgataatatctgggcagcacaggcaggaaaacatgaagccattgtgaagaatgtacatgatctgctagcaaagttggcttgggatttttctcctggacaacttgatcatctttttgattgctttaaggcaagttggacaaatgcaagtaaaaagcaacgtgaaaagctccttgagttgatacgccgtcttgcagaagatgataaagatggtgtgatggcacacaaagtgttgaaccttctttggaacctggctcagagtgatgatgtgcctgtagtacatcatggaccttgctcttagtgcccacataaaaatactagattatagttgttcccaggatcgagatgcacagaagatccagtggatagatcactttatagaagaacttcgcacaaatgacaagtgggtaattcctgctctgaaacaaataagagaaatttgtagtttgtttggtgaagcatctcaaaatttgagtcaaactcagcgaagtccccacatattttatcgccatgatttaatcaaccagcttcaacaaaatcatgctttagttactttggtagcagaaaaccttgcaacctacatgaatagcatcagattgtatgctggagatcatgaagactatgatccacaaacagtgaggcttggaagtcgatacagtcatgttcaagaagttcaagaacgactaaacttccttagatttttactgaaggatggccaactgtggctctgtgctcctcaggcaaaacaaatatggaagtgcttagcagaaaatgcagtttatctttgtgatcgtgaagcctgttttaagtggtattccaagttaatgggggatgaaccagacttggatcctgatattaataaggacttctttgaaagtaatgtacttcagcttgatccttcccttttaactgaaaatggaatgaaatgctttgaaagatttttcaaagctgtcaattgtcgagaaaggaaactaatagcaaaaagaagatcctatatgatggatgatttggaattaattggactagactacctttggagggttgtgattcagagtagtgacgagattgctaacagagctatagatcttcttaaagagatatacacaaaccttggcccaagattaaaagccaatcaggtggttatccatgaagacttcattcagtcttgctttgatcgtttaaaagcatcatatgatacactgtgtgtttttgatggtgacaaaaacagcattaattgtgcaagacaagaagccattcgaatggttagagtattaactgttataaaagagtacattaatgaatgtgacagtgattatcacaaggaaagaatgattctacctatgtcgagagcatttcgtggcaaacacctctctcttatagttcggtttccaaaccagggcagacaggttgatgagttggatatatggtctcatacgaatgacacaattggttcagtacggcgatgtattgttaatcgtattaaagccaatgtagcccacaaaaaaattgaactttttgtgggtggtgagctgatagattctgaagatgacagaaagctaattggacaattaaacttaaaagataaatctctaattacagccaaacttacacaaataaatttcaatatgccatcaagtcctgatagctcttccgattcctcaactgcatctcctggaaaccaccgtaatcattacaatgatggtcccaatctaaaggtggaaagttgtttgcctggggtgataatgtcagtgcatcccaaatacatctctttcctttggcaatttgcaaacttaggtagcaacctgaatatgccacctcttaaaaatggagcaagagtacttatgaaacttatgccaccagatagaacagctgtagaaaaattacgaactgtttgtttggaccatgcaaaccttggagaaggcaaacttagtccaccccttgactcccttttctttggtccttctgcctcccaagttctatacctaacagaggtagtttatgccttgttaatgcctgctggtgtgcctctaactgatgggtcctctgactttcaagttcacttcttgaaaagtggtggcttacctcttgtactgagtatgctaataagaaataacttcttgccaaatacagatatggaaactcgaaggggtgcttatttaaatgctcttaaaatagccaaactgttgttaactgcgattggctatggccatgttcgagctgtagcagaagcttgtcagccagttgtagatggtacagaccccataacacagattaaccaagttactcatgatcaagcagtggtgctacaaagtgcccttcagagcattcctaatccctcatccgagtgcgtacttagaaatgagtccatacttcttgctcaggaaatatctaatgaggcttcaagatatatgcctgatatttgtgtaattagggctatacagaaaattatctgggcatcagcatgtggggcattaggactattttttagcccaaatgaagaaataactaaaatttatcagatgaccaccaatggaagcaataagctggaggtggaagatgaacaagtttgttgtgaagcactggaagtgatgaccttatgttttgctttacttccaacagcgttggatgcacttagtaaagaaaaagcctggcagaccttcatcattgacttattattgcactgtccaagcaaaactgttcgtcagttggcacaggagcagttctttttaatgtgcaccagatgttgcatgggacacaggcctctgcttttcttcattactttactctttaccatactggggagcacagcaagagagaagggtaaatattcaggtgattatttcacacttttacggcaccttctcaattatgcttacaatggcaatattaacatacccaatgctgaagttcttcttgtcagtgaaattgattggctcaaaaggattagggataatgttaaaaacacaggtgaaacaggtgtcgaagagccaatactggaaggccaccttggggtaacaaaagagttattggcctttcaaacttctgagaaaaagtatcactttggttgtgaaaaaggaggtgctaatctcattaaagaattaattgatgatttcatctttcccgcatccaaagtttacctgcagtatttaagaagtggagaactaccagctgagcaggctattccagtctgtagttcacccgttaccatcaatgccggttttgagctacttgtagcattagctattggctgtgtgaggaatctcaaacagatagtagactgtttgactgaaatgtattacatgggcacagcaattactacttgtgaagcacttactgagtgggaatatctgccccctgttggaccccgcccaccaaaaggatttgtgggactcaaaaatgctggtgctacgtgttacatgaactctgtgatccagcagctatacatgattccttctatcaggaacagtattcttgcaattgaaggcacaggtagtgatttacacgatgatatgttcggggatgagaagcaggacagtgagagtaatgttgatccccgagatgatgtatttggatatcctcatcaatttgaagacaagccagcattaagtaagacagaagataggaaagagtataatattggtgtcctaagacaccttcaggtcatctttggtcatttagctgcttcccaactacaatactatgtacccagaggattttggaaacagttcaggctttggggtgaacctgttaatctccgtgaacaacatgatgccttagagttttttaattctttggtggatagtttagatgaagctttaaaagctttaggacacccggctatactaagtaaagtcctaggaggctcctttgctgatcagaagatctgccagggctgcccacataggtttgaatgtgaagaatcttttacaactttgaatgtggatattagaaatcatcaaaatcttcttgactctttggaacagtatatcaaaggagatttattggaaggtgcaaatgcatatcattgtgaaaaatgtgataaaaaggttgacacagtaaagcgcctgctaattaaaaaattgcctcgggttcttgctatccaactcaaacgatttgactatgactgggaaagagaatgtgcaattaaattcaatgattattttgaatttcctcgagagctggatatgggaccttacacagtagcaggtgttgcaaacctggaaagggataatgtaaactcagaaaatgagttgattgaacagaaagagcagtctgacaatgaaactgcaggaggcacaaagtacagacttgtaggagtgcttgtacacagtggtcaagcaagcggtgggcattattattcttacatcattcaaaggaatggtaaagatgatcagacagatcactggtataaatttgatgatggagatgtaacagaatgcaaaatggatgatgatgaagaaatgaaaaatcagtgttttggtggagagtacatgggagaagtatttgatcacatgatgaagcgcatgtcatataggcgacagaagaggtggtggaatgcttacatacctttttatgaacaaatggatatgatagatgaagatgatgagatgataagatacatatcagagctaactattgcaagaccccatcagatcattatgtcaccagccattgagagaagtgtacggaaacaaaatgtgaaatttatgcataaccgattgcaatatagtttagagtattttcagtttgtgaaaaaactgcttacatgtaatggtgtttatttaaaccctgctccagggcaggattatttgttgcctgaagcagaagaaattactatgattagtattcagcttgctgctagattcctctttaccactggatttcacaccaagaaaatagttcgtggtcctgccagtgactgatgtttctgttttaggtatgatgcactgtgcgttcttctccgtcacagcaaaaatgtacgtttttggtttactcataatgtcctttttaatgtatcaaatcgcttctctgaatacctcctggagtgccctagtgcagaagtgaggggtgcatttgcaaaacttatagtgtttattgcacacttttccttgcaagatgggtcttgtccttctccttttgcatctccaggaccttctagtcaggcatgtgataacttgagcttgagtgaccacttactaagagccacactaaatctcttgagaagggaagtttcagagcatggacatcatttacagcaatattttaatttgtttgtaatgtatgccaatttaggtgtggcagaaaaaacacagcttctgaaattgaatgtacctgctacctttatgcttgtgtctttagacgagggaccaggtcctccaatcaaatatcagtatgctgaattaggcaagttatattcagtagtgtctcagctgattcgttgttgcaatgtgtcatcaccaatgcagtcttcaatcaatggtaatccccctctccccaatcctttcggtgaccttaatttatcacagcctataatgccaattcagcagaatgtgttagacattttatttgtgagaacaagttatgtgaaggaaaattattgaagactgcagtaactcagaggataccatcaaattacttcgctttttgctcttgggagaatcctcagttctcatctactgtcctcagcgaacttctctggcaggttgcatattcatatacctatgaacttcggccatatttagatctacttttccaaattttactgattgaggactcctggcagactcacagaattcataatgcacttaaaggaattccagatgacagagatgggctgttcgatacaatacagcgctcgaagaatcactatcaaaaacgagcatatcagtgcataaaatgtatggtagctctatttagcagttgtcctgttgcttaccagatcttacagggtaacggagatcttaaaagaaaatggacctgggcagtggaatggctaggagatgaacttgaaagaagaccatatactggcaatcctcagtatagttacaacaattggtctcctccagtacaaagcaatgaaacagcaaatggttatttcttagaaagatcacatagtgctaggatgacacttgcaaaagcttgtgaactctgtccagaagaggagccagatgaccaggatgccccagatgagcatgagccctctccatcagaagatgccccattatatcctcattcacctgcctctcagtatcaacagaataatcatgtacatggacagccatatacaggaccagcagcacatcacttgaacaaccctcagaaaacaggccaacgaacacaagaaaattatgaaggcaatgaagaagtatcctcacctcagatgaaggatcagtgaaaagcaataattaactgcttcctttatgactatgcactaaggtcttatagtccaaactttctctgtgtctggctagtattgaaaactagataaactgctccaaaccaacatggagtaaagagcatattcactggtttatttgcagtaatttgcaatttgtcagtgtataagacacatgcagggtgaagtgtacagagttttgtaacaaatgactggtcctaatctgtaaatgagaaaggtatatatactatgttaatgtctgactgttaatt

SEQ ID NO: 89628 - DNA, 1339 bp, Homo sapiens
ccgggtcgacccacgcgtccgatgaggtgcagaagatattctgtgcccacagtttttccctgccttctggaccctcagcccctgggatgggctccttgggattgcccatgcaacaacacagccacaagacattcagcacaccacctcctcctgtgttttgaatctctaaatgaattctgttctaaagcttcttcacgtctctctccatcctgctcccatctccacctctaatgcttcttgggagtctgaagctcagattcacattttcacattttctcgtataaacgttgtgggataagaatggatgatatgtatgtgtctgtgtgagtttggtttctcaacctggactgtgagggctaattcacaaatcacaccatacatgcgcgtgtgcatgcgcacacgcacacacacacacacacacacacacagtccagcaccctcatcagttctctggtttaggttaggtccagatctgatgggactggtcaagaaggggatggtgggggctcctgaagcatttgccctttcttgcctcttgagaccttctttccattggcaattcaaaacaggctgacatacagagggctagcactctaatttgatgtggactcagccactcaggacctaggtctcaggctgcagcttatcctagctcagcaaattgcttcttagaatctttagcttgatttctgtcatttgagcccagggatctacccacttactgaaatctaaattttaaaaaatcagtgatgaaagtaattttcaggatttccctatttaaaagcatccatgaaacagttcctttatgccttctgtttaggatttccagaattaggaagggaaaccaggcttgtgccttggatccaaaagcagcaaaaatactacacttgccaaaagcaaactgaggaatgagcattggccagtcctagtatgaagtcaagaggtggacttttgttaagttagcccttaccatttagtgcttactgaatgccaacaatgcacttagaaaaataagggagacaagaatttacagaccataccctaaactggaaggtacaggaaagacacatctcctagagctgggaatgtgtccctaacatttcaagaagaagcagaaagtaggagagatcacgatctcagtctttttaggattccaacacaaaatggaagggagccctctgtggggtgatattacaaagggtttttcttgtctttctttaaaaaaaaaaaggcattccttactggcttgctaccagcaattgaactgtattctttatataggctagagctgtttgtgtcttcttaaaataaactttttctgttaaaatcaaaaaaaaaa

SEQ ID NO: 89629 - DNA, 1718 bp, Homo sapiens
  misc_feature (1)...(1718): n = a,t,c or g
agcttccagcccagtcggcccggcccgggggccatggagctccgagcggcggatcgcgagcctcctgcgaaccccagcctgcacgcccggttagcattcggccgggagatgcggcagtggaatctggaagggcggtgaaaaacctacgtcctgccctcgcccggcctctccattcgtcccccgggtagagaggtgcccggctcccaccccttcccagccccagccctggagacagcagcccctagactactgagggacagcgacagcatgaaggctccgggtcggctcgtgctcatcatcctgtgctccgtggtcttctctgccgtcttacatcctcctgtgctgctgggccggcctgcccctctgcctggccaacctgcccctggaacaaccaacttcccccaaaaggctcccaggccccactgtgcccgggacccctgcaacttcaagtggaataatagcagtgtgccaagatgggaaagccgctggtcccgcgaagcccctgccgcaagctgtgcccgtggtgtcccagctccggcccaaatgctgggctcaggccctgggtgctgagatcgacagtgccgagtgcgtgttccgcatgaaccaggcgccccaccgtgggctttgaggcggatgtgggccagcgcagcaccctgcgtgtcgtctcacacacaagcgtgccgctgctgctggcgcaactattcacactacttccagaaggcccgagacacgctctacatggtgtggggccagggcaggcacatggaccgggtgctcggcggccgcacctaccgcacgctgctgcagctcaccaggatgtaccccggcctgcaggtgtacaccttcacggagcgcatgatggcctactgcgaccagatcttccaggacgagacgggcaagaaccggaggcagtcgggctccttcctcagcaccggctggttcaccatgatcctcgcgctggagctgtgtgaggagatcgtggtctatgggatggtcagcgacagctactgcagggagaagagccacccctcagtgccttaccactactttgagaagggccggctagatgagtgtcagatgtacctggcacacgagcaggcgccccgaagcgcccaccgcttcatcactgagaaggcggtcttctcccgctgggccaagaagaggcccatcgtgttcgcccatccgtcctggaggactgagtagcttccgtcgtcctgccagccgccatgccgttgcgaggcctccgggatgtcccatcccaagccatcacactccactccctgagtaattcatggcatttgggggctcaccccacctccaggtctgtcaagtggcctttgtccctggggctgatggcccccaactcaccagcatcatgaccttgtgccagtcctggtcctccctccccagccgctcctaccaccttttggtgccacacttctcaggctggccgccctggttggggcagccgagagcctggggttcattggtgaaggggccttggagttgtgactgccggggccgtatcaggaacgtacgggtaaacgtgtgttttctggatgctgtctctagcgtggtcatgtgtctgatgtgtttaggggtggagatgagggtttctttccctgtcacagacccagaagcannnnnnnnnngggaagggggttttttctttttccccacccgggtattgctgggggccccttttggcttatttaggc

SEQ ID NO: 89630 - DNA, 377 bp, Homo sapiens
tagagcaggcagtctctggggggatgcatccaagactttgggtattagaacaaggcatactggggtgtcaggggcagagatttatctcctctcccagttggagaggggagggctccctccttaggcacctgctccttctccttgactctgcccctgccttttctctgcctttgattaattttttggaggggatgatgtagtttacagcaattaagttaattgtcttagaaatcatgatttcttttgatgcactgtttcctctatggaaacttcctgactcttggttgctgtcagtgtttaattatggttggcaggcaagatgatttgaaatgattaatgggaagatgtatttcaagaacaacagcaggcatttttag

SEQ ID NO: 89631 - DNA, 1679 bp, Homo sapiens
attgctgtttatatttattttagactatggaaatgatgttagacaaaaatcaaatttagcgattttctgagttcaaaataggttataaagcagcagagacaacacacaacatcaacaatgcatttggcccaggaactgctaatgaacatacagtgccgtgatggctcaagaagttttgcaaaggagactagagccttgaagatgaggagtgcagtggccagtcatcggaaattgataatgaccaattgagaacatcatcgaagctgatcctcttacaactataagagagctgcccaagaactcaatgttgaccattttatggtcgttcggcatttgaagcaaattgaaaaggtgaaaaagctcaataaatgggtgcctcatgagctgagtgaaaaataaaaaaattcgttgttttgaagtgtcattttctctattctatgcaacaataatgaatcatttctctatcggattgtgatgtgtgccaaaaggtggattttatacgacaactggcgatgaccagctcagtggctggactgaaagaagctccaaagcacttcccaaagccaaacttgctccaaaaaatggtcatggtcattgtttggtggtttgctgccagtctgatccactacagctttctgaatccaggtgaaaccattacatctgataagtatgctcagcaaatcaatgagatgcaccaaaaactgcaatgcctgcagccggcattggccaccagaaagggcccaattcttttcacgacaacactgggccgcacgttgcacaaccaacgcttcgaaaattgaactaattgggctatgaagttttgcctcatctgccatattcacctgacctcttgccaacaaactaccacttctttaggcatctcagcaacgttttgcagggaaattgcttccacaactagcaggacacagaaaatgctttccaagagttcgtcaaatttggaagcatggatttttatgctacaggagtaaacaaacttatttctcattggcaaaaatgtgttgattgtaatggttcctattttaattaataaagatttgtgtgaacctagttataatgacttaaaattcatggtcccaaacagcaattacttttgcaccaaactaaaaatataagttaaaatggaagagtctaggagcaaaccaagaaaagatcacctacttcatcatctctggtcaaaaacaaaccaaaaaacttaacagctatcacttaagtttgcttcctagcaattatttagcttccagtctagattacaggatatataaaactttctttctttctttcttaactatgacactggcaccaatgagagtcctgtgactgactttcacatttccaccattactcaattactggtaccataccacctctaatcccctaaatcaaactgcaattcaacaataaagggcgtacagagatgactttgtcctgaaggaaaatgaatatccttgtaccctctatatagctaacttccaaatgtaagagaactatggggtaaccttttgtttctattcctatcaagatgagcctttaagagagggacttttattaagctcttgaccaagaagaatacacttgattcagagtttctgatgctcttaatcagaactatatgtattgtctcaatattaaataaagtcaaatgtttccatacaaaaaaa

SEQ ID NO: 89632 - DNA, 1296 bp, Homo sapiens
gagctcctgtccacctgctcctcccttcttgcagcacttgagatcccaaaaaactccccaaaagggacagatttgccctggactcttgttagcccatcctatcacactgttgttgtttataagtattcctatacagaatttttctcctggagaaggaagaaccacatcagttttttcttcatcttcactgtacatttactatgataggtgttcagtaattgttattgaatgaatgaagcaattatagattactagtgctaagggggaggggcagtgaaaatctctaggatgcgttgtctatgctagaatcttaaaaacgagagagactcaggcatacagaggatgcatattgagagctgatgtgaagttggaggagggccgggtgggtcctcggaatccacaggaggctggcatggctggagcacgacaggaactggatggctcaaggtcaagagaggtcggctgggccatgaagaagtctagatcttatgccaggtactattattatctccattttctagatagggaagggaagttggaagctgttgaaaacaccttgcccacagttggccagcttgaccccgagacagacaagcacacagaggaccagagtccttcgacacccttgccccagccagctgctgagaagaactcgtacctctactccacggaaatcacactgtggacggtggtggccgccattcaggccttggagaagaaggtggattcctgcctgacccgcttgctgactctggaggggcgcacggggacagccgagaagaagctggccgactgcgagaagacagctgtggagttcgggaaccagctggagggcaagtgggccgtgctggggaccttgctgcaggagtacgggctgctgcagaggcggctggagaatgtggagaacttgctgcgcaacaggaacttctggatcttgcggctgcccccgggcagcaagggggaggcccccaaggtagcaccgggacaccctggggtgggggagctcgaggggctgagcctgtgagcgtgtgggtgagtgagtgcgacacttatggttccaggtgcccgtgaccttcgatgatgtggccgtgtatttctctgagctggagtggggcaagctggaggactggcagaaggagctctacaagcacgtgatgaggggcaactacgagacgctggtctccctgggtaaggccacggagggaggatctgggcctctgtccacaggttgtctgtggacagtctgtgtctttgctttggcttttggtactttgggcatctctgcatctctgtggg

SEQ ID NO: 89633 - DNA, 412 bp, Homo sapiens
  misc_feature (1)...(412): n = a,t,c or g
cgggctcaacagatactgtttggtgggctcttacatgaatgtgtgtgatatttggtgccatgacttggatcaggggacctcccttgggagatcaatcccctgtcttcctgctccatgagaaacatccacctatgaccttgggtcctcagaccaaccagtccaaggaacatctcaccaaatttaagtcaggacaccactggaaatcagactgtccaactcgcctggcagccactctgagatgccctggaactctggcccaaggctctctgactgacttcccagatcttctcagcttagcagctgaagactgacactgtccaatcgcctcagaaacctacaagaccatcacagaagctttggataactcttacagtgaaagacaggaatgtcaggcttcagagcccaatcctgn

SEQ ID NO: 89634 - DNA, 5273 bp, Homo sapiens; identical to SEQ ID NO: 80819

SEQ ID NO: 89635 - DNA, 427 bp, Homo sapiens
  misc_feature (1)...(427): n = a,t,c or g
tttcgtacagagaccactgataagacatggtatgtactgagtagacttggcttctttctctggcttcatcagaggctggactctcattggttttagtttctccgttttctgcaggtaaatctttagtttcttggttagtcacttgagtctgttttctctttgctccccctccctttcccttttgtttgcacatctttgtctaaggatttatacttctgctgccttttttcagcctcatttccacttttgcaggagcaggtttagctgacagccatgccgattgcctcttgggctcttccttcatttcactaccccttcgccacccctttggcagagctaaccttcttcttgggtatcacggcagtggggagggtgtgtgctgggtgcctggccaccanagctcttcctgctgccctagctgctaaat

SEQ ID NO: 89636 - DNA, 3239 bp, Homo sapiens
tttcgtgggggagacggagccccaggagtgttgaagcctggaaatcccctcccctttcccctcccccctttacagtatccccctccctccaccctttcccattctgataatctggccatgactagcagaagcacagctaggcccaatgggcaaccccaggccagcaaaatttgccagttcaaattggtcctgctgggagaatctgcagtgggaaagtcaagcctggtattacgttttgtcaaagggcagttccatgagtaccaggagagcaccattggagcggccttcctcacccagtccgtttgtctagatgacacaacagtgaagtttgagatctgggacacagctgggcaggagcgatatcacagcttagcccccatgtactacaggggtgcccaagctgcaatcgtggtttacgacattactaatcaggaaacctttgcccgagcaaagacatgggtgaaggaactacagcgacaggccagtccctagcatcgttgttggcctggcagggaacaaagctgacctggccaacaaacgtatggtggagtatgaagaggcccaggcatatgcagatgacaacagcttattgttcatggagacttcagccaagacagctatgaacgtgaatgatctcttcctgggcaatagcttaagaagttgccaaaagagtgaacccccagaatcttggaaggttgcagcaggccgaagccggggtgtggatctccatgaacagtccccagcagaacaagagccagtgttgtagcaactgagggggtggctagcagcaaacaagtatggagctagcacaagagctaagaaataaccgccatcgcctacccctcgacacacaacccctacggtaacagcacactgagccctggctcccaagggctgtctcctgacagctccgtcatggcactttttaacgcttcagcaacaaacaccaggcagctggtggccctggcctcctaccccctactctggggcttgggggtcaactccccccaggacttaccttccaaaacaaacttccttcactttgtattataggtacaagacagcgacttacgtatcttttctcctcctccctagtgttcctccccattttttcagaaaacacttctgactcctgtcccttccccttctgcttttggtcagtccctgttcttgagcctcttttctcctctccccaggatgcagaaagtggtgaacccaggaactgaggaaggaggtttccagttcatttacattaagggccctgggggagaataaagctcagagcaggagggagtaaggaaacatttcctttttgtttttatttggttggagtttctcatatttgaaaacattgcggtatccatgatttggccttgtggagggtgttcctaggtagaggtgagaatggggaggcaagatctcaggcaccaggcaggaggtgccttgtaagctaactgggcggaggtggaggtgcagtgtcaactgtggctctgtaactcttcaaaggcccagtttcccctcacgcagcctcttaggtagcgtttcccctaatggtgtttcccctaatcgtgggggttggaccccagagtcttccaaagaattttcactggttgcctgcatctttggctctgctgtgatctgattggaggagggacagtttctggtacccatcctctgatttatacatatgcattttttcccctctggcctttagatggcctcagccccagccaccatatacccctgcagtttgcactttaattgatggtagttcagttggggtacttgttttatggaagttttgattgatttacttgccctcccaccttctttttaattcaatgaaatctgaggttaatgcgaggttcgaggagaggttatagataaaactaccagtggcagctactcaagtcctatctccactgttagcttcctccaactctaattattaacctatattcttgccaagctaactattgactataggtttgcctttcctggagaattaattgagcaattgaggagtgtctcaggatagcacaggccaaggtaggggagtaaaaaggaggtcaggcaaaagggaggagttttctgtcctttcccaggtttcacactcaatttgatatccattaccatgtcttttctacttccttgtaaataggtatgatctttattcccactgtacagtctgttctatcctctgcctcccatcaggccctgtttctttgttcctttgttaatatcttgaatttagtccctccatccttaatccccccatccctccccatcatgcaaccagtggtttaatccatgtaccaataggggctagtaccacagaggcctcctgtggtgccctcgtatcataccacctgttcctgtggagagggaatgaccggcactgaaggtaccttacaactggctcatattatcagaggaccttggtcctttctaaatctctagtctctcttcatatccttcatcaggtgttttaagatgtctctgagaagccatcaaggcaaaagagaactttaagttccttgttccagcccggagttttgggaaagaaagaaaggaaaggtcacagtgacctaggattggaaccttcctgcccttttggcttgcagactgccttctatcccagaacagctgagaaatctatgaagctgagattctgaaggacccagcttaggttcttccacttaggcctcaattcccttccttttccaggggcagccttagttcccatggccctgaaacacacacatttcccccttcctttcccagaagccactggccccccatagcacccagtgcatcctttttacaagtggaagaactaggatggctttccaaagtcttctagaaatgaagttctttctctgtgcagctttcccccttggagcaggagtgaagatgtttcattatcttgggcctgggaaaccacttccccaggcttctccctccccccacccccataggaacaggatttggccttagcttctgggcctatcggctgccttccctctacttcctaccacctcttctgccttcctttgagctctgttgggcttggggatcttagttttcttttgtttatttcccagctcatttttttcttctggtcagtttttttaagggggggtgttgtggttttttgtttttgttttgcttctgagaaagcatttgcctttcttcctctcccaacataacaatcgtgggtaacagaatgcgactgctga

SEQ ID NO: 89637 - DNA, 874 bp, Homo sapiens
agtatcctgcgtcgacgatttcgttggacctcctgtgcaagaacatgaagcacctgtggtttttcctcctgctggtggcatctcccagatgtgagtgtctcagggatccagacgtgaagatatgggaagtgcctctgatcccagggctcaccgtgggtttttctgttcacaggggtcctgtcccaggtgcagctgcaggagtcgggcccaggactggtgaagccttcggagaccctgtccctcacctgcactgtctctggtgactccatcagcagtagtagttactactggagctggatccggcagcccccagggaagggactggagtggattggggaaatcaatcatagtggaagcaccaactacaacccctccctcaagagtcgagtcaccatatcagtagacacgtccaagaaccagttctccctgaagctgagctctgtgaccgccgcagacacggccgtgtattactgtgcgagaggcacagtgaggggagaagaggaagagacaccagagacctctcacttttcacgtgcacacagagaagaggccatgtggagacgtagtgcactagaaggtggccctgtgcaagccaggaagaagccatactaagaaccaattttgccagctccttgatcttcgacattcagactgtagaattgtaagaaaatcaatatttgttgtttaagccacccaatcctgttgtcttcttacgaagacccaaactgactaataccacctaactctgttagctctgtctcctggagggagaagcagccccctgaggctgggccctgcatctctcagatttccacgtgaagtaggcaaaaatagtagttctcatataaaaatgtgtcatggcaaaaaaaaaaaa

SEQ ID NO: 89638 - DNA, 415 bp, Homo sapiens
tttggtatcggacagggcgcagaaggggcagcttgccccgtccatgatgtctagggctcactggcaggtctccaaagctggagccaaaatgacctggacgtgaatgtcttccctcaggtcttggggggcgacgctggctgtggtctgggacttcagccggggctgtcagctggaacctggcctagggcctgggattcctcccagcatggaacctcacagtagctggacttggacgtggtggctcagggcaccaagcaagtgtccagcacaccaagccaaggctccatcaccattcactccagagcctgaaaagagggaaggcagcatcatagaggggctgaagaacatggaccccggagacagaccacctgggttccaatcacactccagcacgtactggctgtgggacctctca

SEQ ID NO: 89639 - DNA, 571 bp, Homo sapiens
tggacgatttcgtggaaatctctgagcttggccacctgccctgggggaggagacgcgatgcctgcgcaccccactctgcttcatccctggttgctctccccactcctgtggcccctccgccggcgtttgtgctgtgtgacatccctctcctccaccgctgcctggggttgggggcagtcggggcagtcaggccaggccaggccacccctgggtgaagagggcattggggccagaagggtctgcactgaccacctccaagtttctgttcttaggctgttcccgccgcagcagaatataaagtgctgaagccagaacccagactgggacgcaaggcccagaacctgcgcaggggccaccggcaatcggccaccatgcccctgccctgctgtgcctcgacttacccatctgctgctggggtaatcctaaccatctcttactgagggaccctgagtgccttgttcaagttcagtgtggtgagcccattggtgggaggtgtttttcctccccaaagactgtattttgaaaagtactaataaaatacaggaggtgagtagccaaggcaaaaaaaaaa

SEQ ID NO: 89640 - DNA, 1418 bp, Homo sapiens
  misc_feature (1)...(1418): n = a,t,c or g
ttttttttttttgaaggtataaaacagctaatgttttacttaactattctgaaagtaactgacaggtaataaaaatgtgggttttattagtccactacagtcacaatacaatcgtcatagatttccccttctgtattcatcccaccaaacaccaaacagagcagtgtagcagtctggctttcctcatgtgagtcaccactgtggctcattactttgtcagctgaatcctctttctcagcttcatggttcagagtgagagagttgggaatcttctttctcagaagcacacgtcactggcccatgggaatgataccacatgggaatgggtcccaatcgtcccaggggggtaggaaggagtatccaaatttaaggcaagggtcccaatgctgctcttctgtgtgatactgggtacattgtgtcccaggtgctcctgcaggagtcattccaccaaaggatgtacacatgtttttcccatggccacagctggagtggggaagcacagcctggctgtgaggcagcccccagtgggatttaagcttctgccatttcatgttcactatatcaatgcagtggaggtcgatcatagaatctgtcccccgccaagcctccgtggatgaagagctttgtccctgctgccaccatcacatgaccatgccggggagatggaggatttccaagtgtctctggctgtgaccaggtcagagtggttgcgtcgagaacacatggagcttcgtgtcgtgcacgggcctgggcacctttctctccgcccgccaaagacgtgtgcgtggtgttcgcaagtggcgtgcgcgagtgatgtgtggaatgttcttgggggatggtgggggggctggtcaacnttctggcttggtccaacgtcctggtttcaggattcaggacttgtagacaatttcgatttcctgattggttggcaccttccaaatacccagatacggtcaggtgtgcaggagggaatggaagctagcatgttcaataccggggcaagaggcccttgcaaggtatcctaagtcccactggtgttttccccaagatcccatggtgtgcaacgtctgagaagctttctgtttgggatttgctccccccaacaatgaagaccttccctctcttggcattaccaactgggggtaaaatatgaaacagctgtggccaactcgagcacaggggctgtctcccagggacagtcaaggtgtacagaccatgttgctttccctgggcttgtctcccaggttccaagactggcagttgcttcatggtgtcctgcggcctaggccactgacagctgtccccaaagtccagagctcagttaggctggcttcacgtgggcgggacctccccgcagcagccgccgctaccagcccagcaaatctcatccccacgtggcagttctgcggcgacttagg

SEQ ID NO: 89641 - DNA, 2304 bp, Homo sapiens
atgaattcccgggtcgacgatttcgtgccgcacgccgcggagcattttctcggaggtcccgggattacggtgctcgagcacgctggtgggaaaggacccgggacttgaacagtgttgtgcggcgccatgcaggtctccagcctcaatgaggtgaagatttacagcctcagctgcggcaagtcccttcctgagtggctttctgataggaagaagagagcgctacagaagaaagatgtagatgtccgtaggagaattgaacttattcaggactttgaaatgcctactgtgtgtaccactattaaggtgtcaaaagatggacagtacattttagcaactggaacatataaacctcgggttcgatgttatgacacctatcaattatccttgaagtttgaaaggtgtttagattcagaagttgtcacctttgaaattttgtctgatgactactcaaagattgtcttcttacataatgatagatacattgaatttcattcgcaatcaggtttttactacaaaaccagaataccaaagtttgggagagatttctcttaccactatccatcctgtgacttgtactttgttggtgcaagttctgaagtttataggttaaacttagaacaaggacgatacctgaatcctctacaaactgatgctgcggagaataatgtttgtgacataaattcagtgcatggcttgtttgccacaggaaccatagagggtagagtggagtgctgggacccaagaactcgaaacagagttggcctgttagactgcgccttaaacagtgtcacagcagattcagagataaaccagtttaccaacaatctctgctttgaaatttaattggtgccttgaccatggcagttggaacaaccacagggcaggttttattatatgaccttcgatctgataagccattgctagttaaagatcaccagtatgggctgcccattaagtccgttcatttccaggattcattagatctgattttgtctgctgactctcgaattgtcaagatgtggaataagaactccggaaaaatatttacttccttggagccagagcatgaccttaatgatgtttgtctctaccccaactcaggcatgcttctgacggccaatgaaacccccaagatgggcatctattacattccagttttgggtcctgctcctcggtggtgttccttcttagacaacttgaccgaagaattagaagagaatccagaaagcacagtctatgatgattataaatttgtcaccaagaaagaccttgaaaatttagggctcacccacctcattggatctcctttcctccgggcatatatgcatgggtttttcatggatataagactctatcacaaggtgaaactgatggtaaatccatttgcttatgaagaatataggaaagataaaatacgacagaaaatagaagaaacacgtgcacagagagtccagttaaagaaattgccaaaagttaacaaagagctggcacttaaattaattgaggaagaagaggagaagcagaaatctacatggaaaaagaaagttaagagtcttcctaatattctcaccgatgatcgatttaaagttatgtttgagaaccctgacttccaagtagatgaagagagtgaagaatttaggcttctgaatccacttgtttcaaaaattagtgaaaaaaggaagaagaaactaagactcttagagcaacaagaacttcgtgaaaaagaagaggaggaagagccggaaggaaaaccaagtgatgcagaaagttcggagagttcagatgatgaaaaagcctgggttgaagaggtcaggaagcaacgcagactcctccagcaggaggaaaaagtgaagcggcaggaacgactcaaggaggaccagcagacagtcctaaagccccagttttatgagatcaaagcaggagaagaatttagaagcttcaaagattctgccacaaagcagaaactgatgaacaaaacccttgaagatcgtttgaaaattgaagcaaaaaatgggacattgagtgtatccgacaccaccgttggcagcaaacaattgacattcacgttaaagaggtctgaacagcagaagaagcaacaggaggctgagaaactgcatcgacaagaaaggaaaagactccgtcgttcggccggacacctgaagtcaagacacaaaagaggacggtcgtttcattgatttgggaagtggtcctacctgttgattagggaggggtacgtctcccccaaactgatcatcgttagggtgtttaaacacagacgaggggaaacacacgttttttaaagtt

SEQ ID NO: 89642 - DNA, 524 bp, Homo sapiens
tttcgtcctggaggaggaggaagaggaggcatgcgagggggctgatgtgaagtctgtaggggtgaaggggacggtatcgaagacctgaaatacagtgctagctaagtaggggtgggagcagatgaggtgacacgttgtaactccgacggacgacgtgcggaatgtactgggtggaggaggaaaaaaggcccgaggagaggggtgtgtcaagcgaatgaagacggcagtgtgtgcctcagcgcctggtgcgtgcggagctagtgacgggtgggcccggctggggcccgtcattccttcagtgaacatcccatgagctctcgctcggtgttgagccctgtggtaggcacagatgcacccgaccagcacctggagctcaagaagccgcaggaacttaaagaaatggaaaggctgcccttggtaaggctagtaagaacacaaggactgtttgaagtggggtgagattctcatcagaacaggtgtgtgggtgcattgctttatagtaaaagacgatcttttattatgtt

SEQ ID NO: 89643 - DNA, 2690 bp, Homo sapiens
  misc_feature (1)...(2690): n = a,t,c or g
tttttttttttttcttgtttttccagatcaggaagttttattgctgaacatgccaggaaaaaatccccccatgtaagtacaaaaaatatgtctttaatacaaacttttttgtgaactttttccgtttctttaacaaataggacttctcctcaagtgtgtgaacacccagtgagggctgaccccatcctcctctcctttgcttcaccaggaatgtcatcagacacatggcttgaccttggaagggcccagtctgtctgacagggctttgcagacccggcggctattgctttgaaaaggaggagaaagaccacgcacgggcagcagcctggagggacccggtgggctgctgagagggggctccgctgcgacgggccctggcccagcttcaggccctcacaggaggacagtcaagggctgggagccctaggccggactgcatttccgctcccgcaggagactttctatgaaataaatatagaaaagagggcatcccccagccccacagcacaagaccctggccctcagcgctggacagctgagacagacgcaggctcgctgctcagggggagtaagtgctgggctccagtaggctcccacaggcccactgaggcagaggcatgagtcgcccaagtgctggatggggcatggggagaaaggggcgtgggcagccctgctactgctggcaagaggtggccccattttttccagatggggaaactgaggcacaaggaggtttgggaacttgcccaaggtcactcacagtgagtcagctttttagggggaggagagcggctcacactctgggaaacacagtcacctccccactggggagcagggccaggcaggaggggcctcagggcccatgactgcctggaggggacactcagcctctctgaggacatatggggggtaggcctctggggaagggtctttgcttggcatcaggcagggccaagtccagtaagggcaaggggagggggcattctggtgagaacagcatttctggcaagacgggcatccacttcaaaatctcggctcaaaagggcagcagggctgttctcaagccaggcaggcagggtcccccaatccctacaattctcctgagtccctcaccaccatggaggacccttgctagggtctaccgggagagtcaccacatctattatgaggcaagggcactgggatatgttcccaccatcccctaaacacaagagtaggctaggggagcgtgcaggcagcccccgctcacggccaggcctgcagcccaacccatgggccccttcgcactgggagtccacgtgagctcagtaccacggggaaggatagagaagggaacaggttaacgcgcgtgtacagcacctcagagaagccactgagacgggagagaaagagccaggtctagaaaggcctcccatcaccggcagcagagagggactggtgggctgaaaggggacagggactggcaggaggggcttccctgcctgggggtgaggagggagctcacgtgtgggctgtggattccttgctgtccagccaggctgggggcagggagtggccatggactgagccacctagagatgggagagaagttggtatggtaaaaaaataaatatatttgagttcggtttaagatgaggtgaaggttttccaaagcttggactgaggggcctggatcagaaagagagggacggaaagaggctgtggcaggggcctgggagagcagggaggaggggaagctcgctctggggcctgcagcgagctgcactttcagcttatttggactgtggggagcagcgccccaggtcagttggtggccgctggggaaggccctggagtggggtgagcaggctccctcctccctcttgctcagtccagagacagcatggttaaagagacagaggtagattaaaacatcgtgattaaaagcagaattagttatctaggcttctcagatttaaaaaccaaacaatcgagcaatcatccccaaaaggtagcttcgtggtacctctgctgaccccacgtgtgacctgggctgtccctgtccctgccctgtccctattgtggcccgggagagtccagcactacagggcccagccctgacaggccacgcctttggctggggctggaagaagtgggcagcagtgctggtggccccggctgaggctgttatttccgcaggtagcgctgcgccaggatggccgtgtccaaggaggtcatgggctgtgcgtcgtggcccagccgtcgcaccggtggtgcgctgccgaactgccgcttgggtacccagctccgggcgtcatggatggagctcttctcctcggccagcagcagctgctgacgcatgtagttctcaaactcgtactgggagcactcctccgtcaccttcgcctcctgggagctatccgcattgctcatttggtcatcaatgtcaggaaccacttgcaaaggcccactcagagatgacagggactgccatgatgcaatgatggcactgagggcctccaggacgtcggcggcggccaggcgctgctgggggtcaaggaccagcagcttccggatgagacacacggtgttctcagaaacccgtccatcaacaggaatgaaatactcggcagccttgatcttgcggaagagctcctgcgggatgctgtnnttccgcggcnctgcggagagtttcgttaggtctaaacgcg

SEQ ID NO: 89644 - DNA, 705 bp, Homo sapiens
tttttttttttcatttagataacattttatttgttagagcaagatttggcagacttcatttcaacagctggaggaattaatttaaaatcacaaatttagtgtattggcacacttttacaggtcggcaaagaaaaattacctatttttgagatcaaagtcactgcttatacattttaatgagaagatttaaagacagatagaagctatatatttaagcagatatgatttaatagatagtagaaaactgtcagaaaatggatcccctgtgaaaacctctacagttctccatgatttctttgttaacaataacaattttaaatgtgtttacacattgttaacaataacaattttaagtgtgtacttttctgaacagaaaaaatagcaattcactttataaatactttcatatttacaatacccctttaaaaatagtaaattaaagggaatattgcaatgtgaactgtgatatttctaaaattaaaaataataaaggattcaaatatactaatgagatagtataactttcacttcactgaaaggtaatagaatacttcagctttattacactgtttttacattgataggtataaacaatattatatcttgacacatttatattttactgattaactatccaaagtcacaatctgtgaaataagtaaggaaatagtatatatctcagtctaaccttagaaacagattttt

SEQ ID NO: 89645 - DNA, 455 bp, Homo sapiens
acacacctggggaattgctggcctgacttctgacccctgactcctcatacccttcctccagagcatgacatttgaccaccaactgaaacctgacctctgaccccagaccactggcccttcccccgccctgtggtgacttcataaaggttactagcttctcccctggccttgagacccacacgatggccctgctggctctggccagtgccgtcccgtctgccctgctggccctggctgtcttcagggtgcccgcctgggcctgtctcctctgcttcacaacctactctgagcgcctccgcatctgccagatgtttgttgggatgcggagccccaagcttgaagagtgtgaggaggccttcacggccgccttccagggcctctctgacaccgaaatcagtgaggagaccatccacacttcatcagtgtcctggggaaggtgcagagggagggcagga

SEQ ID NO: 89646 - DNA, 842 bp, Homo sapiens
ttttttttttttgagaatgaaatgtttcccatcatagtggattcttaagcacgttctccacgtatgcggcgtgctagctggatgtcttttggcataattggttacaccgtttgggcatggatatggcacaccagtttgggtgtcttcaaaaagggccaacccggatagggcctcacttgcctcctgcaaagcaccgatagctgcggctctggaaactgcagatctgttttaaaagtctgagcaatttctcgcaccacacgctggaagggaagtttgcgaatcagaagttcagtggacttctgataacgtctaatttcacggagcgccacagtaccaggcctgtaacgatgagggtttcttcacccctccagtagagggcgcactcttgcgagcggcttttgtagccagttgcttcctgggtgctttaccaccggtcgatttgcgggcagtctgctttgtacgagccatggtacagagacctccttacttacctaccagcattgaaaaatcaaaaatcaccatatgcaactaacaaacatacaacttttcctgccacgatcaccccctccccaaatctggaaattatgatcagtataaaaaataatgttcgtattgttatataatttgaaaggtgaagattacgtctacccaaaatctcttcttgaaacaaactagagtactagaaaattgttagcagtatcaatcacctctcaaaatgccaattctgagcgacaaacggcaaaacaaaaatacctcgaacggcctttgatccaatttatttaattaaagcagtaattagaaatgtctgtaaacattccatccacaaacaagtcaaaagaaaa

SEQ ID NO: 89647 - DNA, 3542 bp, Homo sapiens; identical to SEQ ID NO: 61479

SEQ ID NO: 89648 - DNA, 1990 bp, Homo sapiens
tttcgtgcgggagcggttctgcggcctcctcgggcttcttggccctgggcagagtgggattgggtgtcccggctgttcgcagtggccgcgagtgcggccggacctggagtagtacctgagccgctctggccgagcaaggcgcggggccccggtctacaccgcgctggacccggctatgccgtgacggaattcccgaggccgtagcgccacgcgagacgcgcactggtggcctccgcgctcgcctcccttccgccaagattcacagaacacggcagagtggcctcgggatcacctgcccaagacacctgcacgaccggaagttgggagaagaaattaaggccatgatgatgaacgcagcctttctcgtttatttccaatcccacaacaaaccggagtccaggaactcatgggtgattatcggactattacctagtcgtaaaactgtggagcattggtgtctaaaggaatctgagacagacccgcagtgtctcccccacatgccttaagtcacttctgccaagcagaaaatcatttttaagtaaatgttagtgaaattggttttaaaaaagagaaggggccgggcgcggtggctcacgcctgtaatcctatcctttaggaggccgaggtgggcggattgcttgagttcaggagttcgagaccagccttgggcgacacggtgaaacccccgtccctacttaaaatacaaaaaattagccgggcgtggcggcacgcgcctgtaatcccagctactcaggaggctgaggcaggagaatggcttgaactcgggtgggggaggttgcaatgagccgagaatcgcgccgctgcactccagcctgggcgacagagcgagactctgtctctgaaaaaaaacaaaacaaaacgagaaggctttcaaaattactctgcggtacactaatttaacagattagatcactttccaggctttaagttggcctttgttctaccctttttttagtgtatgataaaagttgtgttggttcgttgatcagcatgcaatgaactctggctcttgttaatcaggtgactacagttttgtccttacatttgtatgtatgtcatgagtggttttgtatgggcaggaggtaaacaacgcacatttaaatatacttaatgatttatcattccaatgttttctggttgttttagtctttcatttgtctcttgaacaatctgaaacatccctattctaaggctaaaaaatttcctttacaaacttaggttaaacattcctaatctgaaatccaaaatgctctaaaattcggatttttttgagtactgacgtgaccccacaaatggaaaattccacacttgccctcatgtgacactgggtgacagtcaagtcacaatcaagcctggtgtggtgggcacctgtagtgccagctactcgggaggttgagcaggaggattgcttgagcccaggagtttgagtccagcctggacgatatagcccagaccctgtctgtaaaaaaacaaaaaccaaaacaaaaaaaacaatgaaaacatttttttttaaaacgccatcaaaactttgtttcatgcacaaaattatttaaaatatataatataaccttaccttcaggctatgtgggtaaggtaaggtgtatgtgaacaaatgaatttccatttagacttgggtccatcccgagatacttattatgtatatgcaaatatcgaatcaaaatatctgaatctttgccaacattcagataaggtactcactgtataaacaccagtctgctgaggaaaccagatggcacatctaaatttagcccttgtacagaccttatctaggatatgaatcggaaggtcaccgagtaagctagtggaacaggtaatcatgccgaaaaaaaaaagctttttgggcctcctttgtttcccggttatggggaagcccattcgccccccgatgacgccccctgtatcgcctgggggtgacacgctcttggagggtccagcgcgccggcccctg

SEQ ID NO: 89649 - DNA, 471 bp, Homo sapiens
tggtggaattcgttgccttcagcagaagaacaaagccctgtgaaccctggagtcaaacatttgctggtcccatgtgggttccaacaaaagccagagcccccagtattagccctgcccaggagggatggctgagagctgctagttgtggaatttctggactacctagggttgcacaggtcagctaggagatcaagcagaggaagatccggcagccatgggctagcttgggagtggcaaagataccgttaaccatgccctggccatgaggtcactgctccatatccctcatcactgcagatgtgtattcctgccccagctctctgtgctgaccagtagatctccgagtcaccacccaggctccaggggaagggtctccctattactagctggggatgaaggcagtgagaaagatcctggaacctgaagccaggagcgtgtgcacccagcagtgtgtcatgcttacctggaagt

SEQ ID NO: 89650 - DNA, 1005 bp, Homo sapiens
ggcggagcgtggtccgagggctccgtgctgcggtactcaggcccatcatgaggccctgaagatggagtggcagaacttcctgaacctgtgcatctgccaggagacccagctccagcacgtggaggactacagccggattctgtgtccatcttcctctcctcattgactctgcatgaaggggatttctggtggagtaagggtagcagctcttgccgcacgtgcagagagagaggaacttccagtgcccgctatggagccacagcccacagcatggggaagtccccatccagaggcagtgctgcagctagaggtagctccagagtcctccgggccctgcaccgatacagccaaagaccagcaaagcgacaagctgccagacctcatgccacctgctgtagccactgggctcagccctggagctgagagcatcgctggagatagacgtggcagagaagaggttgcgagcatggccccagccagcagctcccacgctgcccctagtcctgggcatggagcgagccttggtgtcagagaccagggtgtgcagtctgagctcctctaccttactaaagagaggcctcttttatttaccagagccacagccctgctgcctcaggaccttttcattctgccggtgctggggctgtctatctgcaagctggaggtgttgagagcaggaaaaggaggctgtgaggaagggttcgggcagctcctcctgctctcagaggkggscctccycctccaggcatggaggtctgtccactactgggcttctgggctatttgcccctgatttgctccctggtacgggctcttgttaacaggcaggcaaggggtgcggggaccaggcaagggcttcaaagggtacagtaccaaatcttccaaactcagcacttgtgccctggggtctccaaactgtcttctgccctaggatttattcatactgttaaattaccagtttatgcaaatgatatgtaaataaagctcaattttttgaaaaaaaaaa

SEQ ID NO: 89651 - DNA, 1718 bp, Homo sapiens; identical to SEQ ID NO: 89629
  misc_feature (1)...(1718): n = a,t,c or g

SEQ ID NO: 89652 - DNA, 434 bp, Homo sapiens
tccagcgtggtggaattcacgacctacgcacacgagaacatgcctctcgcaaaggatctccttcattcctcttcagaagaggagaatgaggacacacatgaagaaacgcctggcgcagagccccaattcctacttacatggatgagaaatgcccatgatgctataaaataaccacggtctttacccatgcacaaacggtagttttgtgtgtgggctgctccactgtcctctgccagcctacaggaggaaaagcaaggcttacagaaaaatgttccttcaggaggaagcagcactaaatgcactctgagtcaagacgagcgggaaaccatctgaatatacacattttggataaaaaaataataaaaaaaaacgcccttagagcgacctgtaccccttttcgaaggggagggactgtcggacactacccaacaaga

SEQ ID NO: 89653 - DNA, 1039 bp, Homo sapiens
  misc_feature (1)...(1039): n = a,t,c or g
tttccccctccccgttttacgccgccaggatttatttgggtcctataaaaactattaccttgccgcccgcgtcgaaaactgatccctaaaacggcccgccttttttttttttttctgattgacaatgaagaatatttattgagggtttattgagtgcagggagaagggccttaatgccttgggggtgggaggagagaccccctcccccgggaatcctgcagctctagtcctcccgtggtggggggtggagggttgagaacctatgaacattctggtaggggccactgtcttctccaacggtgctcccttcatgcgtgaccctggcagctgtaagcttctgtgggaacttccactgctcaggcgtcaggctcagatagcctgctgggccgcgtacttgttgttgctttgtttgggagggtgtgggggtggtctccactccccgctttgacgggggctgctatctggctttccagggcnacttgtcacggctccccgggtaagaagtcacttaatgagacacaccagttgtggcccttgttgggcttgaaagctcctcagcaggaagcgcgggaaacagagttgaccgaagggggcaacctttgggctgaccttaggaccggtcagctttggtcccctccgccgaacatccaagtgggactactacggcctccatatgaacagcattattaatcagcctcgtgctcagtctggaggccatagattgtcaaggaggccgcgttgccagacttgtatgcagataatctctctgagatccctgagggccggttgttattcctgtaggataggagtttgggagggtggccctggtgctgctgcagccaaattactccttggtggccaacattgttgctgttcccagtgcaggtgagtgtggcggtcatgtctcaagtccttggacaccgagggtggctgagtcagccctgcctggaccactgacactgcagagtgagtgagaagaaacaggaggatcagagcccagggcatggtgctaattcccgcgggcttgctcaatgacgct

SEQ ID NO: 89654 - DNA, 2533 bp, Homo sapiens; identical to SEQ ID NO: 75065

SEQ ID NO: 89655 - DNA, 926 bp, Homo sapiens
  misc_feature (1)...(926): n = a,t,c or g
cggccgcgtcgactttttttttttgattgacaatgaagaatatttattgagggtttattgagtgcagggagaagggtcttgatgccttggggtgggaggagagacccctcccctgggatcctgcagctctagtctcccgtggtggggggtggagggttgagaacctatgaacattctgtaggggccactgtcttctccacggtgctcccttcatgcgtgaccctggcagctcgtagcttatttgtgggaacttccactgctcaggcgtcaggctcagatagcatgctgggccgcgtacttgttgttgctttgtttgggagggtgggggtggtctccacgtcccgcctttacggggcctgctatctggctttccagggcnacttgtcacggcttcccgggtaaaaagtcacttatggagacacaccagttgtggccattgttgggcttgaaagctcctcagcagggaaggcgggaaacagagttgacccgagggggcaacctttgggctgaccttaggaccggtcagcctggtcccctccgccgaacatcgaaatgcctctacccagataaagcacacaataataatgacattcatcctctgcctgggcccccgtgatggtgagggcagctttgttcccaaggatggagccagagaagcgatcagggaccccagaagaaagagtgttggtgttgaaaatgagcgcgcgcggagcctggcctggggtctgctggtaccagctggggtagtaatgagtagagactgaggcagaggtcaagccacaagtgagcgtgactgtccctccaggggacactgagagcgatggctcctgggtcaccacagtctgagaatccattcctgatccacaagcaaggagtccgaggagaagcatcatccaggccatggtggggacactcatgaaggctag

SEQ ID NO: 89656 - DNA, 417 bp, Homo sapiens
aaaaggtaaggcaactactggaatgttaacacatcacataaaatttttaaatgatgggattgtttggaaagttagcttatgctaaggagcaatttccagctttcttcggaatgtttatgaggcagggtattgagggcaggaagattttttggggatgttcaatctttgtaatctgctgggcttgctatcaaatgtgagaccactacaagtgctggtaggcatttaccattttatgttacaacatttttggaaaatggtaaattgaatttgatggctaagagcaataatgttagcaaaagtactcattataaatgcactattatttcactattccacttttacttttatgtctcaagaactgttaaaggaatgcgggtcacttagtgctggtctgttaagagagaagtcaccattatg

SEQ ID NO: 89657 - DNA, 2961 bp, Homo sapiens
ttttttttttttatatagagattgtacatttatttattactgtccctatctattaaagtgactttctatgagccaaggtcttttactttttcttcttgcctttaggggcttcagggggtttcccctcagctacagccaactgtttctttagatccaagagtttcgccacctccgcagcaacctcgttcttgtctgccttttgtgctttcagttctcggacaatgtttccttgttttgtcacttcatccatcagcgcttgtatctgctgtggcttggctgttgtaacagtctctacaactgctggcttcggggacgtttttgcctggccccctccaaagcgctgccttaaactttcaatctggtcattttccaatttttggaacaagggactgactgtgccaatctggtgtcctgctggtaaggtacacaggaagtttgtcagcaggatactgcaggctggaggtgggagctgcagctgggcctggattgtggcactaaccgtgggcatgtaaggctgaagcatgacagagagcaaggcagctatattcactgccaagccagtcactgttcctgcccgttgcctgtcagcctcactgcctttaatccgcttcccagggctcattcacctggaatatattggttgccatgtcggagatatggtgaggatactgcgcaaggcatcccggatccgaaccttctcaagtagcttggtgatagtgctggagctccagggtgacattgggccagcaggcgctgatcatcaggggtgagcaccatctcaggcacatagcccccaaagaacttagacacaaacatcccagctctgttgatgaagttgcccaggttgttaagcagctcagaattattcttcagcagcaggtccgtccaggagaaagcactgtcgcttgccctcaggccgaatgtacagcaagatagaagcgcgagatgtcaggagggatccccgtgtcgtgggcccatgtcccgaaacactcccacaccgcggctcttagagaattttcccatcctcatagttcaggtactctgtagcaatgaggtggctgaccaaggtatagttatcctcagctcctagggctgagcaaggaaagactaagctatggaaaggaacattgtctttggcccatgaactgatacaggtcgacttgctctgggttcgttccaccatctctcccactggtctgtgtagttggctgtgatggacagatagccaatagtggcatcaaaccagacatagaatacccttgtcttcaaaaccttcttaaggggtaccagggttcccccaatttgaggtctcgggtttattgccagcgtggctttgagggccattcccggaagccaaagaacggggtgataaactgggcattgggtgtccagtcactgccaggcaatgtcctccccaaccactcctccagtcgcttctccagcttaggcaggtccagaaacaggtgctggctcgactgcaccacagggcatgatcggcagactttacactgaggcttcttaagctcgacagcattgatgagcttgccacacttgtcacactggtcaccccgagcctcctcatagccacagaagggacacacgccctccacgaagcggtcagccaggaaagcgagcacagtgctcacatcgcagttgctccacagtatcttgcagcacaaaacctcgtttcagcaactgctggaaaatgtcctggggtgattttggtcttgctgtggagtggtggtgcgaccaaaaatatcaaacgaaatgttaaaccagcgggtagatgtcagcatggatgatgtggtacttgtcgcagatctcctggggggttagtccctcctccagagccttggtctctgttgctgtaccatactcatctgtcccacacagatagagggtgttccactggcggaggcgagagtacctggcaaagacatcggcactgagcacacaaccaatgatgttcccaaggtgggggacattgttgacgtaagggagggcactggtgatgagcacattcctttctccagccacaggcaacactggattctgctggggccgcagcgggggcaaactttctaggcccttctcccaagcagtaacagccatagcaatctcctcctcagatagggtagccagctcctcctcctcaggctcaattggtgacagccctttcccttcagcggggctgggctggggctgcttttggaggtaaggcccggagagccaggacaccttgcttgtttcagtacaagtcttcttgcagcttcgctgacatggttccttgggtactcagtgtctggaaccagctgtgcagggcactcagctcctcagggaggtaggcgggatcttgcagtaatgggtatagggctccccacaaaacaatgtcggctagagattctgtctccccagccaggaaaggacagtttctgacgactcaagctgtggtcaatgtgagtcagggttctccgcactgaaccaagaacatcttccccctttcttgccttggaccacttaaatagtacagggcagcagacaaagttggctgcagctctgtcgcttcccattccagccactggttagtgaggtcatcttgctcccagccagataacaaaaaaaaaatatcggcagattgcactagtggagaagaggtagttgccgctatccagctgcaagacagggaccttaggccgggtcaggaacgggaccacacaatcttccgggcctacagtgctgatgagcacctctgctctgccccgggctctcccggcggcggccagcaccggcaagcaacccggaacgccatcactcacgaacagtctcatttcgccgtgaatccctcgctgatttataaagtgcctgcttttcctgtgggaattccagaatagatataatggtggtggccaggggctggatggagggggatagaaagggatagctccaaggaggctggggtgg

SEQ ID NO: 89658 - DNA, 384 bp, Homo sapiens
gcaacatggggtccagcagcttcttggtcctcatggtgtctctcgttcttgtgaccctggtggctgtggaaggagttaaagagggtgagcagacatggtggagctgggtggggctgggctggggagaggtcctgaggggccctctggggctggagttctcatatcaccttgtggcttcctccactaggtatagagaaagcaggggtttgcccagctgacaacgtacgctgcttcaagtccgatcctccccagtgtcacacagaccaggactgtctgggggaaaggaagtgttgttacctgcactgtggcttcaagtgtgtgattcctgtgaaggaactggaagaaggtaaggagacctgcctcccagggctggggctgtccctt

SEQ ID NO: 89659 - DNA, 2837 bp, Homo sapiens
ttttttttttttgactgttcatggccatctttattcccagtgctggctatcccaaaatactgccaggccacagccaacccccacctttgccaatgtgactgggtcaccaccccatacaccaaagcagccttgagccctgccccaccccctgccctgcggaagccaagtccccagctataaaaccctgcccctcctggtggcccaggaccctcaaagatgcacacaggggccccagcgaggggcccctccgtcattagccttctcctccaggctgggctgccaagcagcctggagctgagtctgtcccttggacgctgggccacgtcaccttctcctccagaaggcttcacctatgggcccaggaagtcctccttccgatagcccttcgcccggaagtcacggtggagcttgttgtactgccacaggttggccaggaggctggatgctgcccgggaggacttctcactgtcggggctgtcccgcttcttcttgatgaagatgagctttcggagtccgtcaaaatacagcaggtctcgggcaagcgaatggggctggccaaccaacccaggttgttgaacacagctatgaatgttgaaccagcacctcggctgggggcgacttctcacccacgctgcctggcagcttctcgaatcaggtggctccaccaccttcgtggacatctcgtccttgttcctagcgttccgagacaggtttcggatgaggccagtcagtgagcgcagctggtggtggtcggcggtcctgacacggtctagcagggggttcagaatacgctcctgctccagggccaggcggcttagcccccccggcccccttgggttcgcctcccgtgatgttctgcagcgccccggcggccgcctccgtcgtgtgccggttgagctcgcagcgctgcagcagccggttgtacagccccacgatctgggggctccacagccactcgaggcccttggggtccttggacacctccgcgaaggtgagcgcatcggcggcgaggggcagctcgcgcagccgccggctctgcggcgtgaagcagcccacgacctctcccggcggcgcccccgccaggtccctgcggccgcgaccctccagccgctgcagcgcggacggcggcatctcgtcgtagaggcggtaggacaggttccgcaggacgcacaccgcgttctccacgctcttgtcctcgcatttgcccgcgtccagggcgtggttgatagaggtgaccagggcgtccaccagcccgtggcactcccgcatcttctggcgagtggcctgagaggctgagctgaggttcctggggaagccggtggcgttgtagaagatctccgcctccgaggcgttctgctggatgaggggggggacccccagcccccgacaagggggctcaaacaccaaggtcttgtgagctgcttccagcggtgtcttcttggccaggcggtccttcaggtggtcgctggatgaaaggttccacaggatccctgtgacatttttgcgaagctcatcatcctgctcccgcagtgtccgcagcagctcgaagatcccgttctcctccaccagggccagcttgttgtcagcgttgtcgtagatgaggttgcgcatggcacctgtggcatggcgctgcacttcctggttggcgtggttgaagagcttcaccagcctaggcacggcctgaaggctgcgggcctgcttcttggcggctgcatcgctgtagcacttgtgctggatgtaggccgctcccagcacctgcaggttggggtctgaagccatgaggtacttgactgctgagggcaggtcaatgtcatcaaaaccgctgctgagtctctgcagggttcggtggctaccgtagctgttgaacccatgcacgtccggcaggtggcccgagtcagccaggctgaggctgaggctgcgcacagatggcgctcgagccactggctccaggacggcccccggcactgccccgcctaccccgcggctccggtggctgctctggaatcgctgcagggtccgcacggcaggggcacggatggtccggctcggggaaacctcagtggcctcgggccagtccagcccccctgcccggctggagctggagctggcctggcgctcgtacgcaaaggccctgtaggtggaggtggccgcaggctccagctgctcagacaccaggctgtagcggtcgtccaggcccccgggccccagccgcagcgagcgcagggagagtgtgtcatagtcggcccggctcccaaccccaccgcgctcatggaaggacacgggcctggtgggcatgggaggggtgggctgggcacccccgtacccagcggccccaaaggcgctgcccccgttgtgggctgaactcagcctccgactgcagctcagatccacggcggagcgggaggaccaggaggctgggctgtaggccggcttggcgatgggccggaagcccgaggtcttgtccccactcaggccctgagagcgagagctgaagccagcctgcagggtgtggtactgccccctggatgtgcctctggcagtctcggcctcaggctcgggctcagcggccccgttgtgccgcggctgctgtcccagctgcaagaggcgggcgcggacctgctcctggacgcgggctgcccgcagccgctcggcctccggcccctcggcgccccggcggtccagctgcaggtcagagggcagcgccagggagcacacgccggcctcaggctgcagggccgacagcaggaagttaccgtcctgcatggcggcaggtccaccgggcctgggcctggcggccgcctccaaacccaactatcttcacgtcctgtccggaattc

SEQ ID NO: 89660 - DNA, 5147 bp, Homo sapiens
  misc_feature (1)...(5147): n = a,t,c or g
ggcggtagtgcgtcggctgctgcccgggtctggcagaactcgggttttttgggctgagacagtggcagctgcggccccgaccccaagtgcggggacctccggcgaataaaggtcggcctgcgggtaggccggtagggcctgcggtccggcctgcgggagaactgggtcgtcagtcctccgagtggtggggctggggactttgagggagttggctctagggcacagtccctgcctggccaggtcggaggaacaagtgctgggatctggcgtgtgtgctccaggggctctttccgcggccctttccacctcttttcactttggggacggtaggcctttataaacggactaatgctgggtgatttgttcctgtggttgttgatgccgaggaaagactctgggccccaggactcacctaaactggagttcgaatactgttcgctcgctgtgtgaccttggaaaaaaaaacaagcttttctgaagtgagaagctgttctcagccacgagtcctgtgcaagatcactaatgattacctggcatttctgcgacacaggcaggtcctcagggtttgtgcaagtttgcaaacatgttcaccctgtctcagacctcgagagcatggttcatcgaatagagcccgtcaggcacgaaaagaaaggcttgtgcagaaggaacgggagcgggcagctgttgtgatccaggcccatgtccggaagttttnctactgtcggagtcgactgcagagagatatcaggagagagattgatgacttttttaaagcagatgaccctgagtccactaaaagaagtgcactttgtattttcaagattgccaggaaactgctgttcctattcagaatcaaagaggataatgagagatttgagaagttgtgtcgcagcatcctgagcagcatggatgctgagaatgagcctaaggtgtggtatgtgtccctggcttgttctaaggacctcaccctcctttggattcaacagatcaagaacattttgtggtactgctgtgattttctcaagcagctcaagcctgaaatcctgcaggactcccgactcatcaccctgtacctcacgatgcttgtcaccttcacagacacttcaacgtggaaaattcttcggggaaaaggtgaaagtcttcgaccagcgatgaaccacatttgtgcaaatataatgggacatctcaaccagcatggattttattctgtgctgcagatattgttaacccgtggcctggcaagaccccgtccttgtctatccaaaggcactttaacagcagctttttctctagcgttacgccctgtgattgctgcacagttctcagacaatctgattcggccgttcctcatccacatcatgtgtgtgcctgctctggtgactcatctcagcacagtgacccctgagcgcctcactgttttagaatcccatgacatgcttcgtaaattcatcatatttttaagagaccaagatcgatgccgtgatgtatgtgaaagtttagaaggatgccatacgctttgtctaatgggcaacctcctacacttgggctccctcagccccagagtgttagaggaggagacagatgggttcgtgagtttgctcacccagacgctgtgctactgtcggaagtatgtgtctcagaagaagtccaacctgacccactggcatcctgtccttggctggttctcccaatctgtggattatggccttaacgagtcaatgcacttgatcaccaaacagctgcagttcttgtggggggtgcctctgatccggatcttcttctgtgacatcctgagcaagaagctactggagagccaggagccagcccacgcacagccagcatcccctcagaatgtgctcccagtgaagagtctcctaaagcgtgcttttcaaaagtcggcatcagtccggaatattctcaggcctgtcgggggtaaacgggtcgactctgcagaagtccagaaggtttgcaacatctgtgtcctctaccagacctcgctgacaactctcacacagattcggctgcagatactcacaggtctcacttaccttgatgacctgcttcccaaactgtgggcatttatctgtgagctcgggccccacggagggttaaagctcttcttggaatgcctgaacaatgacactgaagagtccaagcaactcttggccatgctgatgctgttctgtgactgttcgcggcacctcatcacaatccttgatgacattgaagtttatgaagaacagatttcattcaaactggaagagctggtcactatctcctctttcctgaattcttttgtgtttaagatgatctgggatggaattgtagagaacgccaagggtgagaccttggagctgttccagtctgtccacgggtggcttatggtgctgtacgagcgggactgccggcggcgcttcacccccgaggaccactggctgcgaaaggatctcaaacctagcgtgctcttccaagaactcgacagggacagaaaacgggcacagttgatcctgcagtacatcccacatgtcatccctcacaaaaacagagttctactgtttcgaaccatggttaccaaggagaaggagaaactggggctggtggaaaccagctctgcctccccgcatgtcactcacatcaccatccgccggtccaggatgctggagagcttgtttgagtgcccctggccactggtgatcaatgccgagagctgctaggaaggcagtgtgtgctgaacagtggatgtttctgacattcttcaaggacggctacgagcagcttaggcagctctcccagcacgccatgaagggggtcatcccgtgtgaagtttgtcaatgacctcggggtggacgaagcagggattgatcaagacggtgtttttaaggagttcttgggaagagatcatcaagagagtttttgacccagcacttcaatctgttcaagacaaccaagtggggatgagaggctgtacccctcacccacatccatacatccatgagaattacctgcagctcttccgagtttgtggggaagatgctggggaaggctgtgtatgagggaattgtggtggacgtgccatttgcatccttcttcctgagccaactgcttgggcaccaccacagcgtcttctatagctcggtggatgaactgccttctctggactccgagttctataaaaacctcacctccatcaagcgctatgatggggacatcactgacctgggcctgacgctgtcttacgacgaggacgtcatgggtcagcttgtttgccatgaactgattcctggagggaagaccattcctgttacaaatgaaaataaaattagctacatccatctgatggcacattttcgaatgcacactcaaataaaaaaccaaacagctgccctcattagcggattccgttccattatcaaacccgagtggatccgaatgttctcaactcctgaactgcagcgtctcatctctggcgacaatgctgagattgatctggaagatttaaagaagcacacagtctactacggtggtttccatggaagtcacagagtcatcatctggctctgggatattctggcctccgacttcacaccggatgagagagctatgtttctgaagttcgtgaccagctgctccagacccccgctcctgggattcgcctacctcaagcctccattctccatccgctgcgtggaggtgtcggacgatcaggacaccggggacactctgggcagcgtcctccggggcttcttcaccatccgcaagcgggagccaggcggccgcctgcccacctcctccacctgcttcaacctgctcaagcttgcccaaactacagcaagaagagcgtcctccgcgaggaagctgcgctacagccatcagcactgaacacgggctttgaactctcctagctcctgtcccagccctgcctccagggctcctgggctgccagggaccttcagctcccagaggcagtgtggtcctgggaatgtgaccaacatgccaggtgacattggcccctagaccctctctatagccatgagactccttgtggcctcaagaaatttagacgcccacgacagcactacacagcatctccaggtgatgcccaaggcacagggctgcagaaaataaacctccagattccaccaacacgggtccattcttcctggtgatggcagaggggcttcttttagctagtttgatcttttgggagtctgtcttttccttagccgtctgagtgagctgtgtatgaacaagtcccaggagttccaagagtctagagtggtttttgcagcatgggttgagtgtacaaagcctactgtgcgtgagatcctctccttccgtttctgaaatctcttactcaggtaaggcctcgccaagcctctatgcaccccacaaagtttctgcctccatgccgtccacagcgcctcttcccagacagccaggcccatctgctgcccagggaagcgcaggcgcctgctagggacgctatggacaccgtgagtccaaggcgctgctcctgccttgaagccacgcgctccacgccgcggccctcccattttctgcgtcctcagcgggctgagctgccagagagccttcccggacctattcccgtcctatgcattcacattggcatcctggtttgggggaagaaaaacaacggcccttagcagcagccccgtttccagaatgtgctgcctgttccccaaagcctgcttgtcccgcggaggacggctgcctttgaccctgcttatttgtctcactggttatctaatgaggaacaaacactaacctaaggtacacatcccatctgggcggtggcttcactcctgagtctgcaaaatcccaggaaacttgggtcttgctgcccatccttcctcagcacagggaacccggaagcccgttgcactgacagaggctcacaccctctgggttttttgtttttttttaaacttcatttctcttccaacccattgggttcctctgccctcattctttacctttgttgtaagaactttagctccagggaactgaggcaaaggccctgtttgtggtctgtgttgacagccacccaccctctcccacctcatgctcctgcacctgcaccaccaaggttgatgccggattcgaagccaggaaggcccagtccctcg

SEQ ID NO: 89661 - DNA, 2615 bp, Homo sapiens
tcccgggtcgacgatttcgtattttgaggaggtcggagcggaaggacgtcgtggagattgcttgcgctggggtgccacacttaggctgagctgcaggttttcgcacagtcgcgagttaacctctgcttgctccagaggcctcgtcctaatccacctcggctgacggcgcgggatccctggctccgcgagcctcagcctcaccatgtgtgtcaggagctgtttccagtccccccgtctccagtgggtgtggagaacagccttcctgaaacacacccagcgcaggcaccaggggtcccaccgatggacacaccttggaggcagcacctacagagcggtgattttcgacatgggcggagttctcattccttctccagggagagtcgctgcagaatgggaggtacagaatcgtatcccttctggaactatattaaaggccttgatggaaggtggtgaaaatgggccctggatgagatttatgagagcagaaataacagcagagggttttttacgagaatttgggagactttgctctgaaatgttaaagacctccgtgcctgtggactcatttttctctctgttgaccagtgagcgagtggcaaagcagttcccagtgatgactgaggccataactcaaattcgggcaaaaggtcttcagactgcagtcttgagcaataatttttatcttcccaaccagaaaagctttttgcccctggaccggaaacagtttgatgtgattgtggagtcctgcatggaagggatctgtaagccagaccctaggatctacaagctgtgcttggagcagctcggcctgcagccctctgagtccatctttcttgatgaccttggaacaaatctaaaagaagctgccagacttggtattcacaccattaaggttaatgacccagagactgcagtaaaggaattagaagctctcttgggttttacattgagagtaggtgttccaaacacccggcctgtgaaaaagacgatggaaattccgaaagattccttgcagaagtacctcaaagacttactgggtatccagaccacaggcccattggaactacttcagtttgatcacgggcagtcaaatccaacttactacatcaggctggctaatcgtgatctagttctgaggaagaagcccccagggacactccttccatctgcccatgccatagagagggagttcaggattatgaaagcccttgcaaatgctggagtacctgtccctaacgttcttgatctctgtgaagattcaagtgtcattggcacccccttctatgtgatggagtactgcccaggtctcatctacaaagacccttccctgccaggcttggagcccagccacagacgagccatatacactgccatgaacacagtcctgtgcaaaattcacagtgtggatctgcaggctgtgggacttgaagactatgggaagcaaggctcgacaacctgggtgtttcatccagaagagccagaggtgctttgctgttccttgactgggaactttcttacccttggggcgacccctttgctgatgttggctacagctgcctggctcattacctgccatccagttttcccgtgctgagaggtattaatgactgtgacttgacacagctgggaatccctgctgcagaggagtatttcaggatgtactgtctccaaatggggctccctcccactgagaactggaacttctatatggctttttcctttttccgtgtggctgcaatcctacagggagtctacaagcgatcactcacagggcaagcaagctccacatatgcggaacaaactggaaagctgaccgaatttgtgtctaacctggcgtgggatttcgcagtcaaagaagggttccgggttttcaaagagatgcccttcacaaatccgttaacaaggtcctaccacacgtgggccaggccccagtcccagtggtgccccacaggcagcaggagttatagctccgttccagaagcttccccagctcatacctcaaggggaggtctggttatctctccagagagcctctctccacctgtcagagagctgtatcaccggctgaagcacttcatggagcaacgtgtgtaccctgcagagccagagctgcagagtcaccaggcctcagcagccaggtggagcccctccccactgatcgaagacctcaaggtaaagcagccatggtgaggtggtaagaccccaataccatggcataccctccccgaccccaccgggctcacctgaaccatcccaggcagtgaagatacaggagctccgagttgaatgatctttgcttccatcgtctcagaaagagccagctcttcatgactcagtttccatctcttgctcttgctgtgcctgtgtcacaggcagatggctcaggtgtgactgcacagcccaggcagtggaatgcttggccttagaaagccagggcaggttaggcctatctgatgggtatttgaattatgtaaatttgaaacagtgctgtatcagctaataaatctctctctagagaacccgtaatatcacagctagagggccagatccactgtgagctgagtttctgtgttgtctcccagtgctgtcacttcagctgataaacagaaacaccc

SEQ ID NO: 89662 - DNA, 624 bp, Homo sapiens
tcccggttcgacccacgcgtccgacatcttccactagggtaaggctacttctggctgagaagacacttggatgtagctcaagtgctgcttaggcagtcctgatctctcctctcgtctcttcccagggagctgaaaagccagattcgacctggtagccaagcaatgtcacagcagaagcagcaatcttggaagcctccaaatgttcccaaatgctcccctccccaaagatcaaacccctgcctagctccctactcgactccttgtggtgctccccattcagaaggttgtcattccagttcccaaaggcctgaggttcagaagcctaggagggctcgtcaaaagctgcgctgcctaagtaggggcacaacctaccactgcaaagaggaagagtgtgaaggcgactgagcccagaagagttgaggcacaggtgcagttactctctccctgccccacctttgggtactaattcccccttggaaagccaggccctcaacctctcatttggactgagaaacacttcctgatccccagctctagagaagcgagaactaggctgagccacgctgctactgctctcttccattcaccccttcagctcagcaacaataaagctgctttacttgg

SEQ ID NO: 89663 - DNA, 608 bp, Homo sapiens
ttttttttttttaggcattcaggctctttaatgtctgaggatggggggaagaagtcaatggtgaggcttctctgggaaattctgcaggccttgtagttctctaagcccctctagcaacatgtggatatgggctttgatattcatggagtccttggtgaggctgttgctgagccttatgaaaacctatgagttcaacatctgtgaggagagagctcttacgatcaatgaacttgagagcttctgccagtgtcaactccaggaaaaaaccatatcccagggccacatagatgcgtgaagtatctgggaccactgtgtcaacgaagaagttacagcccaaatccacctgcatatataactccgagtgcttagcttcctggagtcgctcaatgacatttctcagttgaaggtatttggccagctgctcatataccttgtctcgatggtccagcacctttcgcaagtcccgctgcagcacgtcactgatgaaggtctcgtagcgcagcactttctcccccgtggcctccaccgcccgccgcttagggggcgtcgccatgatgggctcctggggagtggggagggggaagaccatgttgaccgatccagtttgg

SEQ ID NO: 89664 - DNA, 657 bp, Homo sapiens
ttgagtggaaataggattttgtcatgttggccaggctagtgttgaactcctgacctcaaatgatccacccaccttggcctcccaaagtgctgggattatgggcctgaaccaccacgcccggctgcctcctgcttatttaatagtagttatccttaatattgggtaaagggattcttcttttgttctttgtcaaaattgttttagatattttaaggttggtgtctttccatatacattttagaataaacttgtctgtgtttataaaaagtcttgagatatttggttaggagtcgtaataaacttacagattaatttggggagaattgacacctttattatgttgagtccagtgcatgaacatagtagggatgtctccatttgttgaggtctccttcagtatttttcatcagcaatttttaatttaatatacagatactgtatgtgttttttacatttttttaaaaagtgtatacctaagtattttatatttttactgtgattgtaaatggtatgttttaaattccaacttttgcatgggataatatttttgtgattatttcataggaaagtactcaccttgtacttaattctatgagagaaatcttagtgggcattcagatgggagaccaagttaaatttcaaaactacaagtcattt

SEQ ID NO: 89665 - DNA, 1135 bp, Homo sapiens
gtaaccagtactagaatagtcagtacctagaagccactcttctttgaaaaggattatcacctgatcaggttctctctgcatttgcccctttagattgtgaaatgtggctcaaggtcttcacaactttcctttcctttgcaacaggtgcttgctcggggctgaaggtgacagtgccatcacacactgtccatggcgtcagaggtcaggccctctacctacccgtccactatggcttccacactccagcatcagacatccagatcatatggctatttgagagaccccacacaatgcccaaatacttactgggctctgtgaataagtctgtggttcctgacttggaataccaacacaagttcaccatgatgccacccaatggcatctctgcttatcaacccactgcagttccctgatgaaggcaattacatcgtgaaggtcaacattcagggaaatggaactctatctgccagtcagaagatacaagtcacggttgatgatcctgtcacaaagccagtggtgcagattcatcctccctctggggctgtggagtatgtggggaacatgaccctgacatgccatgtggaagggggcactcggctagcttaccaatggctaaaaaatgggagacctgtccacaccagctccacctactccttttctccccaaaacaatacccttcatattgctccagtaaccaaggaagacattgggaattacagctgcctggtgaggaaccctgtcagtgaaatggaaagtgatatcattatgcccatcatatattatggaccttatggacttcaagtgaattctgataaagggctaaaagtaggggaagtgtttactgttgaccttggagaggccatcctatttgattgttctgctgattctcatccccccaacacctactcctggattaggaggactgacaatactacatatatcattaagcatgggcctcgcttagaagttgcatctgagaaagtagcccagaagacaatggactatgtgtgctgtgcttacaacaacataaccggcaggcaagatgaaactcatttcacagttatcatcacttccgtaggtatgtgtgacatacaaggaagggatcctaataaaacatgaatgcatgcaaaaaaaa

SEQ ID NO: 89666 - DNA, 333 bp, Homo sapiens
  misc_feature (1)...(333): n = a,t,c or g
aaaggatatgaaaagaaaatgctttgtcaacatgaagctaaaataaatatgatgactggcatggagcataacacgatttacaaatgtatcttcaattattttatacatgatctcaaattttgtctttcaaaaactttttttctgcttgtaaagatctaatcatacttattggatagatttggaaagtactaaaaaccaatccctcacacctacaaaaaacttttaatattaatatttgaatagatattatgggacctccccaaaggtgtggaaaaatggaaggaaaaagaaaaaaatacttanttttaactttattctcaacataaactctat

SEQ ID NO: 89667 - DNA, 479 bp, Homo sapiens
gggaggagaaggggaaggaatattcatctacatttcagagatattaatagaatcctaggagataaaaagaaaatttaaaaactagtatataaaacagaatggagttttacttctagcaatagctcctattggaccaatcttcctgtagatagcatttataactctcaacaaactatgtaaaatgactatctgaaggtactacagtctaaagcatgcagaaatgggaaggaaattgatactgagtgaatttcccatttttacagcttttcacttgaagggatgacatatttcgtactagctgggtcaactagaacttggataaaaatctgtggtcttattatcttgaagaatgagaggacagttctacatgaattagagttcagggttaccacagcagctggaagataaaggaagaaatccaggaaaagagagagcaacagaggaggagccccaaactctatgtataaactctgcttaag

SEQ ID NO: 89668 - DNA, 534 bp, Homo sapiens
gccataccaaggttattgtcctagttaggaatgtgggacccttacactgggatggggacatctggatcgatactctagaactctagaaaacctggacaccccagccccgccaccctcccccacaccctgaaacctctaagcccactcctccctgttaagggccggtgctttgctcttgtttgaaggtcatgcccaggcctctgccacctccccttaggatctgtgctcaccacccctcctggcccctggaccaagaaggtcagcaggagggtgctgggcctgccagagaagaaagaagatgagctgcctggggggagcaggagtgtgcctgaaacaagggcatggccatatggggctctgctatgacctaggactcagcacccttgcagagcccccaggaagcagtgcccgtaggctgccagctcggtcggctctctgaaacttcccaggaagccatggcccacaaggaagagaatagcaacctaggggcaaccgtggcagctctgcaagaagcgaagggaatagagtacccta

SEQ ID NO: 89669 - DNA, 608 bp, Homo sapiens
gaaagttaaatattagaacaaattctatgtcaagcaaattaagtaaacatctatgaagagactgaaaatggaatgtttttggaagtaaatagaaattgctaagcacctagcaataaagaattacaacaactcaaggaaatatgtttattagcaggatcatgaattaattgacccatttccggtacctctggtcataattggaagtaaatatgatgtttttcaggtaagctcttccgcttctagctgagtttgttgtacatatatggctgtgctttttatgagggaggtacaaaaataatatcaaaataagaaaaataattattgaaggaatcggttaagtcatgcatcttaaagattttggaaaagacatagttgggacagaaaaaaataggtaaagaaaataaatgcagtgattagaatggggataaggcagatttagaaaatgaatcttgccgggcacaagtgcttatgccagtagtcccagcactttgggaggctgaagggggagggtcaattgagcccagggatttgaggttacagtgagctgtaatcacaccactatactccagcctgggttacacagtgagacacttgtctcaaaaaaaaaa

SEQ ID NO: 89670 - DNA, 667 bp, Homo sapiens
ctggattctgttggatgggagaatgtttgagggcaaaaaataaaaacaaacaaaaaagaactggattctactccaaactctatctaccatgaagctttctaattttggccctgttttcaaacaggggcaaaaggaggggatcagcctacattagtgatttccaaatgctggtttatgaaccagtctataaggaaaaagaagattgtagtgagcttttcatacattaagtattacagtactatggtttattctgatatcatactctatcttttggctgttaaaatatcgtttcttttattaagtgattgggatttcatatggtacttaacttcatccacctccagagtttgctttccataccacctctacaacactacagaggctgaactttctctgaaccatactttattcctttaacaattaccactcataggccgggcgtggtggctcacgagatcaggagatcgagaccatcctggctaacatggtgaaaccccgtctctactaaaaataccaaaaattagccaggtgtgatggcgcacacctcgtaaacctgctacttggaggctgaagcttgaaaatggcgaaatcagaggcaaggttgcttgaggggaggcccaccactgacttcacctggggaaagaaggaaacttgtttaaaaaaaaaa

SEQ ID NO: 89671 - DNA, 1189 bp, Homo sapiens
tttctcggcatatctctgtactttattgtccctgctgtaacaatgctcatccttcctgagagcgtctcctgagggggcctcggccaaggctgactggagaaggggctggtgacccctagcaggctctgccacctgaggcctgggtcttcccccgggatccttgaatctggagatggcagagaggaggcaggccggctctttccccaatcctcctaggagagctgcttctgcccattctcccactggtgaaacggaggcagaagcagcagctcagcagggtgaagctgggtttaaccttcctgaatggggtccagggacactccacatctgccacatagcctcttgggctggacatttttcctgggcaccagccagcagctggagcagcgagtgccgtatttcttgtacctgatcccacaggcgttgcagagaggggtcccatcttcagcgtctctccagagcggggtcctctgggtccgacaggaagcacagcgccggggctccagggcctcgctgcctgatgagtgggcctcggtgcctcctgggtgggctgcagggcccccaacagcatctgcaggggattcctgagaacggctactgcagggcaggctgtacgtggggatgatctgcaggctggagtccggctttatctgaaacttcagagtcaccccctcgaacccagggtccactctctcggtgccccggcaggggttcagctgtttccggggccttctctggggtggggccgagggagtccccgggggctgcagacggcggcccttttggctgatcctggtctgtgtgtccttggaatccctgtccagcagcaggcggccctgagtccccagagccatcgggtcccagcaaggccccaggaccggggtgtcctgggcaggggactgacccagcctctccactgtctcttggaggaagcacagggcggtgaccgactcctggcatgcaggccagagggacctctcactgattctgcagcatcctggggtcctcggcttgtcctgggagggggatcctcccagccgctccaggttcagacagggcggcgccagaagctttgctgggaggggcgggacctgtgtggtgggagcgctcttggtagaggatgcgatgagccccagctgagagcgaccagcctcggcggcacctttcctctttctggcttttttcaggc

SEQ ID NO: 89672 - DNA, 1796 bp, Homo sapiens
gtagttgaaaacataagactcccttttaaggtaattctgtatgaaactgtattataaaatacttttgttaagcaaaattgcatgtgtgtgttgaacccccaaacactcaaagtactttactactcttaaaagataaacaaaattcttatacattataaaaaaaatttaagctgctctgcaacgtacgaaaccccgacccagaagcaggtcgtctacgaatggtttagcgccaggttccccacgaacgtgcggtgcgtgacgggcgagggggcggccgcctttccggccgcgccccgtttcccaggacgaagggcactccgcaccggaccccggtcccggcgcgcggcggggcacgcgccctcccgcgcgcgcggggcgcgtggagggggggggcggcccgccggcggggacaggcgggggaccggctatccgaggccaaccgaggctccgcggcgctgccgtatcgttccgcctgggcgggattctgacttagaggcgttcagtcataatcccacagatggtagcttcgccccattggctcctcagccaagcacatacaccaaatgtctgaacctgcggttcctctcgtactgagcaggattaccatggcaacaacacatcatcagtagggtaaaactaacctgtctcacgacggtctaaacccagctcacgttccctattagtgggtgaacaatccaacgcttggtgaattctgcttcacaatgataggaagagccgacatcgaaggatcaaaaagcgacgtcgctatgaacgcttggccgccacaagccagttatccctgtggtaacttttctgacacctcctgcttaaaacccaaaaggtcagaaggatcgtgaggccccgctttcacggtctgtattcgtactgaaaatcaagatcaagcgagcttttgcccttctgctccacgggaggtttctgtcctccctgagctcgccttaggacacctgcgttaccgtttgacaggtgtaccgccccagtcaaactccccacctggcactgtccccggagcgggtcgcgcccggccggcgcgcggccgggcgcttggcgccagaagcgagagcccctcggggctcgcccccccgcctcaccgggtcagtgaaaaaacgatcagagtagtggtatttcaccggcggcccgcagggccggcggaccccgccccgggcccctcgcggggacaccgggggggcgccgggggcctcccacttattctacacctctcatgtctcttcaccgtgccagactagagtcaagctcaacagggtcttctttccccgctgattccgccaagcccgttcccttggctgtggtttcgctggatagtaggtagggacagtgggaatctcgttcatccattcatgcgcgtcactaattagatgacgaggcatttggctaccttaagagagtcatagttactcccgccgtttacccgcgcttcattgaatttcttcactttgacattcagagcactgggcagaaatcacatcgcgtcaacacccgccgcgggccttcgcgatgctttgttttaattaaacagtcggattcccctggtccgcaccagttctaagtcggctgctaggcgccggccgaggcgaggcgccgcgcggaaccgcggccccgggggcggacccggcgggggaacaccgacgcggaggttccccccacacgcgcgggacgcccgcccgcccccgccacgcacctcgggagaggcgatggggggggtggagcgaggccccgcggggaggggacccgcgtcggcacccgccgggctccccggg

SEQ ID NO: 89673 - DNA, 1564 bp, Homo sapiens
tccccctggtctggaactgaagacactgagcaatggtccccaagccccaaggagatcagctcccctgggcccagtggccccaaccagggagggtgtggagaatgcctgcttctcctcagaggagcatgagacccatttccagaaccctgggaacacgagactgggcagctcacccagtccccctgggggtgtctcctcactgccccgatcccagcgggatgatctgtcccttcattcagaggaggggccagccctggagcccgtgagccgcccggtggattatggctttgtttccgccctcgttttcctggtgcggaccaggggaatccgactgtttaattaaaacaaagcatcgcgaaggcccgcggcgggtgttgacgcgatgtgatttctgcccagtgctctgaatgtcaaagtgaagaaattcaatgaagcgcgggtaaacggcgggagtaactatgactctcttaaggtagccaaatgcctcgtcatctaattagtgacgcgcatgaatggatgaacgagattcccactgtccctacctactatccagcgaaaccacagccaagggaacgggcttggcggaatcagcggggaaagaagaccctgttgagcttgactctagtctggcacggtgaagagacatgagaggtgtagaataagtgggaggcccccggcgcccccccggtgtccccgcgaggggcccggggcggggtccgccggccctgcgggccgccggtgaaataccactactctgatcgttttttcactgacccggtgaggcgggggggcgagccccgaggggctctcgcttctggcgccaagcgcccggccgcgcgccggccgggcgcgacccgctccggggacagtgccaggtggggagtttgactggggcggtacacctgtcaaacggtaacgcaggtgtcctaaggcgagctcagggaggacagaaacctcccgtggagcagaagggcaaaagctcgcttgatcttgattttcagtacgaatacagaccgtgaaagcggggcctcacgatccttctgaccttttgggttttaagcaggaggtgtcagaaaagttaccacagggataactggcttgtggcggccaagcgttcatagcgacgtcgctttttgatccttcgatgtcggctcttcctatcattgtgaagcagaattcaccaagcgttggattgttcacccactaatagggaacgtgagctgggtttagaccgtcgtgagacaggttagttttaccctactgatgatgtgttgttgccatggtaatcctgctcagtacgagaggaaccgcaggttcagacatttggtgtatgtgcttggctgaggagccaatggggcgaagctaccatctgtgggattatgactgaacgcctctaagtcagaatcccgcccaggcggaacgatacggcaggcgccgccgatgccaccggcctgtgggtctctgaagggacccccccccaatcggactgccaaattctccggtttgccccgggatattatagaaaattatttgtatgaataatgaaaataaaacacacctcgtg

SEQ ID NO: 89674 - DNA, 708 bp, Homo sapiens
gtgtagatgaccagccagtcagcagttagccaaggaaaagaaatgccagtcacagccctgttgtgtctcttaataagccgaggaagcatacagatgagccagcctcctggttggtcagtttgcctggcctgggatgaagggacagtgaaaatggaagcctctgagtgaggagagtgagtactggagtcaggagaactggactcccagcctcacactgctccctagtatccacatgacttcactcagtggtcacgggtgggcatgacccccgggcactagagggcacacaggagctactgcacatgttggcattctgtagaactccaaagggctgtgctgaccttatgtgttttgcattgtctctttgaaagaaagggataagcatctgttgttttatgttttgttttgcttttgagacagggtctcacactgtcacccaggctgaagtgcagtggtgaatcatggcttactgcagccttgacctcctgggcttaagcgtcctcccacctcagccttctgaatagctgggactgcaagggcatgccagcatgctcagttaatttttaaattttccatagggatgggatcccgctttgttgcctaggctggtctcgactcctggcctcaagtgatcctcctgccttagcctcccaaagtgttggattaccaggctaagccccttgcccgggcccaactaatgtttttggg

SEQ ID NO: 89675 - DNA, 698 bp, Homo sapiens
caagttgcagttcagatttgaatgggcattcattatttcaatgggtggcagggggtaaaagagaataaaactttaatgtttgcttttatggctcactttctggccaattaaaacattcctcctccttaaaaatataagtagtcctcaaagtctgaagtaagcatgggttctttatatgtccagtttgtaaaatatttatgtcaatgaccagactgaatgatttgatactttttagtgtgatgtaaacaactcaccagagaacatttgttacaggcataattgtgttctttgctctcccagtgcgtacaaagtgacctaaaagatacttggttcttttcttgcttggaaaggaagttggctatgaatgttatactatctgaggtacacttacggcacaacactgtatgtcagagacaacttggaagtgaacaggagcaaataatttaaataaactaatgtgtttaataagtacaaagtacatgtaccacatgcaggctgagccctgttttgtttggcttgtacactgctttacggaaatctaaaagctaaaaatcaaatctgacgcagtaactgctttactagtcctcgagcagaaatggctggcccctttatctaaggcaggtgaggtgaggttcgcctgtctcggtaactactaggaacttccgccggggggaaggaaaaccccccgtgttccccgc

SEQ ID NO: 89676 - DNA, 1195 bp, Homo sapiens
  misc_feature (1)...(1195): n = a,t,c or g
atttttttttccattttcataaacagatctttataatcatgtaaattaaacaattttgtctttaggagacgcgcacacagaacatagaggtaagagctagaataccagcaatcttaggaaggcaaaattaaatcatcttttgggagaagagagaaaattgtgaggagaaggtgccagtgtcaaagattggcttggcgaggttattttctctctgggagtctgggaggtgatgagctcctaccgctcactgcctctgttgtcttgcctattggttcctttctgggcaaggaagaacgttgtctctcttttagagttttgtaggcctctgtcagtaatccgtggaagacagctgtcctggggcccagaatggcaagttctgtaagtgaatgttttctgttgggatgtcatcatggaaaggctcaggtgtagtctggaatttgggttgatgaagactcattctataactcatacaattctcaaaggatgcttttggatcatctgggattttcattgttcttggttgtaccattttcatttcttgacatgtggagcacagctgttggtttctgagcagcatggagtcacactggttcctcctggcctcagacttgctatcagctgaagcctggcctccaagaagagctgctccatttctatctggagaagggatgagggcattgaagagtcgtggaaggcagctgtgacaggctactttaaaggcaacgcaaacatttgagacgccatgtcctgcaggcctcatttcctccattctgtcttgctttctttcccagccctgaaacccaggtctttggtctttttcttctgttgcattcccttctcactcggtttccttacgaccagctcagcagcaataacaggaatggagagggaattgtccacattcacagtacaatgctctggttttatcaggtctagagccagaggcactcggaatgttaatggggccctcatttcccaagcagctgtcctctggatagcagatggcagttgtgacaggagagtgacagcaacctatgtgtagcctggccaaggtatgatgcagatttcagccagtccccagaagccaaaaacacatttgacaattggaaacatcctcataccctaggacaatatctgctgcggtgtctaagggctgaacatcatccngaagccatgggccttcttgaacccttgg

SEQ ID NO: 89677 - DNA, 626 bp, Homo sapiens
tgaagagctacacacatttgccttgtaggaagtttttattctcatggcaagcaggcattacctctattacaaggccccgcttattgttcaccctgtgatgtaagagcttttaggactccaacaatattagccttctctttaattcctttcaggccccatcgccatctcagaaccatggcctggagttgccgccctccattctccttaacatgtcgactcagaaaagtcttaaagcccgctgttctttcccttcatagcaaaaattataatttatcattatattttgtttaatgaggacagagactagcattttttacctactacataatataaatgcttggcacttaaggagcttgaacaaatgaaagcctgctcattttggatggatgccccagtatttggtactgttagttttcctttatacacaaatgtacacgatgtctccccctttccaaactagaccataagccttcacagtatcttacaggtagtagcgatttaaaatgggatgatattggaaagatctgcgactactggctaagcctagctcactttatatactttccccttgatttaagaaaactcatcatttattcattaatatagttagttgacaattattgagg

SEQ ID NO: 89678 - DNA, 1027 bp, Homo sapiens
ccctttgcctcccccctggggtccaaagcccaaatttccccccccaaaaaaaaaaaagaaagaaagaaagaaagaaagaaaagaaaaataaaaaagaaattttattaccagataggatttggctgagtctcccagagtcaaatttgggggtgccccacccttggcattgtccttgataactttattccactcttacactcaattcctcagtaattctgtctgctgcctctaaaatctatctagaatccacggggtctgggcttagctggaatctccatcattgttcctgtggctcagtgcagccccccttcaccttctctggttttcaacctcccatggaggccacaagacacctgtgatcacctgaattagggcaagtccctcttctgcttagaagcttctatggctcccacctcactcagagcaaaagcgaagtcctctatatcacccacaaggtccttcgggaactactccttcagctccttgtctcctcccattctccccctccgtccctgctccaggcacaccagcatcgctgcatttcttagaacacatgggcacatttcagcctcagggcctttgcgcatgccattccctcatcctgaaatgcttttcttttggtcttcccaggacagaggtctcagctcacatcacaagtcactacctctgcagagaggtcttccctgaccaccatcaccatctctgtcgtttgtcactggaatcatctccattatttcatcaccgagttcttttctgtgttcccaagcagaacgtcaattccacgagggcacagattttttgtctgtttgttcacattgtggggtgtcgctgcataaatacatttcccctgcatcttttccgactgcacctttggctgcatttcctacaaattcctttatgtaaaaagaacaagtctgtaaaacttgggaagacagtcgtgggccgagggtgtcagtctgcagccggttctgataccagagtccgggcggctgtgggtgcaccggggctgcctgtggagccgctggtg

SEQ ID NO: 89679 - DNA, 685 bp, Homo sapiens
tttcgtcaagcccacaatcaggggtctgtgggccgagaggctgtgtcacagtccccctatgccatgcctggaggcacatgggatcagagacctctgaggacttggcaggaggcacaggcgtggagaggcagggcctaacccacgtgtgtgtgtcgcgggggggaggggggcggtggctaggcagggctctttggggaagagatacctgacagggtcttcaaggataagcacgacaaggcaaggccacaggggaaggaaaggagaagagaaggggacttgggcaggggagccaatgacaaaggccaggagtgcaagaaacatggtacctgggaggaactacaagcagtcctggactgctgagggctatgtccataagaaaagcagcagcaacagaaggggccacaaagagaagcaggagccacatgaggggccctgatgtcactcaaacacagggtgccactcttgggtttaaagcaggggaatgagattgatgatagggattgtgtggaagatagagaggtggaggaaagatcataagttatcatgggagtcccagagcaagatgagggattgaaccaggacagcggtagaagggatgacagaagacaaaagagggacaaacagttaaaggaacaatttgtgggacttggtggctcccttggatgtgggcagtgaagggacgaaa

SEQ ID NO: 89680 - DNA, 411 bp, Homo sapiens
tttcgtggaacatagaaaatatctacgcgctgaacaggtgtgtgaatgggcctgacactcaccatgttctgcctgcgaggcccacctcagggcctagggaggaaccctggatgtccctggtctcatgggcctgtgacatgtgggcctggggcctgatctctgaggacagggaggggttgtccatctctgtgccctgggctgatctgctttctctcaagggcagacggggaggtaatttgaggttgtgtgcatgttgggtccatcctgagccggtgccccctcaaggggctgctgggccctaccttgcacactggttctcttccctgtggaagagaaccttccctgtccttctcatcttcattttccatttgcacatctgttaatttcttatcctcctttccactgacccca

SEQ ID NO: 89681 - DNA, 1102 bp, Homo sapiens
tttcgtccggggctaggggtggcccattgctggcagaatttaaggaaagagcaggttgtaggcacagaggatgggcagccaggcctgggccttccccttactgtcccagggcagcagagctagggtcctcttttaccctccctaaggtcacccccttcccatctacacgtccctccccaagttcaagcacatagtcaatcatgaccactcaggagctcagtgagctggggccatgtccctgtggcctccagcccatccgcaggagggtcccttgcagtgacagcacaaagagtcccccacaggaagcccctgagggccagcatggaccttgagagccaggagggaatgggcctggtgccactctgttcccactcccacctaagattcctacccctgtgttctagcaggtgactcttgatctggccagcccacaacaaatacttgaactaggcagcatggggtggtggaggcctgcagaggccctgggcccaggaactgagactagggctttctcatgaggcctgatcaagctcccgcaggtatgacctggcctcctcgcctcgggctgccttaaagcaccgctaacccacgccaaggggctaggcagggcttcgcggggcctggcccaaggtctccagcagagcaataacatcttcccaggttgggttgccacagacaccgtgccctggagcccccagcccatcccatctggtgctaccctgtctgcctggcagcctagcctcacccctcctgtccggtcacctgggggtccttggtaaggatgcagccacatggggccggtttatgcacctgggcgagaacctgactggggcaggggatgctcaggggcctgcaggtctcccacagagctgcttttctgcccgcctcaccctgtgggtttgtatttcttgccgggtcaaaataggcagtgactcgtgccttccctcctcagggccggcggcagggtgtggacccagctggccgctggaccgtccccttcctcattctccaagctcatcaacaggtctcagaggaacatttccataaaaggtgtggcctggcatgcagtgctgtctgcacgctgtcgcttaccccacagcag

SEQ ID NO: 89682 - DNA, 1514 bp, Homo sapiens
aagtttaaacttgtaagcttaagcttccgtttataaacagaagtttaaaattataggtcctgtttaacattcagctctgttaactcactcatctttttgtgtttttacactttgtcaagatttctttacatattcatcaatgtctgaagaagttacttatgcagatcttcaattccagaactccagtgagatggaaaaaatcccagaaattggcaaatttggggaaaaagcacctccagctccctctcatgtatggcgtccagcagccttgtttctgactcttctgtgccttctgttgctcattggattgggagtcttggcaagcatgtttcacgtaactttgaagatagaaatgaaaaaaatgaacaaactacaaaacatcagtgaagagctccagagaaatatttctctacaactgatgagtaacatgaatatctccaacaagatcaggaacctctccaccacactgcaaacaatagccaccaaattatgtcgtgagctatatagcaaagaacaagagcacaaatgtaagccttgtccaaggagatggatttggcataaggacagctgttatttcctaagtgatgatgtccaaacatggcaggagagtaaaatggcctgtgctgctcagaatgccagcctgttgaagataaacaacaaaaatgcattggaatttataaaatcccagagtagatcatatgactattggctgggattatctcctgaagaagattccactcgtggtatgagagtggataatataatcaactcctctgcctgggttataagaaacgcacctgacttaaataacatgtattgtggatatataaatagactatatgttcaatattatcactgcacttataaacaaagaatgatatgtgagaagatggccaatccagtgcagcttggttctacatattttagggaggcatgaggcatcaatcaaatacattgaaggagtgtagggggtgggggttctaggctataggtaaatttaaatattttctggttgacaattagttgagtttgtctgaagacctgggattttatcatgcagatgaaacatccaggtagcaagcttcagagagaatagactgtgaatgttaatgccagagaggtataatgaagcatgtcccacctcccactttccatcatggcctgaaccctggaggaagaggaagtccattcagatagttgtggggggccttcgaattttcattttcatttacgttcttccccttctggccaagatttgccagaggcaacatcaaaaaccagcaaattttaattttgtcccacagcgttgctagggtggcatggctccccatctcgggtccatcctatacttccatgggactccctatggctgaaggccttatgagtcaaaggacttatagccaattgattgttctaggccaggtaagaatggatatggacatgcatttattacctcttaaaattattattttaagtaaaagccaataaacaaaaacgaaaaggcaaaaaaaaaa

SEQ ID NO: 89683 - DNA, 1774 bp, Homo sapiens
cccacgcgtccgcactgtggtcctgaactgaagagctgtgtttttcaggaagacttggccaggccgtgttccgtgtctctggattcaagtcccaggagtcctgaccagagagcaggcatcagtgtttttctgaccgaagttctcatttcctgacaatggaaatggaacaagaaaaaatgaccatgaataaggaattgagtccagacgcggctgcttactgctgctcggcctgccacggcgatgagacctggagttacaaccaccccatccggggccgggccaagtctcgcagcctgtctgcctcgcccgccctggggagcaccaaggagttcaggaggacacgctctcttcatgggccatgcccggtgaccacttttggaccaaaggcctgtgtgctgcagaacccccagaccatcatgcacattcaggaccccgcgagccagcggctgacgtggaacaagtccccaaagagcgtccttgtcatcaagaagatgagagatgccagcctactgcagccgttcaaggagctctgcacgcacctcatggaggagaacatgatcgtgtatgtggaaaagaaagtgctagaagaccctgccatcgccagcgatgaaagctttggggcagtgaagaagaaattctgtacctttcgagaagattatgatgacatttccaatcagatagacttcatcatctgcctggggggagacgggacgctgctgtacgcttcctcgcttttccagggcagcgtccctccggtcatggccttccacctgggctccctgggcttcctgaccccattcagctttgagaactttcagtcccaagttactcaggtgatagaggggaacgcagctgttgttcttccggaagtcgtctgaaggtcagggtggtgaaggagctccgggggaagaagacggccgtgcacaatgggctgggtgagaaaggctcgcaggctgcaggcctggacatggatgtcgggaagcaggccatgcagtaccaggtcctgaatgaggtggtgattgacagaggcccctcctcctacctgtccaatgtggatgtctacctggacggacacctcatcaccacggtgcagggcgacggtaaggcccgcagcacttgtcctgggggccctgagcgttcctcgggcgggagtgacgcctgcgcctgtccctgtcaggagtgatcgtgtccaccccgacgggcagcacggcgtatgcggccgcggccggggcctccatgatccaccccaacgtgccggccatcatgatcacgcccatctgcccccactcgctgtccttccggcccatcgtggtccccgcaggggtcgagctgaagatcatgctgtcacctgaagcaaggaacacagcatgggtgtcctttgatggacggaagagacaagagatccgccatggagacagcatcagcatcactacctcatgctacccgctcccctccatctgtgtgcgggaccccgtgagcgactggtttgagagcctcgcccagtgcctgcattggaacgtccggaagaagcaagcccacttcgaggaggaggaggaggaggaggaggagggctaggtcaagcccctatccaggcccgaatccttccgctgccctccaagcgccctctggggacagaccaatctgcgtgtgtctgtgaccgcctgtctcagtggcacggccacttcctttctgtagctgggttagagcctgggtctgccttttgtctcttccgtccatcaaaggacacccatgctgtgttccttgcttcaggtga

SEQ ID NO: 89684 - DNA, 1257 bp, Homo sapiens
  misc_feature (1)...(1257): n = a,t,c or g
gaattcggcacgaggaatttctttttaaaatattattttggcttaaatttctttagctggcatgatatggtaataagatattctacttaattaaatattttaggtagtaaaggagcaaaatagcattcactcagctgtcaaataattagatatgtgggaaagtatactaaacagtaacactctactttaatgcaatttgcatggtggttcaaaagattctttaagatcttgagtgcctttaaggtttaccattatagaaaatcaattattatgcttagagatatgcataagtgctcaatttaataaaatgtaaaggagtttagaggaaaataaccttttttttcaataattgttttaaactaggtgacagttaagacttccttttcacaaatacttggacaggtaagagagattcctggctggttgattatttactgctttatgaatagataactctaaggaagggttgtagactttttccataaggggctggataatcaataattttttgcagaccacatacagtatcttttgctactgccactgctgtagttgcttctgactctttcccttatttccgttccggtcctcccaacctggcataaaaaccccaaaacttcacttggacctcgaacaggtcttggcccgccctgttcggagagcgcgttcgaattcgcgatgcgggccgaggtgccggccccgagccggcgactcgcagcggcggcctcgtccaccgtaacgcgctccggactagcaacgctccgtcccatcctcgcactccggcgagcggggatccgccatcgggaatccgggaacatcggtatctcattctacgcacctcggagacgcgacgcttcggcgcccgcctaaaccgcacacatggggcacccaatcctccgatgcaccggacaacaccacgaccctcgccaacggcggtgccgtatttttatcggagccagcacccggttacaccggagtcactcgatatctccgacacccctgcgctcttcgcgcaagtggcttcccttgctcatcggtgattaatcatgctacgcggaaccccgcgcgcactgtccgtatcaactatcacccaccctcgcctccgttgctactactccggagtatcacgtacgcctcgcccttatcaccggtacgggcggccacacctctgggattactcagggagtccacacgacgtcggagtggcgcaccggccgaacatancgggcgcgatccacgccggacgaagggcggccg

SEQ ID NO: 89685 - DNA, 1356 bp, Homo sapiens
gcacgagctgttgagtggtagcctttcccctcaaccagcaatggaggagcagccccagatgcaagacgccgacgagcccgcggactccggaggggaaggccgggcaggcgggccaccgcaggtcgccggcgcccaggcggcgtgcagcgaggaccgcatgaccctgctcctcaggctgagagcacagacaaaacaacaactcttagaatataaatcaatggttgatgcaagtgaagaaaaaactccagaacaaattatgcaagaaaagcaaatcgaagctaaaattgaagacctggaaaatgaaattgaagaggtaaaagttgcttttgagataaaaaagcttgcattagacaggatgagactttcaactgcacttaaaaaaaacctggagaaaattagcagacagtctagtgtgctcatggataacatgaaacacctattagagctaaataaattaataatgaaatcacagcaggaatcttgggatttagaggaaaaactgcttgatattagaaagaagagattgcaattaaaacaagcttcagaaagtaagcttttagaaatacagactgaaaagaacaaacagaagattgatttggacagtatggaaaactcagagaggataaagatcatacgacaaaacctacagatggagataaaaattactactgttattcaacatgtgttccagaaccttattttggggagtaaagtcaattgggcagaggatcctgcccttaaggaaattgttctgcagcttgagaagaatgttgacatgatgtaataagaattcatttctgacatattttacatttctggcaatctcaactcttatttggaatacttctgtgcatttgtctgtccaccgtaattttagaaaagcatatccataacgtttacagttgtagtacagttgtggttagttatttgtagtgggattgaaagtaatttttttctttttatatttctatatttagtttggttttttgttgttgttggttttttgaagatggaagtctcgctttgttgcccaagactggaggggcagtggcgcgatctcggctcactgcaacctctgcctcccgggttcaagcagttctgcctcagcctcccaagtagctgtgactaaaggtgcacgccgccatgcccagctaattttttgtattttagtagagacggggtttcaccgtgttgcccaggctgctctcagaactcctgagctcaggcagtccaccgcctcggcctaccgaagtgctaggattacagacgtaagccaccgagcctggtctagtttgcattttttttctatcagttttataagttaagaaataaaaggaattaatgttaaaaaaaaaa

SEQ ID NO: 89686 - DNA, 1184 bp, Homo sapiens
cccgggtcgacccacgcgtccgcccgctcgcaggtcccgaggagcgcaggtgaggcggcaccccactcccggcggcctccgggcctccttccgcacgcaccccgagctgcctccgcacagttggaggagcgtatgagggacccccacccagggatgacactccaggaaggggactgcagaggaagccagactgtgtccctgacaatgggaacagccgacagtgatgagatggccccggaggccccacagcacacccacatcgatgtgcacatccaccaggagtctgccctggccaagctcctgctcacctgctgctctgcgctgcggccccgggccacccaggccaggggcagcagccggctgctggtggcctcatgggtgatgcagatcgtgctggggatcttgagtgcagtcctaggaggatttttctacatccgcgactacaccctcctcgtcacctcgggagctgccatctggacaggggctgtggctgtgctggctggagctgctgccttcatttatgagaaacggggtggtacatactgggccctgctgaggactctgctagcgctggcagctttctccacagccatcgctgccctcaaactttggaatgaagatttccgatatggctactcttattacaacagtgcctgccgcatctccagctcgagtgactggaacactccagcccccactcagagtccagaagaagtcagaaggctacacctatgtacctccttcatggacatgctgaaggccttgttcagaacccttcaggccatgctcttgggtgtctggattctgctgcttctggcatctctgacccctctgtggctgtactgctggagaatgttcccaaccaaaggggtgagtccctaagaaaagagaccagaaggaaatgttggaagtgagtggaatctagccatgcctctcctgattattagtgcctggtgcttctgcaccgggcgtccctgcatctgactgctggaagaagaaccagactgaggaaaagaggctcttcaacagccccagttatcctggccccatgaccgtggccacagccctgctccagcagcacttgcccattccttacaccccttccccatcctgctccgcttcatgtcccctcctgagtagtcatgtgataataaactctcatgttattgttcccaaaaaaaaaa

SEQ ID NO: 89687 - DNA, 440 bp, Homo sapiens
atgcttacgtcatgcttggcacgcggaagagaagtgttgaaatatccatctataattgtggatgtatctattgctcctttcagttttgtcagttttgcttcatgtactttgaagttttgctattgcttgcatgcagttttaggattggtatgacttgttcatgatttaacatattattatgaatatccctttttattcgtagtattaactcatgttctggtctatttttatgatattaatggagccaactagctttttatgcttaatatttgcacaacatatcatttttctttctttctaacttgtctgcttatttaatttaaaagtagtttcttatagacagcatatagttgtaactctttcgttattccagcacagtaatttcttcctgcatttctaattgcaggttttagactacatatttttaatgtaattatcta

SEQ ID NO: 89688 - DNA, 1215 bp, Homo sapiens
gaacgaggcttggagatcacgtaactctcaccctgctttgtttaggggagtttgggtaacttcttgatggccggtggggtcttgtcctgaaactggctagaaatcttgtcacatgatcatctaacttggtggcctctaggcaaaaggaaatggatttggttaaaagatttaacagatatggtccaaaaaccaaggcaaatataatcattaataatgggctggccaagggagggagccatgaaacccaacttagtgccctttaggtgccccagctgttgtcatattttagaggcccagtcagctagttttcaggtggtgtcccttactaatcctgattggttgacatcaaaacagcattcttcttctaggaaaatacataagccacctgtttcagcagttaggagatctagtccccttcgattttgcaaagcgaccactgccaaggagcctatccgaatttgtaaggtgacaatactttgagcaatgttatccaggctttccataaaatccttggacaagcgttggtaataggatagggaagttgcaatcccgctaactcccattcctacctctgctgttattcctagccgttgtgtctggtggttgcagttaaaggtataatgagggattggttgttgggagctatattaatttagggacatacaatatttctgtctccagtctaccacttccaccaaagacaaatcacagcagaaccgacctaacttcaaaataaactgcagtcccatatactgggcctgattacccacacaaagtgcaacaagaatcattgtccatatagactctcctagattggctttgctagaacattttacaaggccatttcagtcaaagtcctgagaaagtaaccggtttcaattgtgccctattacaaaagaaaacgtggttattaactttatacagacaaatgccatgaattaagaatattcataaatagtttacaaattctggagaaattagaatactcaatacacttaaagggtatttcaaggctataaatagctcaaaataaaaagattattcagactctgaaaaaacaaaaagaagtagcaatattttaaacaacaaaagccatacaaattatttcagtcttccattagttcatttcagtccatgtaatcaactcctgctctacttcatattcatctttatgaacacatcagccttttcaatttagtggccttgggaagtttt

SEQ ID NO: 89689 - DNA, 3113 bp, Homo sapiens
tgagtcaatattttggtaggtcatagttaataaaaatgtaaattggataaactacatctattacaaccaacagcaacgagcttttcatgagttaaaagaaaaactcatgtcagccctagccctggggctacctgacctgacaaaaccctttacattctatgagtcagaaagagaaaaaatggcagttggagttttaacccagactgtggggccctggccaaggccagtggcctatctctcaaaacagctagacggggtttccaaaggctggcccccatgtctaagggccctggcagcaacagccctgttagcacaagaagcagataaactaacccttgggcaaaacctgaatataaaggccccccatgctgtggtaactttgatgaataccaaaggacatcattggctaacaaatgctagattaaccaagtaccaaagcttgccatgtgaaaatccccacataactattgaagtctgtaacaccctaaatcccaccaccctgctcccagtatcagagagcccgggcgagcataactgtgtagaggtgttggactcagtctattctagcagacctgaccttcgggaccagccatgggcatcatcagtagactgggagttatacatggacgggagcagcttcatcaactcacaaggagaaagatgtgcaggatatgcggtggtaactttggatgctgtcattaaagccaaactgtggctacagggcacttcagcccagaaggctgagctcattgctttaactcgggctgtagaactcagtgaagggcaagagtcacttgaagaattgttaggccggtacttctacgtctcacacttgccagcctttgccaaagcagtagcacaactgtgcattacatgccgacagcacaatgcgaggcaaagccccactgtttcgccccacatacaagcttatggagcagctccttttgaggatcttcaggtggatttcacagaaatgccaaaatgtggaggtaacaagtatttgctggttcttacgtgtacttactctgggtgggtggaggcttatccaacacgaactgaaaaggcctacgaagtaacccgtgtgcttctccgagatcttattcctaggtttggactgcccttacgaattggctcacataacgggccggtgtttgtggctgacttggactgtgtggaaatcaatgtggatactggtgtcatttgggccacttggataaaaaatgaaaaggatccagtgcagcttcagaaaggaaaaagtggcccttcctgtactaagggacaatgtaaccccttagagctagtaataaccaatccccttgatcctcgctggaaaaaaggggagcgtgtgaccttaggaatcaatggggctggactgaatccccgagtaaatatcttggttcgaggagaagtttacaaatgctctcttgagccagtgtttcaaactttctatgatgaactaaatgtgccaataacagaatttccaggaaaaacaagaaatttgtttttgcaattagccgagcatgtagcccagtctctcactgtcacttcatgttatgtatgtggaggaactgtaatagcagatcaatggccatgggaagcccgagaattagtacctacagacccagttcctgatgaattcccagctcaaaagaatcaccctgataatttctgggtcctaaaagcctcaatcattagacaatactatatagcaagagtggagaaggacttcacccttcctgtaggaagactacatggtggagttcaaaccacacagagaaaaatccattcagtaaatttccaaagttgcagaccgtttaggcccacccagaatcccaccgggactggacagcccccactgggctatactggatatgtggacatagagcctacactaagctgcctgacaagtagttgtgttattggcactattaaaccatctttcttcctactgtccataaaaacaggagaactcctgggcttccctgtctatgcttcccgtgaaaagcatagctataagaaattgaaacaatgataaatggccccctgagagaatcatacagtattatgggcctgctacttaggcacaagatggctcgtggggataccggatccccatttatatgatcaaccgaatcatacggttacaagctgtcttaaaaataatcactgcaaccggcagagccttgactattctggcccagcaagaaactcagatgagaaatgctatctatcaaaatagattagctctcgactacttgctagcagctgaaggagaggtctgtaggaaatttaaccttactaattgctgcctacacatagataaccaagggcaagtagttgaagacatagttagagatatgacaaaagtggcacatgtgcccgtgcaagtgtggcatggatttgatcctggggccatgtttagaaaatggttcccagcgctaggaggatttaaaactcttataataagagttataatagtaataggaacctacttactgctccctcgtttgctacctgtacttcttcaaatgataaaaagcttcatcgctaccttagtgtaccaaaatgcatcagcacaagtgtactatataaatcactattgatctgtctagcacgaagacatgggtagtaaacatgaaacaactcctgctattgagtgagagactcaaagtgggggaataagggaggagaccacccctcatattgtcttatgcccaatttctgcctccaaagaaagataaagtaaaaactagaaggcagaaatgaaatccacaagcagacagcccgggcgccacaccctgggactggtagttgaaaatcaatcccggacctaatcgggtatgttatctatagattacagacattgtatagaaaagcattgtgaaaatctcattcctgttttgttccaatctaattactggtgcgtgcagcccccagtcacgtacccacgtacctcctgcttgctcaatcgatcacgaccctctcacgcacacccccttagacttgtgagtccttaaaagggacaggaattgctcactcggggcgggggctcggctcttgagacaggagtcttgatgatgcctccggcctaataaaccccttccttctttaaa

SEQ ID NO: 89690 - DNA, 2347 bp, Homo sapiens
acggcaaatcatttcgcctagcttggcccgagcggcgcgggcctccggcctgaggcccggcgaggtgctggagggagcggggcgcggatccggcccagatgggcagctccgtccgcggggtcagggccgggtttcggtttcaccgcagcctcgcctgagcgggcgcctctgaagtggagggcgggccgcctgggccgcgggcctcgggaggatggtggcgccctggcgcgtctccgtcagggtttgcctgtcgcacctgaggtgcttcgagctcagacagggactcagcctcctgaggccctccgagtgccctcgcgatgccaggctctgctggcttctgctgggcactttgcccaaggtcgtctccctgtgcggggacgtgggtgagggggcccctgacgttctgggtcggcgaagggtccgctgcagcggggcggctggcgcggggcccgcggagagcctcccccgagcgggacctctgggcggcgtcttcctgcatctccgcctctggcttcgcgccggcgctctgttggtgaaattcttccccctcctactcctctaccccctcacctacctggctcccagcgtctccaccctctggctccacctgcttctgaaagccaccgagacctcaggcccaacctacatcaaactgggccagtgggccagcacccggcgcgatctgttttcggaggctttctgtgcccaattttccaagctgcatgtccgagtgacgccccacccgtggactcacactgagcgcttccttcggcaggcttttggggatgactgggggagcatcctctcttttgagaaccgggaacctgtgggctcaggctgcgtggcccaggtgtacaaagcatacgccaacactgccttcctggagactgacagcgtccagagacttggcagggcctcctgtctgccgcccttctcacatactggggcagtcggtgggctgagagagctctttggataccttggaaatggccggaaacctccagaaaatctcgcagaccagtcgtttctagaaaggctgctcctccctaaagctgacctggttggatcaaatgcaggggtgtctcgggctcaggtccctggccaccaacctgaggccaccaacctcatctccgtggcagtgaaagtgttgcaccctgggcctgctcgctcaggtgcatatggacctgctgctgatgaagattggcagccgagtcctgggagttttgccaggcatcaagtggcttagcttgcctgagattgtggaggaatttgagaagctgatggtccaacagattgacctgcgttacgaagctcagaatctagaacacttccaggtcaacttccggaatgtgaaagccgtcaagttccccacccctctgcgcccctttgtcaccagagaagtcttggtggaaacgtatgaagagagtgtgcctgtgtccagttaccagcaggcaggaattcccgtggacttgaaaaggaagattgcacggcctggggatcaacatgctcctgaagatgatatttgtggataactttgtccatgcagaccttcacccctggaaacatccctggttcagggtgccaacggctggtcctcgagtcaggaggcgcagctgcagcaggcggacatctgtgacactctggtggtggccgtgccatcttccctctgcccgctgcgactggtgctgctggatgctggcattgtggcggagctgcaggcccctgacctgaaggaatttcccgggcagttttccatggctgtggtgaatggggcagggcccaaaaagtggctgaagctgatccctgcatccatgcccggggccaagcgagtgcagggaccgtggaggggttcaaaaccgagatggccatgctggtgacccaggccaggaagaacaccatcaccctggagaagcttcatgtgtccagccttctctctagtgtctttaagttgctgatgactcacaaggtaaaatcacagtttatccctgcaccttcatagattatgttgctcgtcttagagaccaccaggcagcgaatggagtcaagcccttgcgctctccgagagtcctgccctgactacaggactagtttctcccattctttccttctcccaggataaagttcctcattcctgtcttttagtgagcagtatggtttaggtggacagagattcctttggtggcagtttttttcaaggaggtgatgttatttttttccttcccaggtcttgaggggacattcaaagcaggcagagaggggttgggatggctccagatggctgggagggagaacaccagctggtcacgcagcccctcgtgccagtgcgcatcaggtacagtgtggaggc

SEQ ID NO: 89691 - DNA, 2932 bp, Homo sapiens
agaaccacccgtccggccgcctcgagcgcggtcctagcgttcagcggactcgcgcggcctcgatctctggactcgtcacctgcccctccccctcccgccgccgtcacccaggaaaccggccgcaatcgccggccgacctgaagctggtttcatggcagcctcaaagaaggcagttttggggccattggtgggggcggtggaccagggcaccagttcgacgcgctttttggttttcaattcaaaaacagctgaactacttagtcatcatcaagtagaaataaaacaagagttcccaagagaaggatgggtggaacaggaccctaaggaaattctacattctgtctatgagtgtatagagaaaacatgtgagaaacttggacagctcaatattgatatttccaacataaaagctattggtgtcagcaaccagagggaaaccactgtagtctgggacaagataactggagagcctctctacaatgctgtggtgtggcttgatctaagaacccagtctaccgttgagagtcttagtaaaagaattccaggaaataataactttgtcaagtccaagacaggccttccacttagcacttacttcagtgcagtgaaacttcgttggctccttgacaatgtgagaaaagttcaaaaggccgttgaagaaaaacgagctctttttgggactattgattcatggcttatttggagtttgacaggaggagtcaatggaggtgtccactgtacagatgtaacaaatgcaagtaggactatgcttttcaacatgtcattctttggaatgggataaacaactctgcgaattttttggaattccaatggaaattcttccaaatgtccggagttcttctgagatctatggcctaatgaaaatctctcatagcgtgaaagctggggccttggaaggtgtgccaatatctgggtgtttaggggaccagtctgctgcattggtgggacaaatgtgcttccagattggccaagccaaaaatacgtatggaacaggatatttcttactatgtaatacatgccataagtgtgtattttctgatcatggccttctcaccacagtggcttacaaacttggcagagacaaaccagtatattatgctttggaaggttctgtagctatagctggtgctgttattcgctggctaagagacaatcttggaattataaagacctcagaagaaattgaaaaacttgctaaagaagtaggtacttcttatggctgctacttcgtcccagcattttcggggttatatgcaccttattgggagcccagcgcaagagggataatctgtggactcactcagttcaccaataaatgccatattgcttttgctgcattagaagctgtttgtttccaaactcgagagattttggatgccatgaatcgagactgtggaattccactcagtcatttgcaggtagatggaggaatgaccagcaacaaaattcttatgcagctacaagcagacattctgtatataccagtagtgaagccctcaatgcccgaaaccactgcactgggtgcggctatggcggcaggggctgcagaaggagtcggcgtatggagtctcgaacccgaaggatttgtctgcccgtcacgatggaagcggtttgaaacctccagattaatgccggagggaaagtgaaattccgttattctacatggaagaaagctgtgatgaagtcaatgggttgggttacaactcaatctccagaaagtggtattccataaaacctaccaactcatggattcccaagatgtgagctttttacataatgaaagaacccagcaattctgtctcttaatgcaatgacactattcatagactttgattttatttataagccacttgctgcatgaccctccaagtagacctgtggcttaaaataaagaaaatgcagcaaaaagaatgctatagaaatatttgggggttttttttttttttaaacatccacagttaaggttgggccagctacctttggggctgaccccctccattgccataacatcctgctccattccctctaagatgtaggaagaattcggatccttaccattggaatcttccatcgaacatactcaaacacttttggaccaggatttgagtctctgcatgacatatacttgattaaaaggttattactaacctgttaaaaatcagcagctctttgcttttaacagacaccctaaaagtcttcttttctacatagttgaagacagcaacatcttcactgaatgtttgaatagaaacctctactaaattattaaaatagacatttagtgttctcacagcttggatatttttctgaaaagttatttgccaaaactgaaatccttcagatgttttccatggtcccactaattataatgactttctgtctggatcttataggaaaagatactttcttttttcttccatctttcctttttatattttttactttgtatgtataacatacatgcctatatattttatacactgagggtagcccatttataaattaagagcacattatattcagaaggttctaacagggctggtcttaagtgaaccactgtgtatataaatatgttggaaaacagctgtatacatttttgggcaacggttatgcataatatttaccaggagaatttttttcttaacaagccaacatttaaaatttatgttttatgtcaataaaagaaaatatactttattgtgacttcaactatatttcttatcccttacatttttatttaattgtcttagcttaaaaaaagaagaaactgtggaatactacagtaaatattgttttcaaacacaagcaataattcaaatagttatttttcttttgaattaattttagacatattttggatcctattgaggggataagaggatgtcaaaaaagttaaatacctaagtagaaa

SEQ ID NO: 89692 - DNA, 3034 bp, Homo sapiens
  misc_feature (1)...(3034): n = a,t,c or g
gcgtcgactttttttttttttccattttgcacaaaaatgtatttctgtgacttcccaaagtacagacatttccccaggccccagggggtaaagcaatgaggtgtgaagtctgccagggtctggccggggccgctgagcgtgggaaggaagggagcgccgcatgcagcccatctgccaagctgggggaacacagggctgcgcccacttcccagggccgggagggagaggctccaggagaaaaaggccaggtgtctctcccaaagctgctcacccctgccgtcctgcctggaggcagaaatgctaggaacacctgaaaacaggcccgcgggaggaaaagcgtcggttgtgcaaaagtcccccatgtctcttcactccgtgggaggctccctcggaaggggcccgcccgctgggctgcttgagcatgcttcctccccgcctgtggtccagagcggtggcggccatggggacggaggcctctatctagacgtgtccatgttctcctctttaaagttactgcagtgctcaatcaccttgcgggccatttccttggtctcctgccgtgcggtcgccatcttaattatgtccctcagaaggggcatccccccttctttgatcagcagagggcagtacttgtccgggtagacagacacgaggttatacagggcccaggttgcccagtgctggctgacaggagagattccctggggaaggaggcggagaattggttcaaatgacctgtaattgatgtttctccgagagtttatgtcccagctctggatggcagcccacatgcgttcctccacctcctcacgctggggctcacagacgccccaggcctcgggtccatcaaacatgatgtgggagaggacgccgcaggcattgtaggaaacctcgatcccatcggccttgctctccaacaggttgctgaagacgctgatgaactgggaagtcattagttgaggcctcagctccttcacttttgccacattccccaaaagtcctagcatattcctatgcagttcctgcttctctgggaattccttcaggcagtccaggaagagcttcatgccgttgaaattgaggaacatctcgcagttgtcaggagtttcatctgtgatgttccacagggcactcccaggagaactccatgacctggtcacatgtcttgtccagcagcttcttctgagtcagcttcagcatggtcacgacaaagcccatcttgcccacggcctccttgtggtcgttgtctacctggcagaccagggcattgcacaggtgcacggcgatccgctggatagactcgtcctgccgcgtggggttgaggatgctgagcaggagctcgttgacccggcggtactggaattccagctcctcggggatgctgaagttgcagagcgtcaggcagcagttccgctgcaccgtcacctcctggtaggattccatgccattcagcaccacctggataacctgccggcgcagcttcacactctgctctgagcggtactcggaatttgttaggtagaagagagcggcgctgcctgtcacttgaatgttcctgtcatatttgtggcacttgagggccgtgatgaccagcttcagggcccgcagcagctggttgcaacgctcgatgcgggcgatgtcaaaaagcaagttgatggcccgcgaggtgatctcaggccggtgctccgtgtaggcctcaatggcattcagcacctgctcttcgtttttgtcaccacttactttgtaggctggaatgtgcgtgaggcggccacaaaaaattcctcaaaaaaccccaaggaaactggcagcggccctccttcaaaaccccggaaaggtatgatgctgcctcttggaaggctcgaatgctggtctgccccgcttccctcttcccaatcttggagatgctgcagttctctaggatcatgtggcccagagatgtccagggacattaggttccccagcttctgcacaaagaggctcagcacctcccgagtcagcttgaacttgtagtagctggagaggcggtctcgggagatgtccaggtgtcgcagcttgtgcagctgcacgatgaccccggatgtggtcgtcggacaggtccatgttgtagaaggacgagggacacccaggctgtctttccactgggtgaggaacggcggcgtcgctcgtctgaatgcctgagaggtccaaggcagccagggagttaagcggccgcagcagcggactccacagggacccaatcaatcatgcggcccaatttcagtgaagcggagggccttgaagcctccgaaggtgaaatccttaaccagcacctggcaggtggggttgacgaggtactcatcttcaaaagcccccctgggttctccttcctcaataanaaaatgtttgtaacagccgaaaaaggctcaaggaacacccagggtgtggctgaagctcctcagtgtctgcaggctcttggcggacagcttctcgcaagttagtcaggtacaagctcccaccagggtcctgcttgcngaatggcctccagggtcctgggtcctgcacccaggtccctcacggagtgtgggatccgccgtgaggcgggttgcttgcgggggtcccgaaaaagagggttgaagaagctcttcgtgtggctccgaagttacaggcagcgttcaccagctccacatactcattgacgagccggtcaccagatctcgctgggcaagaagatgtccggatgtagccgcagggtctccttgtccagcaggtagcccagggtgccatccaggttgcgcaagcagaagtcagtacagagggccatcagcgactcgggagtgtcggacgccatgctgggggcaagcaggtgggccactccaggacaaggatccccaggggcaacagtgattcctgaatactcacaggatcattggcagagccactgccttgcccttagggctgccggcggggctgaggctcctgggcccggcccctcccccgatccggctcctacggctcggagcctgcagccgccgccgcctccgctgtcaacaaaccc

SEQ ID NO: 89693 - DNA, 6772 bp, Homo sapiens; identical to SEQ ID NO: 61381

SEQ ID NO: 89694 - DNA, 665 bp, Homo sapiens
ttttttttttttctttggagaaaagcttaaaactttattaagatattttaaagtaaaatatctaatataaaaacagtttgtgttgtttcagcttatcttcctttaaacctgtgatttcccttcacctgcttctggcattttaaagtgctctgcttttggtagaatcttccccttgacatcagtacccaccttcacaacccatcccccagtctttggtctgaccatagctccctggaaaatcggcttcccaggttcaggccacttgaaatctcaagctgcaaccctgaatcatcttctctcttctgatcaggtgtaggattccgacttttagtgggtggtttctcttctttaggctcttcatcagtgggttcaagcatagccccaatcagctcaggaggctgtaaacttcttcttggcctaggcctatatgttgatcttcctcgccaactcatatttcactatttcagttcctgggaggactggcctgcggacctataggctgcgtctcagtaggagagaaagagtccagacggctggaacgtgcccctcacactctcacagctccccagcggtcaccacgtgggcaaaggggtcgaagggaagatgcccagtgaacatgcacactgaggcaggtgtccaaggaacatgcacactgaagtcggtgc

SEQ ID NO: 89695 - DNA, 383 bp, Homo sapiens
aaattaattgggttacaaatccagtatatgtaatctgacctccttcttcctatttggttttaatgcataggaaaacctttctgtgattttgaataatgaccattttggtttttatattagccgatgcaactagatatttaagacttctctcagttctttcatgtaattaaatgtaagaatttaggtaatattctttatgttatgaagagaaacatatgcattgcttgcatctcagagagaccttatgtgcctgtgcctattaagcccagacggtagattggtaaacaaaacaaatatggtccttgcccttatggagaatacttttcacaaatacgttgtcttagttcattttgtggtgctttaacacaatgtcacagactggg

SEQ ID NO: 89696 - DNA, 786 bp, Homo sapiens
ctcctcagttctgcaattactaacgtttccacaagatagtaatctttttaaatcttgtaaaatttaaacagtgcctgaaatgcctccttgtgtttatttgtttatatgtctgtatccccatgcagttgcttgtggatagacaatgcacctcttggcctttgcatagcacagtgtctagaaatagtgtccttacaaatatgaatgtatgtggaatgaaaatgtgctctcagagatttatatgcagttgctgttttgtagcttgttagtaaccccagttttactaccttatctttctttggttatttgcataatttttcaattctttttttgttaaggtgaaatgcataaaacataaaattaactcattaagtaaatacacctattcacaatgttatgcaaccactacctctgtttccaaaacgtttttcatcaccccaaaaagctgtacccattgagcggatgctcctcagtcctgcaaaccttccacccaccctcctgcctcagcctttggcaaccaccaatctgagttctgtttctgtagatttatttattctgaatatttcggggaagtggaatcacacaatatgggtgatcttttggggctgatccttatgcttttcaagctttatcaaccattgtagccttggattaaaggcttcttccttttttaatgggggagtagcattcttatgggttgcacaccacttgtaacccattcttttccctggagggacatcttcacccccttttctaatttttttggagatttggagcccttgaaccccc

SEQ ID NO: 89697 - DNA, 465 bp, Homo sapiens
aattgattctaatttgatgaaagctgtattgatatgtagggtttttggggggtagtcgtggtgatgggtagaaatagtaaagctgacagtgacagtattttcttagttatggagaacattttaatactttatttcattgtttttagtttgaactaattaattgttggtggttctatatggaaataatgatgtaggtgggtgttcatcacttaaaatcaactgcataagataatggcataacttaattactgtaacagcaaaaatgaaatctgagaaacttctgaaatttagtcttttttaatttgagataagatttatttggagataagatttcagacttccttttatcagacaggtggttttataggaagattaagattcttctagaaaaatcttaaagacaagggaaataagtttttcttacactctagcctgcatgacagagactctgtctcaaaaaaaaaa

SEQ ID NO: 89698 - DNA, 689 bp, Homo sapiens
aatagcaacaaatattttaaaaatacagcaatgagctggcaagaaaataaggaatactttggcagaatgtaaaagaggtagcagaatgccaaagtctgacctttgccttgagggtatttgacaaaccaggtgaaactgaacattgttttttggggttctcgatgcctgggctcaagacaaaccaaaacctttgcaaaatgagggccctaatagaactctccgtaaagctggggccccaaagggtgacaccctctgtgaactaatagcaaatctgccctcctggcatcccatacaaaagttaaaccttgccacttactggactgaaaaaaaggtcttccttgagaactgagccaaccttcatgtgggtttttgtacatgagaatccaagaatttaagtggtcccactggtcccagaatgttggaagtctcaaacacttgatagaagaaaatgtagatcctacctggacaaagctttattcatatcagctctcaaagaattctccctgataaagtttcaagacatatgagaatcttagggcctactcagtgaccctggatggacaatgaccctcaaggatcatccccaaacatgacctgggccacttcatgatgtactgcctcaccgctgctgagtatgatgggcacagcacctgtccctccccacagtgcgactaggagtctggccccat

SEQ ID NO: 89699 - DNA, 737 bp, Homo sapiens
gcaaaaagtattttaaaattagggtatgtacatttttgtttttagacataatgctgttgctcacttaataggttacagtgtagtgtaaacatatcttttgtgtgcactgggaagaacaacttatgtgccttaaccttactgtgatatctgctttattcgtggtggtctggaaccaaagttgcagtagctccaaggtatgcctatacagtgaaaaataatctctgattgtttacctcacaactctccttattcaaaagcagtatcaatttcctgtggtttgtattctttcttaacacattttaaacatatggtagtgttttcatacgatttattggtctttagcatggattttagaacataaggttttcgtgaatagtctaggggatataaagcaccagtgaataataacattccaggaatcaagtgtcccttctgcatgggatgacaagaatcattaatgctttctggggaaaataatggagtttcctatgggaaaaatgtgtagagagataatattgaaagagatgggaaattcagaacagagttcagggagattaaggcagctggaatatgcagaaccagtaataaagaggaaaaagagaatgccaggtgcagcggctcacacctgtaatccaagctactttgggaggcacaggccagcagattgtttgaggccaggagtttaagaccagcctgagcaacaaagttagatgccctcactaccgccaaaaaaaaaa

SEQ ID NO: 89700 - DNA, 2212 bp, Homo sapiens
  misc_feature (1)...(2212): n = a,t,c or g
tgcggccgctgggctcaggctgtccgctctgggctctgcggcctcggccccgctgcactccacctccgccccctcggactccctcccctctgcttctactcctcctgctccagtgcggatcgtttcgcaactgcttgccactcgtccccgtgccttggctgttttcccaatttcccggcccccatnattcttgagtacttttaccccctgcatttggggacagggactggaaaaggggcgggtggagcgtccagtggagaagaaggaagcgaggcccgcatgaaggaggaggatcggcggactgtggggaggagaccccacgccaccctttctggtcatctcccctcccgccccgcccctgcgcacactccctcgcgggcgagctactttcggaccaggaaagtaagagcggccctgggtgacagcgccgcggggccagtcccggggttagccgcgcgtctgctcgcttctggtccgtcgcgctcccagccagggcacagcccggaccgaggatggcttcgaccacaacctgcaccaggttcacggacgagtatcagcttttcgaggagcttggaaagggggcattctcagtggtgagaagatgtatgaaaattcctactggacaagaatatgctgccaaaattatcaacaccaaaaagctttctgctagggatcatcagaaactagaaagagaagctagaatctgccgtcttttgaagcaccctaatattgtgcgacttcatgatagcatatcagaagagggctttcactacttggtgtttgatttagttactggaggtgaactgtttgaagacatagtggcaagagaatactacagtgaagctgatgccagtcattgtatacagcagattctagaaagtgttaatcattgtcacctaaatggcatagttcacagggacctgaagcctgagaatttgcttttagctagcaaatccaagggagcagctgtgaaattggcagactttggcttagccatagaagttcaaggggaccagcaggcgtggtttggttttgctggcacacctggatatctttctccagaagttttacgtaaagatccttatggaaagccagtggatatgtgggcatgtggtgtcattctctatattctacttgtggggtatccacccttctgggatgaagaccaacacagactctatcagcagatcaaggctggagcttatgattttccatcaccagaatgggacacggtgactcctgaagccaaagacctcatcaataaaatgcttactatcaaccctgccaaacgcatcacagcctcagaggcactgaagcacccatggatctgtcaacgttctactgttgcttccatgatgcacagacaggagactgtagactgcttgaagaaatttaatgctagaagaaaactaaagggtgccatcttgacaactatgctggctacaaggaatttctcagcagccaagagtttgttgaagaaaccagatggagtaaaggagtcaactgagagttcaaatacaacaattgaggatgaagatgtgaaagcacgaaagcaagagattatcaaagtcactgaagcacctggtcagaggctatcagcaatgggaacttgagagcctacacagaagatctgtgacccaggccttactgcttttgaaacctgagagctttgggtaatttagtggaagggatggatgttcaccggattctactttgaaaatgctttgtccaagagcaataaaccgaatccacactattatcctaaaccctcatgtacaatcctggtaggggatgatgccgcctgcatagcatatattaggctcacacagtacatggatggcagtggaatgccaaagacaatgcagtcagaagagactcgtgtgtggcaccgccgggatggaaagtggcagaatgttcattttcatcgctcggggtcaccaacagtacccatcaactaaatttcaacagtgccacttctgcattctctgttctcaaggcacctggatggtgaccctgggccgtcctctcctcctcttcatgcatgtttctgagtgcatgaagttgtgaaggtcctacatgtaatgcatatgtgatgcatcatcttatcatatattccttcctatacattgtttacacttcaactacggggatgttccacacaaacttaaattactaatggcccaacaatagggggagattagacaaaaaaaaa

SEQ ID NO: 89701 - DNA, 135 bp, Homo sapiens
ttcttattttatattttcttgcatttaccagattgggttttgcactactggtttcaaagttaaaataatctattcctattttcttagcagttacccataaaacgcaaactggaccaatccatagcaaaaaaaaaa

SEQ ID NO: 89702 - DNA, 1376 bp, Homo sapiens
tttcgtcggagccccgggtccccacgacctgagccggctctcccatcagcggcctgaggacctggcgtccgcctcctccctccccttgaggctggagcgtggacgcggtgggggagggtggggcgggggcagctttcgagaattacgaggacaggaggcagaggccctccccatccgcattattggaggagagagagcctccccctccacccaggacgacatgaacgaccgaggccagggagtcctctccttgggcctctgcatccccccatccttggctctggggtaggcccagggaggagacacccccaacccctatccggtctgtcctggagaaaagagactgcccttccatgcccctgagtgaggggcctggggcccaggctgcctgtgttccccaagggcaagggtctctctgttgaggaggggggcctgtcagccacaacttctttcctcctgagcgccccatctccctctctgcaccctgcaattcccacccctccgtatttatttccctggtcccgccgacagtccctccttgtctgtctccgggattcaggcctccctccctgacatggagagtaacctgtctggcctgggtgcctgctgccgggctggtgcctgcgctgccacctgctgtgaccctggggctgacagctgcctacaccaccctgtatggccctgctctttctttttccgtctatggcccagctctgggtgggtggtttctgtatgggggcacaagcgtcttaggttattaggacggtgttccggggccctctgtctgcttctggggcccccttgcgtaacaacctttttctccttctaatttccgaagatactccccgcgccaaacaaccctggggccctttgcccttctggcttctctactgctgccccgtctgcctgcagttcttcaccttgacgccttatgaacctctactttgccccaggtggtgttcaaggccaaagtgaagcgtcgggcccgaagatgagccgaggcttgctcgctgtccgaggggcctttgtgggggcctcgctgctctttctgctggtgaacgtgctgtgtgctgtgctctcccatgcggcgcggcggcacagccctgggccctgctgcttgtccgcgtcctggtgagcgactccctgttcgtcatctgcgcgctgtctcttgctgcctgcctcttcctttgtcgccaggcgggcgccctccactagcatctacctggaggccaaggtagggctgcagcactgatgcccaggtgtcttttgggtctctcggcagcggttctcagggtgtagaggaagctgggagccttctctccctgagggtcctctgttgttacctgtgccaggggacctgtgtgtccaggcggccc

SEQ ID NO: 89703 - DNA, 413 bp, Homo sapiens
aggggcccctacagtctggggtgggctcccagatgctactatatccatggccacaagggagtgtgggatctgtatgtccctagagcaacttgggccaggccggccaccttcttctgtctgagggttatgattgtaacagcagcagtgatgacagtgactccgagctactgtctgaccccctgcccccagaacgtcaaaggggaccgggtggtctgctgggtccgttccatcctcagggcccaggacagcccctggcctgccagggggacacagaaagccctccttgagtgaccgagtgagtgaactggccttccttgtcctcaggtccagctgggagctccccgacctccaggagggcaagatccaagccatcagcgactcggacggggtgaactacccctggtacggcaaca

SEQ ID NO: 89704 - DNA, 3297 bp, Homo sapiens
agcagtgacaccatgtgaccggcacggctcactgacacgcagctttggttaaagagcgggcgcacaggaggggaggagaccgcgcgcgggacggggaggaatggcctgtccgcgttaaaccatcacaagccatggttgcggaagggccacgcgtcccccagtaggagaatgactccgattcgtgaccctcagcgccggtgcatgtcgatatatttattgagtgtctactgtgtgccaggcactatatctatgtgcatagaaaaaccctggaaggccatacaacaatatatatagagtgatcgtctctgcttgctgagctaacaggggtgtcaagcttccattttggtatctacttctaaatacactcagaacaggagaaatttggactaattttcaaactacagacactttctaatcatgatgcatttcaaaagtggactcgaattaactgagttgcaaaacatgacagtgcccgaggatgataacattagcaatgactccaatgatttcaccgaagtagaaaatggtcagataaatagcaagtttatttctgatcgtgaaagtagaagaagtctcacaaacagccatttggaaaaaaagaagtgtgatgagtatattccaggtacaacctccttaggcatgtctgtttttaacctaagcaacgccattatgggcagtgggattttgggactcgcctttgccctggaaacactggaatcctactttttctggtacttttgacttcagtgacattgctgtctatatattcaataaacctcctattgatctgttcaaaagaaacaggctgcatggtgtatgaaaagctgggggaacaagtctttggcaccacagggaaagttcgtaatctttggagccacctctctacagaacactggagcaatgctgagctacctcttcatcgtaaaaaatgaactaccctctgccataaagtttctaatgggaaaggaagagacattttcagcctggtacgtggatggccgcgttctggtggtgatagttacctttggcataattctccctctgtgtctcttgaagaacttagggtatcttggctatactagtggattttccttgagctgtatggtttttttcctaattgtggttatttacaagaaatttcaaattccctgcattgttccagagctaaattcaacaataagtgctaattcaacaaatgctgacacgtgtacgccaaaatatgttaccttcaattcaaagaccgtgtatgctttacccaccattgcatttgcatttgtttgccacccgtcagtcctgccaatttacagtgagcttaaagaccgatcacagaaaaaaatgcagatggtttcaaacatctcctttttcgccatgtttgttatgtacttcttgactgccatttttggctacttgacattctatgacaacgtgcagtccgacctccttcacaaatatcagagtaaagatgacattctcatcctgacagtgcggctggctgtcattgttgctgtgatcctcacagtgccggtgttatttttcacggttcgttcatctttatttgaactggctaagaaaacaaagtttaatttatgtcgtcataccgtggttacctgcatactcttggttgttatcaacttgttggtgatcttcataccctccatgaaggatatttttggagtcgtaggagttacatctgctaacatgcttattttcattcttccttcatctctttatttaaaaatcacagaccaggatggagataaaggaactcaaagaatttgggctgcccttttcttgggcctgggggtgttgttctccttggtcagcattcccttggtcatctatgactgggcctgctcatcgagtagtgacgaaggccactgaaacccgccgagaaaaagaaacatccctgttgtctgctcagtcaagtccccacacatcagcaatctctcaccacttcttttgcaagtttacagaagcaaacagaaatgtacaggatacttaaaatggaataactttttggttgcaaaacagagacatggttctataatgcttcatgtccctccaagatttgagatcaatttagggattgtgaattttttttttcaaatttcatacaatcatatttcccagtacttttcacaatcattttttacccatctaactctatgttttgtggcttcccggtctcttagaactttgaaaacatgatatacaataatgtttatttattatacatccagattctgaaataattttcctactgatgttcagctcacactatctgtacctttttagaagagaaaagaatcttgaattgtatatatttattttgctttacagaaaaaaatggtttcgtaaataatttgcctattttggttaacatagcacatggagataatcatctgaaagttatagggcactgccactgctgaatcagagcatgcccaatatttgaggtggctctgatttcctggcagctgaactcgggtagtccagtggcctagctggtaccacatctattcccatccagagacattctctggcaagtgttctcagctgaaaagtggttggggatgattcttaccttggtaattaaatgaagctacacatttgggtaatctagcaaatgaagtattttttccctcttggcaacttgtgtcagagttactctggtctgagtcaactttcgctggggaaaacctatggaacctactgcaaaaagattgtccaaaatgcctaagaaaatactcctctgatgcatttagccttcaaccctacctgtcttgctgaagggagaaaaatgttttagtacattataggcccagcagcttttattcatgtccaccagctagttgcacagagaatcatgtgtacctaactaaggatgatctaggataagtaactcctgttttatattgagtattttagggaagtctttaaaagacttgttttatatctataaatctaggttattacaaatacaagaattttgtaccttaaataagcctcatttctatttcttcttcattaattctccatctagtcttgtgaaaaaaaaaacaaaaaaaccctcaaagatagtctttgtgaagagcttctgacagaatcactgagtaccttccttcccccagatgaggaagacaagggggtctcagggtctgtgctgactcctcttctcttccccaaccaaggactgtgccattactgcccgtctcaactgtccatgcaggaggacagagttgcctggtactcttacccttgtccctctcctaaagggagcacaaggaaactgaagag

SEQ ID NO: 89705 - DNA, 1678 bp, Homo sapiens
tccagcgccccgcaccggggccgttagtcagcagaacgcgagctcttgtggaggagcagggccggcgcgaggcgagactcgggagcgtgagcggggcccctggggcgccgccgtccttcttcgccccggcgccgggggctagtagccatggtccccgctcctctgtcgggccagtctgcaggcggagagagtcggacggcgcccggagcgcggatctcgccttgtggaggacagcgcgtcggctgcggttctctctcgaccccttctgcccggcgcttcggcccgggccgctcaggtgcagagcatgaataatctttcatttagtgagctatgttgcctcttctgctgtccaccttgtccagggaagattgcttcaaaattagcgtttttgccacctgatccaacttacacactgatgtgtgatgaaagcggaagccgttggactttacatctgtctgaacgagcagactggcagtattcttctagagaaaaagatgctattgagtgtttcatgactagaaccagtaaaggcaacagaattgcttgtatgtttgtacgttgttcacccaatgcgaaatacactttactcttctcacatggaaatgctgtatgatcttggacaaatgagcagcttttacataggactaggatcacggattaattgtaatatattctcatatgattattctggatatggtgccagttccgggaaacccacagagaagaacctctatgcagacattgaagctgcttggcttgctcttaggacaagatatggcattcgccctgaaaaagtggattaaatatggccaaagtataggggcagtacccgtctgtggatcttgctgctcgatatgagagtgctggcggtaattcttcaatcccctctgacttcggggatgcgagttgcctttcctggataccaaggaagacctactgtcttgcatgcattcccaaacattggacaaaatctcttaaggataacctcttccagttatttaattaatttcatggggacttgaaggatgaagtcctttggactttttcacatgggcctcgcatttgtttggaacgttggcccaaagacctgtggagcctctctgggttgaaggagcaggtcacaatgatgtggaactttatggacagtatcttgaaaggttgaaacagtttgtgtcacaggaactggtaaatttgtaaaatattctgtaaatttgctactgggttttcctttcttgctgaactgcactctttggtaaataacataaaacctgaaggttttgtttgcaaatcatgtcagttgccttcataaatgtacaggtaatgatttgttaacagacttaatgaaggttttaattaccagaactaaaaactggaaataacagtaccgtgcagtcaggctgtgtaatttatattttttctgtgaatttttttttaacatcaagatgagtactgtatgagattttgattctataaaatcaaatgctgtaaaagtattgccaaatgcttttgcatactagagacagatttataaatatttttgagacatctcaatatattagatcttatcctggaatacaactgtgcatattttgagagaagctatgtatctgcaggcactttcagtactcataatggaatgaactctaaaagcagatttgacaccatgcgagttcactag

SEQ ID NO: 89706 - DNA, 2568 bp, Homo sapiens; identical to SEQ ID NO: 61622

SEQ ID NO: 89707 - DNA, 3194 bp, Homo sapiens
ggaatccatctccttttttgtggaggctgtgaagccccatggctagtcttgccccaggcctacctgtgggctgccctatgagccgcctgcagcattgctcaccttctcagcagtctggcatctcattgaaagaaaggaatgatggtccttaagaactccacttccgaagactgtccctccatagttagagcaaattcattcccttgctgggttgctgggctctggcactgcgctggccctcgttggaggtctgcagaagtgcacagaaagtgtgggcaatggactggccatttccacagttttggaaacttttaaaaatccatattcttgctgggattacagatgtgagccatcgtgcccagcccacccactttgttaatcatgatcagagcaggggtgccattctaccaccttggcacacctgcctagaggagtgagtggcgctgggagcagactgaggaacatcttagctgagcagtgaatccagcactgttctaaggaagctcagatggtctgtgactcatccctgtcctctggactgaatctgaggccttggaactcacccagggtcttagtggaggcacagctctgagctatgggtgaagagcatctgaacccatctacacattgaccaaacacaggcaggttccagtctgcgggggagatggagaaggtgccaccatgctgctgcacaaatcccaggatagctggggaatgagaatccagcactttgggcctaggacctggaaggagaggtcttttgggagaggtatggggacatctgaaggaggacttcttggaaggggaggggctggagcagaggcaagagtgattttgtcagatggagagaaggttctccacatgggcggggctggcagaggcagatgcccagacaggtcacaactctctaggtgcccaattacctgccctcggtgagctcagccatcggcggggaggtgccccagcgctacgtgtggcgtttctgcatcggcctgcactcggcgcctcgcttcttggtggccttcgcctactggaaccactacctcagctgcacctccccgtgttcctgctatcgcccgctctgccgcctcaacttcggcctcaatgtcgtggagaacctcgcgttgctagtgctcacttatgtctcctcctccgaggacttcagtgggtgcctggatgagggaggagtggggaagtgttccctgaggggacgggcctgcccctaccacattcggaccttcctacttcgtggtgtgggcactccctgcaatgtggctcccaatcctctttccctccagccatccacgaaaatgctttcattgtgttcattgcctcatccctcgggcacatgctcctcacctgcattctctggcggttgaccaagaagcacacagtaagtcaggaggtacggtctatccctagcgggggctccaaggcagcccagaagaaaatcaaggacatctgtcctcaggattcgggtaatggtgaggtgggaactgagttctaatgggaaccctggcagaggggtgctggggttggggctggggcttgggaacaaactgagggtggttggtcagaatctaggactatagcactgtgtttgggtagtgtgggagactggagaatagaagagatggaggctgcaaatggggatagaatgaggagtcgcatctaggcggcagtgagttaggaacagtgtcagaggactggtctgtcataattccagcgccccacccatgtacatgggtttcttttcccccacagtatttggaggtggggttggtgggtgactccatgtaactttcatactccatccccctgaagtggaagcggcaggaataccactgctcctcggcccatcactcccccagaggcagggacgtgaacacatagtcgtcattcttgctgcccctgcctgtgctcccttccatgaccgctagtgggagccaagggagataaggcccagcccttaggagttagggctgagaggggagcccacgctctcatacccagcaagctgcagagtgatcagacagcccattccctaggatcgcaagtcctacagctggaaacagcggctcttcatcatcaacttcatctccttcttctcggcgctggctgtctactttcggcacaacatgtattgtgaggctggagtgtacaccatctttgccatcctggagtacactgttgtcttaaccaacatggcgttccacatgacggcctggtgggacttcgggaacaaggagctgctcataacctctcagcctgaggaaaagcgattctgaacccttcagtcctgcttgggaggacgcagcccactgcccagaaacaagaaacacgataccattctggccttccccaccccacatcctctcttggccttactgaagatgggggaagggtaagaaggaagggtgtaggccaaggctcaccccagtgctgctggcttctcctctccacccctcatatgggcgtggggtcctcaaacatcacctttacctgagaggccccaagaagctgagctggcagagagctccaccatttggtgctaaaaaaaaaaaacgtcctgaggttcatgaccaccatccagtttctggcctttacacagtcacctttcactgaggtcaggagcccctgagcaggggctgctccctgacaaccacagccatttttttgcacgggggtcattcataggactaatgtatttcatgatctactgtgcacatccaggcctgtggccacagtcccctgctaaagttgctcaggtgttctagtcctgacttcacctttttgatttggtgtgtgccctagggtatgtacccttccccatctgagcctcggtgtgtccatgtgtctggcgggggatgggtggactgtatgatttccaaggactctaccagtcagtggttctgatgtcatcgggtggaggtggtgttctatacctaaaggatgacctgctccagaaacagcaccagcacagcatgtattttcttctcttctgaaagttctggcttgtagacccctcccttcctttgcaaaggtatgggatagaggggtcagatgcagatctctactgtaaaatgggctccctggtatctcctgtcttccctactgctccaaaccctaaattttggttgtacattttatttgaaaggaaaataaattttttttttgggccaacaaaaaaaaaa

SEQ ID NO: 89708 - DNA, 874 bp, Homo sapiens
ttttttttttttcaaagaatcaactttattgaacattcagggtcagtttctcttcttgctcttgcctgtgaccttggctggtgtgaggactggagctgctgcctggtacagggtggaggagatcttgttgatgtagtacagaccaaccatggagaagatgaagcaggtggtgacacagactcggtggatgaggccagatgcaaagagagccaacaggaggcacaggagaatctcagggaagatctttgcttggaatcctttgccaaagacaagattctccagattattgaaggcagtgagcgagaacacgaagagacccgaaccaagcaggccgccctggatggtgagccactcggtggaggccagctgacggctgtacatctgcatcccagcaaagagcagcagggacaggagggaggagagcgccagcgaggtgcccgtacccaccactggaggggatgggagaagggacggagagtcaggctccgccctccctccggcaagctacgggcagatcagccggtccggaagctcggtgggccgaccccctccaagaactcccgggactgcagccacacgccccaactccccacaccgcgcggcaacccctacgtattccccagccccggacaccccgaaccctcccgtccggtggaaatgcccgctcccggtggaacccaggacacgtcagctctgtcgggagaggacgaggaaagcttgtccacccaaaccccgaccccctctaggacttcctggggaccccaccggtcctgttacccatcatgccccgcccgtgagtccaaccggcgcctctggccaagaaaggcgagctgaaccgggtgcggttagctatgcgcatgcgtcagcgacgaaa

SEQ ID NO: 89709 - DNA, 3776 bp, Homo sapiens; identical to SEQ ID NO: 60907

SEQ ID NO: 89710 - DNA, 6058 bp, Homo sapiens
tttcgtcggcttccccacgggaggacgcgaggccccggcccagccatggccccctggcgcaaagctgacaaggagcggcacggcgtggccatatacaacttccaaggcagcggagccccccagctctccctgcagatcggcgatgtggtgcgaatacaggagacgtgtggagactggtataggggatacctcataaagcacaaaatgttacagggcatttttcctaagtcatttatccacatcaaggaagtgacagttgagaaaagaagaaatactgagaacatcattcctgcagaaattcctctggcacaagaagtgacaacgacactttgggaatggggaagcatctggaaacaactctatgtggccagcaaaaaggagcgttttctccaggtgcagtccatgatgtacgatctgatggagtggaggtcccagcttctctcaggaaccttacccaaggatgagctgaaggaactgaagcagaaagtcacgtccaaaattgactatggcaacaaaatccttgagcttgatttgattgtcagagatgaagacggaaatatcttggaccctgataataccagtgtcatcagcttgttccatgcacatgaggaagcaactgataaaatcacagagcgtatcaaagaagaaatgtcaaaagaccagccagattatgcaatgtattcccggatctcctcatcccccacccatagcctctatgtgtttgtgagaaactttgtgtgcagaattggggaagatgctgagctcttcatgtctctctacgaccccaacaagcaaacggtcataagtgagaactacctagtgcgatggggcagccggggcttccctaaggagattgagatgctcaacaatctgaaggtggtcttcacggatcttggaaacaaagacctcaacagggataaaatttacttgatttgtcaaatagtccgggtcggcaagatggatcttaaggatactggtgcaaagaagtgcacgcagggactgaggaggccctttggggtggcagttatggatataacagacatcatcaaggggaaagcagagagtgatgaagaaaagcagcacttcattccttttcacccggttacagctgagaatgacttcctacacagcctgctgggcaaagtcatagcctccaagggggacagtggagggcaaggcctctgggtgaccatgaagatgctggtgggtgacatcattcagattcgcaaggactatccacacctggtggacaggaccaccgtggtggccaggaagctgggattcccagagatcatcatgccaggggatgtcaggaacgacatctacattactctcttacaaggtgactttgacaagtacaacaagaccacacagaggaatgtggaagtcatcatgtgtgtgtgcgcggaggatggcaaaacgctgcctaatgcaatttgcgtgggagcaggggacaagcccatgaatgagtatcgctccgttgtgtactatcaagtcaaacagccacgctggatggaaacagtcaaggtggctgtccctattgaagacatgcagaggatccatctgcgattcatgtttcgacatcggtcatctctggaatctaaagataaaggagaaaagaactttgccatgtcctatgtgaagctgatgaaagaagatgggactactctacacgatggattccatgacttagttgtcctcaagggggacagcaagaagatggaggatgccagcgcatacctgacccttccttcttatcgacaccatgtggaaaacaagggggccacgctgagcaggagctccagcagtgttggggggctttctgtcagctcccgggatgtgttctccatttccaccctggtgtgctccacaaagctcactcagaatgtgggcttgctgggtttgctgaagtggcgtatgaagcctcatctgctacaggagaatttagaaaagttgaagattgtggatggagaggaagtggtgaagtttctccaggatactctggatgccctcttcaacatcatgatggagcattctcaaagtgatgaatatgacatcctcgtctttgatgccttgatttacataataggactcattgcagaccggaaatttcagcatttcaacaccgttctggaggcttacatccaacagcatttcagtgcgaccttggcttacaagaaattgatgacagtgctgaagacttacttggatacctccagcagaggggagcaatgtgagccaatcctaagaacgctgaaggctttggaatatgtgttcaagttcattgttcggtcgaggacattattttcacagctttatgaaggcaaagaacagatggagtttgaagaatccatgagacggctctttgaatccatcaacaatctgatgaaaagtcaatacaaaactaccatccttttgcaggtggcggctttgaaatacatcccatctgtcctgcatgatgtagaaatggtctttgatgcgaagttactcagccaactcctgtatgagttctacacctgcatccctcctgtgaaactccagaagcagaaagtacagtctatgaatgagatagtccagagcaacctctttaaaaagcaagaatgccgggacattctgcttcctgtcatcaccaaagagctgaaggagctgctggagcagaaggatgacatgcaacaccaggtcctggagaggaagtactgcgttgaattgctcaacagcatcttggaagtccttagctaccaggatgcggccttcacctaccaccatatccaagagatcatggtccagctgctgcggacagtgaaccggacagtcatcaccatgggccgggatcacattctgattagtcactttgtggcatgtatgacagccatcttaaaccagatgggtgaccagcactactccttctacattgagaccttccagaccagctctgaacttgtggacttcttgatggagaccttcatcatgttcaaggacctcattggaaagaacgtgtaccctggagactggatggccatgagcatggttcaaaacagggtcttcctgagagctatcaacaagtttgcagaaaccatgaaccagaagttcctagaacacacgaactttgagttccagctgtggaacaactattttcatctggcagtggcttttatcacccaggattctctgcagctggagcagttctcacacgccaaatacaacaaaatcctgaataagtatggggacatgagacggctaattggcttctccatccgtgatatgtggtacaagcttggtcagaacaaaatctgcttcatcccaggcatggtaggacctatattagagatgacacttatccctgaggctgagctccggaaagccaccataccaatcttcttcgacatgatgctgtgtgaatatcaaagaagtggggatttcaaaaagtttgaaaacgaaatcatcctgaagctggaccacgaggtagaagggggccgaggcgacgagcagtacatgcagctcctggagtcaatcctgatggaatgtgctgcagagcacccaaccattgccaagtcggtggagaacttcgtgaacctggtcaaaggcctcctggagaagctgctggattaccggggtgtgatgacagatgagagcaaagacaaccgcatgagctgcactgtgaacctgctgaatttctacaaagataacaacagggaggagatgtacataaggtacctgtacaaactccgcgatcttcacctggactgtgacaattacacagaggctgcctacacgctccttctccacacctggcttctcaagtggtcggatgagcagtgtgcatcacaggtcatgcagacaggccagcagcacccccagacacaccggcagctgaaggagacgctctacgagaccatcataggctactttgacaaaggaaagatgtgggaagaggccataagtctgtgcaaggagctggcggaacagtacgagatggagatctttgactatgagctgctcagccagaacctgatccagcaggcaaaattctatgaaagcatcatgaaaatcctcaggcccaaaccagactactttgctgttggatactacggccagggattcccctccttcctgcggaacaaagtgttcatctaccgcgggaaggaatatgagcgaagagaagatttccagatgcagctgatgacccagttccccaatgcagagaagatgaacaccacctctgccccgggagatgatgtgaagaatgccccaggccagtatatccagtgcttcactgtccagcctgtcttggatgaacatcccaggttcaagaataagccagtgcctgaccagattataaacttctacaaatccaactacgtgcaaaggttccactactcccggcccgtgcgcagggggaccgtagacccagagaatgagtttgcttccatgtggattgagagaacctccttcgtgactgcatacaagctgccggggatcctgcgctggtttgaggtggtgcacatgtcgcagaccacaattagtcctctggagaatgccatagaaaccatgtccacggccaatgagaagatcctgatgatgataaaccagtaccagagtgatgagaccctccccatcaacccactctccatgctcctgaacgggattgtggaccctgctgtcatgggaggcttcgccaagtatgagaaggccttcttcactgaagagtatgtcagggaccaccctgaggaccaggacaagctgacccacctcaaggacctgattgcatggcagatccccttcttgggagctgggattaagatccatgagaaaagggtgtcagataacttgcgacccttccatgaccggatggaggaatgtttcaagaacctgaaaatgaaggtggagaaggagtacggtgtccgagagatgcctgactttgacgacaggagagtgggccgtcccaggtctatgctgcgctcatacagacagatgtccatcatctctctggcttccatgaattctgactgcagcacccccagcaagcctacctcagagagctttgacctggaattagcatcacccaagacgccgagagtggagcaggaggaaccgatctccccggggagcaccctgcctgaggtcaagctgcggaggtccaagaagaggacaaagagaagcagcgtagtttttgcggatgagaaagcagctgcagagtcggacctgaagcggctttccaggaagcatgagttcatgagtgacaccaacctctcggagcatgcggccatccccctcaagggcgtctgtcctctctcaaatgagctttgccagccagtccatgcctaccatcccagccctggcgctctcagtggcaggcatccctgggttggatgaggccaacacatctccccgcctcagccagaccttcctccaactctcagatggtgacaagaagacactcacacggaagaaggtcaatcagttcttcaagacaatgctggccagcaaatcggctgaagaaggcaaacagatcccagactcgctgtccacggacctgtgagctgctgctgactagggctgcatgggagagccagggaggggagtttctggaagaggaaagccatgcgtggaacatcgaagcctcagagagtgggagactgtccccatcagttgtccttacttagaggagacagagaggccaatcaggtcccagagcttgaatgctaacaagcccagcatcccctggggctgtgatcatggtggatgaggaagcctcaacgtagattcctgaactcaaggtaccagcaagaatgccttctcccagtgtgctctccccaacatcctaggcacagctttcataacccagtttcttaggtgtaagaaactgcttttatctcatttattaagtctcagaacttaacagaaaaggaagccttttaaatattctttttaattttattttagattaacagttttgtactttacatttttttatacaaccaaccagtttcttttctagccaatcatctctgaagagttgctgtttcttactgacaataaaaaatgttctcttggttcg

SEQ ID NO: 89711 - DNA, 4379 bp, Homo sapiens
gaatcctggtcgacgattcccgcctttccagcatgcaggggctgctcaggtaagggggacgctcctccttgcccgccgcactcattcattaagtggcactgctcagtggtgcgggggtgggcgtgcttccgtgggctgggcgctgggttcgcggcgcgccctcctgctgcctccccggagctcccgggccagtagcgtttagtcacatcaagaaatagaacagaattcagccatggccccaagaaagagaggtggacgaggtatttcattcatcttttgctgtttccgaaataatgatcacccagaaatcacgtatcggctgcgaaatgatagcaactttgcgcttcagaccatggaaccagcattgcccatgccccctgtggaggagctggatgtcatgttcagtgaactggtggatgaactggacctcacagacaaacacagagaagccatgtttgcacttccagctgagaaaaaatggcaaatatactgtagcaagaaaaaggaccaggaagaaaacaagggagctacaagttggcctgaattctacattgatcagctcaattccatggctgctagaaaatctctgctggctttagagaaggaagaagaagaagaaagaagtaaaactatagagagtttaaagacagcactgaggacaaaaccaatgaggtttgtaaccagattcatcgacttggatggcctatcatgtatcctcaactttctaaagaccatggactacgagacctcagagtctcgaatacatacttctctcattggctgtataaaagcgttaatgaacaactctcaaggccgggctcacgtcctggctcattctgagagtattaatgtaattgctcagagtctgagcacagagaacattaaaacgaaggtggccgtgctggaaatcttgggcgccgtgtgcctggttcccgggggccacaagaaggttctgcaggccatgctgcactaccagaagtatgccagcgaaaggacccgctttcagacattaattaacgacttggataaaagcactgggcggtatcgagatgaagtgagtctcaagactgccatcatgtccttcattaatgcagtgctcagccaaggtgcaggagtggagagtttggactttagacttcatcttcgctatgaaatttctgatgttaggaattcaccctgtaatggataaattaaggaaacacgaaaattcaacattagataggcatttagacttttttgaaatgctccgaaatgaagatgaactagaatttgccaaaagatttgaactggttcacatagacacaaaaagtgcaactcagatgtttgagctgaccaggaagaggctgacacatagtgaagcttacccgcatttcatgtccatcctgcaccactgcctccaaatgccttacaagaggagtggcaacactgttcagtactggctactactagatagaattatacagcagatagttatccagaatgacaaaggacaggaccctgactccacacctttggaaaactttaatattaagaatgtcgtacgaatgttggttaatgaaaatgaagttaagcagtggaaagaacaagcggaaaaaatgagaaaagagcacaatgagctacaacagaaactggaaaagaaagaacgagaatgtgatgctaagactcaagagaaggaagagatgatgcagaccttaaataaaatgaaagagaaacttgaaaaggagactactgagcataagcaagtcaagcagcaggtggcggacctcacagcacagctccatgagctcagcaggagggccgtctgtgcttcaatcccaggtggaccctcgcctggagcaccaggagggccctttccttcctctgtgcctggatctctccttcctcccccaccacccccacctctaccaggtgggatgcttccccctccaccgcctcccctccctccaggtggccctcctcctcccccagggcctcctcccttaggggcaatcatgccacctcctggtgctccaatgggcctagcactgaagaagaaaagcattcctcagcccacaaatgccctgaaatccttcaactggtctaaactgcccgagaacaaactggaaggaacagtatggaccgaaattgatgatacaaaagtcttcaaaattctagatcttgaagacctggaaagaaccttctctgcctatcaaagacagcaggatttctttgtgaacagtaactccaagcagaaagaagcagatgccattgatgacactctgagttccaaacttaaagttaaagagctttcggtgattgatggtcggagagctcagaattgcaacatccttctatcgaggttgaaattatccaatgacgaaatcaaacgggcaattctaacaatggacgaacaggaagatctgcccaaggacatgttggaacagctcttgaaatttgttcctgaaaaaagtgacattgacctattggaggaacataaacatgaactggatcggatggccaaggctgataggttcctttttgagatgagccgaattaatcactatcagcaaaggttgcaatcgctgtacttcaaaaagaagtttgcagagcgtgtggcagaagtgaaacctaaagtggaagcaattcgttctggctcagaagaggtgtttaggagtggtgccctcaagcagttgctggaggtggttttggcatttggaaattatatgaataaaggtcaaagagggaatgcatatggattcaagatatctagcctaaacaaaattgctgacacaaaatccagcatcgacaaaaacattacccttttgcactatctcatcactattgtggaaaataagtaccccagtgttctcaatctaaatgaagaattgcgagatattcctcaagctgcgaaagtaaacatgactgagctggacaaagaaataagtaccttgagaagtggcttgaaagcagtagagacagagctggaatatcagaagtctcagcccccacagcccggagataagtttgtgtctgttgtcagccagttcatcacagtagccagcttcagcttctctgatgttgaagaccttctagcagaagctaaagacctgtttactaaagcagtgaagcactttggggaagaggctggcaaaatacaaccagatgagttctttggcatttttgatcaatttcttcaagctgtgtcagaagccaaacaagaaaacgaaaatatgagaaagaaaaaggaggaagaagaacgtcgagctcgcatggaagctcagctcaaagaacaacgtgaaagggaacgtaaaatgagaaaagctaaagagaatagtgaagaaagcggagagtttgatgaccttgtttcagctttacgctcaggagaagtgtttgacaaagacctttctaaattgaaacggaatcgcaaacgtattaccaaccagatgactgacagcagcagagagagaccaatcacaaaacttaatttctaattttccatgaatacttttttttagaaagctcattagcagccctctaaagtgactagaacgtttcattacactgccttgcaatccaaacagtggcaattttttccttcatctgtgagtgaatgtgtgaacgtgtgtatgtaaatgtatgtgtgtatatattaaaaaatgtatatagatgtctgagtgttgtctggagacctatacgtatggttaaaaagatttatgttaatgtatgtgctccaaaacctttcgtgtatgcattcacattgagtgtggctcattttctttccccgaacgccatgactgttcagaagcacaatactatctcctgaaagagataagagacattccctagattcaaaggcaaaacagaagaaacaaacaaacaaacaaacaaagcttgcaaaatattttatggtttccaagcttgatatcctttaaaattattttcattgatggaactggagttgttggaaaaacatagatttaaaatgatttttgatagctgacattgtgatgttgatgtatcacatcagtaaataggaccagctttgaatttctgacattggtgtggggatacagtctgtaaatgtttattgagaaccatcttgcacacaatttgaattatgtagaatgtcaatcaagtttttgbtatatttaaaagttggacatcaattttttcccctgatttcatccaagttatctctgccaagtgctcttgataatttcttcagatttttggaaaaaaacactatataaavtgcaatccatgctttttttaaagaacaacattgccagagtatgcttgttctaacaatatagatatataaaccttaaaaataataaaatatctcacccaagacttaaaggaagaattctctgaagggataaagattactaaaaaaaaaa

SEQ ID NO: 89712 - DNA, 434 bp, Homo sapiens
ggcacgagagcacttccaaaaagttagtggctttcaatcacctctttttacagttaaagaaactgaggcagaaaaagtaacttgactcaaccaggttatcagctaataggtggaggagcctaaatttgaattcagttatttcaatccatccataagtatttctttaacccttacacttatagtctgtttggaaagaaaaaacacttatgatacaaatagaaatgcaagcaagtgcaatgatagaaatgcaagcaagtgcaaattcatgtacctcaatgtggttgttaatatctgaagggtaaaagagtaaaaagagatactttattgaggtagcctaaacaaatcaaagcttgttaggaaagcagaatactaggagatactatgtgttttctttttccaaataaacatggaagtgtgggccactgcactgtgag

SEQ ID NO: 89713 - DNA, 3070 bp, Homo sapiens
ttcccgggtcgacgatttcgtggacggctctagctaggtgagcggctccggccagttcccttttagactatggcgacatacctggagttcatccagcagaatgaagaacgggatggtgtgcgttttagttggaacgtgtggccttccagccggctggaggctacaagaatggttgtacccctggcttgtctccttactcctttgaaagaacgtccagacctacctcctgtacaatatgaacctgtgctttgcagcaggccaacttgtaaagctgttctcaacccactttgtcaggttgattatcgagcaaaactttgggcctgtaatttctgttttcaaagaaatcagtttcctccagcttatggaggcatatctgaggtgaatcaacctgccgaattgatgccccagttttctacaattgagtacgtgatacagcgaggtgctcagtcccctctgatctttctctatgtggttgacacatgcctggaggaagatgaccttcaagcactcaaagagtccctgcagatgtccctgagtcttcttcctccagatgctctggtgggtctgatcacatttggaaggatggtgcaggttcatgagctaagctgtgaaggaatctccaaaagttatgtcttccgagggaccaaggatttaactgcaaagcaaatacaggatatgttgggcctgaccaagccagccatgcccatgcagcaagcacgacctgcacaaccacaggagcacccttttgcttcaagcagatttctgcagccctgttcacaagattgatatgaacctcactgatcttcttggggagctacagagggacccatggccagtaactcaggggaagagacctttgcgatccactggtgtggctttgtccatttgctgttggcttgctggagggcacttttccaaacacagggagccaggatcatgctgtttactggaggtccccctacccaagggcctggcatggtggttggagatgaattaaagattcctattcgttcttggcatgatattgagaaagataatgcacgattcatgaaaaaggcaaccaagcactatgagatgcttgctaatcgaacagctgcaaatggtcactgcattgatatttatgcttgtgcccttgatcaaactggacttttggagatgaagtgttgtgcaaatcttactggaggctacatggtaatgggagattctttcaacacttctctcttcaagcagacattccaaagaatctttactaaagattttaatggagatttccgaatggcatttggtgctactttggacgtaaagacctctcgggaactgaagattgcaggagccattggtccatgcatatctctgaatgtgaaaggaccgtgtgtgtcagaaaatgagcttggtgttggtggcacgagtcagtggaaaatctgtggcctagatcctacatctacacttggcatctattttgaagttgtcaatcagcacaacaccccgatcccccaaggaggcagaggagccatccagtttgtcacgcattatcagcactccagcacccagagacgcatccgcgtgaccaccatcgcccgaaattgggcagatgtacagagtcagctcaggcacatagaagcagcatttgaccaggaggctgcggcagtgttgatggcacggcttggggtgttccgagcggagtcagaggaggggcccgatgtgctccggtggctggaccgacaactcatccgactgtgtcaaaagtttggacagtataacaaagaagaccccacttcttttaggttatcagattccttttctctatatcctcagtttatgttccatctgagaagatctccatttcttcaagtgtttaacaacagtcctgatgagtcgtcatattacagacatcattttgcccggcaggacctgacccagtccctcatcatgatccagcccattctctactcttactcctttcatgggccaccagagccagtactcttggatagcagcagcattctagctgacagaattttgctgatggatactttctttcaaattgtcatttatcttggtgagaccatagcccagtggcgtaaagctggctaccaggacatgcccgagtatgaaaacttcaagcaccttctgcaggcaccactggatgatgctcaagaaattctgcaagcacgcttcccgatgccacgttacatcaacacggagcatggaggcagtcaggctcgattccttttgtccaaagtgaacccatctcagacacacaataacctgtatgcttggggacaggaaactggagcacccatcctaactgatgatgttagcctgcaggtgttcatggaccatttgaagaagctggctgtctccagtgcctgttaagctgaggatacaaccaggaaatgcaacggtgtcagattgtgttcaaaatgtctagaaaggcttgataacattcctgttacttttctagcagattttaacaaataatcaaggacattttatatgtaactctttagattataatttatttgtattcctgtctttgtcctttttcttgcactataaaattataaggtcataaatgttttggtacttgtagatgtttatgtgctttttgtatcctaacttttagaatctaaataaaatcagaggtaatgtattttggcagcttgtttaggtgagaatcttaatgatcataaaaggaaataaatctagatgcagaaagtactggctaaaatattgctaatacaaatgtgatttcctgaggtctctgtgtgagtgtgtatgtgttttaagtgacttccttaagaggtgtttccctgaaccctaattccccataattaaagtaatgtatatgccaggatcaaaatgaaacaaatataccttatccctaaagagctcataacaaataagttacctccactctataaactcagacctactttttgaagataactgcttttaacctctccttacaagatttttgttgttgatgtatttaattttagcccatgtctcaattctcattttcaaagaaatcaatatattaatatacctttggtcaaaaaaaaaaaaa

SEQ ID NO: 89714 - DNA, 1618 bp, Homo sapiens
tttccactggaggtgggctttattactgtcgccatgatgtgaaaagaggaagacagcacccattcccacgcctcctagacactgtgcaccaacaactgtctgctggggttagcacggagctgtccccacccccagggtcagagcacccacaggtgccgagctggcccaggagacccccacgctgctgacgctgtttgccttgtgtctgcacaggcctctactaaactctcccacacaattagtgtcttaaatatatgtacacgtatatattttgtcccaactgtgtcagttataaaatgaaaactgaccacttctccttacgttatcttcacagtagctgtgcagaagacaacaaatccagtgttgatagctcagggcaggctgcccaccccagcaaagggaagttcttcccccatgggacccactgggggacccagtgccgcggccacatctccgtgcttgggtggcagtgtagctgcccatctacggggtgccgggttggcttgggccttgccatgtgccagacgcatgcatacatacacacacacacacacacacacacacacaccccaaccgattatggagcacatcacaccgatcccttgcagaggtgggggctggggcccaggacaatcagaagcagggcccctcccccagctgtctcgagaccaaagccatccagggcctctgagccctggggcatcacccagaagcgctgggctcccaggctggcacccagcacaccaggagcccagggcgcgtgggagatgcgccagggacggtctttcactccagaccaggctgactaataaatatgacatccagtgttgtcaggagatgagaaaataacgtagacttggctggactctgttgtcaaggccattcccagtcacagaggaaacatcccaggtggtctccaggcgtccaggtggctctgcacctgccgacccccagaggccagtgaggttctggcagcaagatgtgctccattaggcaggcaaagcagggcgacctgaaccaacgacatgtgtgggggttgtggtctccacattctattcatgttcgaggagcgtcagtctcccaaggctgcggatggaggcccctagggtgctgcgactcccactcctcacctgcccctaaccctgccgccatggccactttcacccatgcctcgccgtggggaaaggaaggcccgcaaaccctgcccctggcggacagggcagcccttgcctctgctcagtcagtgcacggaaatgcccacagctccagggagaccccctagcaggcagagtgaccgtcaaggtaaggcccacggtggcccagcagcagcacacagctcagcggcccagaccccaccctgggggatgcccagaggcttcctagacctgcactcaggcagacaagcatgtggctgggcggccaccagcagacatctggccgcctcaggaggctcttcctggctctaaagagaatccagttccaaattcccactttctctgctcaaagttacagtgtggtcataattgcacgctctcatggacccacgtcccacccgagtgacaatgatgccacagccactcagcttctagctggctctactccgaattccaccagactg

SEQ ID NO: 89715 - DNA, 4176 bp, Homo sapiens
aaggtaagtataattttctgcttttattgaaaatttatatatgactcagtattgtaataaataaacataaccattttcacaaaaaatgacagtgctatgctaaagaagaaaatattaaatgggggatttacttgtagtggcaagacagactttttatcaatacagaataaatattaacagcatttcgtgagccaatggttgagacccaacaaaatgtagggaatcaagcatgatgtaagaaataattttccagagaaaaaaggatggtgtattctcggatgataagactgtctttgtaaactggggcatatcaattagtcccatcctcacagctcaccttcaaaccacagggcttgtttctggctatgttaaaaggaccctcctctgaggaaaagcagaggagaggaactcccattatccttacagtgaaacgcaaccactgcagaaaaactcccactgggtaaatagaacacagtttaataagtagattggatatgatctaactataaaatttaggtaacagagtaagtgttacatgtggcaggaccggaaaaaaatcatgacatttttcttatccccttgtacccctcccactgtcattatgctattaccaacaacaacaagaataatgtttcaaattttcctctcatcaaaaaatgagagaaaataacgagggaagtgtttttgttctttttcgaacagtttcttgaacacctccaataccaatcactcacaaggtgtctgtgcaaatctatttcacaggatttcaaggaaattgttaactcacaaaaaaatccttaaatgaagctattttggagttctgtatattatttggaaaggagggaggaaaagggtggtggtggtaaagtagaggtaaagtagtacaatccagccaaacaaaatgttaaaagttttaaatcaacaatgagtctgactttttctggtttgggaagcaagactctaaaatgttgggagagattctttctgatctgatggctactgaagaacacatttctcctctttcttggccatcttgcctttgttttgctccagagttcgctccaaatgctcatcttcttcttcggcctgcttctcctgcgcgtccaggtccctgacgagcgcatcgcgcttgttcaccagggccaccagctcatctagcagaagctgttcgcgtcgcttctgggcctcggtcttctgccagtcttcaatggctagcattgccctcaattcccggttcagcagctcataccgtcgttctaaatcatgttctttttccagaagagagagctgattcattctccttattaaggcatttttcttattaactaacataaaccattcctgcatcatagcttcttcttcttctgtgttccttcctgtgtccatgagatagcgaaggcgcttctccaccagcgcggcacgggtgtcaatttgcttttgctcattctctagtgctgccaattctcctactacatactgactgggagtctttgaaccctttattaagcacttcatcttctgatggcttcctctgagtttcagttatcgctgccttctcctcatttcctttctttgtatcttcctgtattgatctctgccttttcatctctggtctattctcaatatattggctgaaagactgaagttgagtttttctgactgtagaatctttgctgaacacaacaggatttctaaaacgttctgttgttttttgtaatcgttcagtccggagatcttctgtgccacttttcatgtcctgctctgagctctcagttacagctttctgggcagcactggagggtgaatttgccacctgtggctgaacttctaggagcttcttcagcttcaagtccaccaacttactgttttgttcgggagtatcaaggtcattttctaagttagtaagttcatctccacctcctacaacaaagccttcagggatctcctcgttagtatctatctcaatattatcattttcatctccagatgcctttgacctttctttcaacttttctgcagccatttcaccatagctgggaagttctgacatcttcactccagatcgagcttctgctattagctgacgagctctctctctcagctgccgacgtcgctcttcatcttgctgatcacttagctgcctgttgcagaatggggtggctgtgttggtattgtgcttattccccgcctttaaggctgcatctcttcttgcttgctcaagcagaactcttgctctttccttaagttcttcttgtctagataacaatcgatgctggactatttttgatgaatgatctgcatgatttaaagtggttctatcagcatctggatcagactccgtctgcctcagggaagcatgttttttcttagcaaggtctagatctctactatatgagtatccaagtttagaagtaggagataaacttgtttttttgataggagattctggatctgatctgcattctaaggatctggaattctctaatttttctttctccaagttactaccgatgtctagagtttgaagcttttgttcatctgtctcctcacaaataaagggtggagacatatccttcttcttatcactaacatataagtcactcaattctaaagtctcagctttcaatagtctctttttgcctaacaaaacctgtgcttgggttgaatctgtattggaacatattccagggtcatcagatcctgaagtccttccagagctctgctgagacttctggggttctgtgtcacttttagtcctgcgacagtaaggggaggctgtgcttggactaaggtgatcatcaggagtttgatgctcactttctgactctccaaccccgctatcatttacaaatacagagtcatcctgtgataagaagtctactgctccgctgataggctgttgtagttcaggctcccgcttcagatcactaagctctgcatagaatttttcttgatcaacagaactgtttgtatctgtttcatagtttccaactttatatgtgcttttactgctgttttcctctatctgaacgacatttagttcttggccactgaaatgtgcccttatttgatagagataagtcataacagtcagtttatcaggaattgctaataataccatatcagaaggttccaataatcgggaaattcctatgctggcaaatccatcgtatgcctttttgttgttctctttaatatcttgaggattcagagacttgtagtcaattaaatctggtctaaagtggtgtaatattgcacaaaaagataaaccatttctccacgatgtagtaaaattggtgatttttactcctcggtagttctttgtaacttctttacaccatacaagcaaagactgactagcatttggctttcgccccaaaacaggacttggtatagggcttggcttaggagaagtagagagatcttttcctgcagaaactgtgttttcatttaatactcctgtttttggtgagaggactggtggagccggggcctttcttttcactcgcctttcagtttctagttcttgaacaggatttaccaaattatttggaggaggagttgatttaggttcataaaaaggatttgattcatccaattcttcttcttcagttttagaactatcagcatagaggtacttgctcatatccacaggtcttatattttttctttttgtagactggggaggagaatcctttatggtcacaaatgcttctggctcatcgaatgggttcaaatactgtggagtctgcacctctttaaagggattatagctgttattataaaaagagtcttctgtttttctaggtgaagctgtttcagtgataggttcttctgagtcaggatctccaaatggatttaattctgcagcatcaggatcatcaaatggatttgaattcacggtggccaagtccttttctgcttcatccaaaaagttaagtttgttgataagctctgtaattttagctgccttttcttcttggttcactctgttctcatcatcatcttcattatcttcttcgaagtcatctaaattggccaatgtcagcctggcttcatactcatccaactaggccaacctttgcatgtcttcatctgtggcttttccttccctgtgaaaaatgcaagataatgaaaactgaagagcggcagatacaacttttttagataatggct

SEQ ID NO: 89716 - DNA, 1200 bp, Homo sapiens
gcggtcccactgtggggtgtgaagtgtccgtagagctgtgagagaatgaagatgagctttgcgttgactttcaggtcagcaaaaggccgttggatcgcaaaccccagccagccgtgctcgaaagcctccattgggttatttgtgccagcaagtcctcctctggaccctgagaaggtcaaagagttacagcgcttcatcaccctttccaagagactccttgtgatgactggggcaggaatctccaccgaatcggggataccagactacaggtcagaaaaagtggggctttatgcccgcactgaccgcaggcccatccagcatggtgattttgtccggagtgccccaatccgccagcggtactgggcgagaaacttcgtaggctggcctcaattctcctcccaccagcctaaccctgcacactgggctttgagcacctgggagaaactcggaaagctgtactggttggtgacccaaaatgtggatgctttgcacaccaaggcggggagtcggcgcctgacagagctccacggatgcatggacagggtcctgtgcttggattgtggggaacagactccccggggggtgctgcaagagcgtttccaagtcctgaaccccacctggagtgctgaggcccatggcctggctcctgatggtgacgtctttctctcagaggagcaagtccggagctttcaggtcccaacctgcgttcaatgtggaggccatctgaaaccagatgtcgttttcttcggggacacagtgaaccctgacaaggttgattttgtgcacaagcgtgtaaaagaagccgactccctcttggtggtgggatcatccttgcaggtatactctggttacaggtttatcctccactgcctgggagaagaagctccccgattgcaatactgaacattgggcccacacgggtcgggatgacttggcgtgtctgaaactgaattctcgttgtggagagttgctgcctttgatagacccatgctgaccacagcctgatattccagaacctggaacagggactttcacttgaatcttgctgctaaatgtaaatgccttctcaaatgacagattccagttcccattcaacagagtagggtgcactgacaaagtatagaaggttctaggtatcttaatgtgtggatattcttaattaaaactcattttttttaaataaaaaattgttcagcttta

SEQ ID NO: 89717 - DNA, 7431 bp, Homo sapiens
gcggtgcctctgagagccgccgccacctcgtccctcagttcccggcagacagccgcccgggccggcgtccctcaccgccaccagggccggagtgacgagtgagaggggcggccgggacgcgacccccgggccaggagaagcggaggcccgacggcggcggccctccgaggtacggcttcttgggggcggcgaggacctcgacgcccttcgccgacaccgcggctggtcccgctcgcccgccccttcctgatcctgccgctgccctccacgcctccaatcccccacctccaccccctctcctttctctcttctcttccttcctctcctcctcctcccctccagccgctgggagccgcgggtcggacgagccgccgcctccttctctgcgtccatgtatgaggggaagaagacgaagaacatgttcctgacccgggctctggagaagatattggccgacaaggaagtgaagaaggcgcatcactcccagctgcgcaaagcttgcgaggtggcgttagaggaaataaaagcggaaactgaaaaacagagtcctcctcatggagaagcaaaagctggatcaagcacccttccaccagtgaaatcaaagacaaattttattgaagcagacaagtacttcttgccttttgagttggcatgccagtccaaatgtcctcgcatagttagtacatctctagattgcttacagaaacttattgcttatgggcacttgactggcaatgctccagatagtacaacaccaggcaaaaaattaattgatagaattattgaaccaatatgtggctgctttcagggccctcagacagatgaaggagttcagctgcagataataaaggctttacttactgcagtaacatcacaacacatagaaattcatgaagggactgtactgcaagctgtgagaacatgttacaatatctacttagcaagcaaaaatctcatcaatcagacaacagccaaagctactctcactcagatgctaaatgttatctttgcacgcatggaaaaccaagcattacaggaagcaaaacaaatggaaaaagaaaggcatcggcagcatcatcatctgttaccgtctccagtaagccatcacgagcctgaatcacctcaacttagatatttgccacctcagactgttgatcatatatcccaagaacacgaaggggaccttgacctccatacaaatgatgtagataaaagtcttcaggatgacacagagcctgaaaatggatctgatatttccagtgcagaaaatgaacagactgaagctgatcaggcaactgcagctgaaacattatctaaaaatgaagtgttatatgacggagaaaaccatgattgtgaggaaaagccacaagacattgtacagaacattgtagaagaaatggtgaacattgttgttggagatatgggagaagggactactataaatgcaagtgcagatggcaacattggaactatagaggatggtagtgacagtgaaaatattcaagcaaatggaattccaggaacaccaatttctgttgcatatacaccatccttacctgatgatagattgtcagtctcttccaatgatactcaggaatctggaaattcttcaggaccttcacctggtgctaagttttcccacattttacaaaaggatgcctttctagtattcaggtcattgtgtaaactgtcaatgaaaccactgtcagatggaccaccagatccaaagtctcatgaactacgatccaagattctttcattgcagttacttctatccattctgcagaatgcaggacctattttcaggacaaatgagatgtttattaatgctattaagcagtatctttgtgttgcactctcaaaaaatggagtctcatctgttccagaggtttttgagctttctctttctatatttcttactttgttgtcaaatttcaagacacatctgaagatgcaaattgaggtgttctttaaagaaattttcttatacattttggaaacttctaccagctcatttgatcacaaatggatggttattcagacactgacgaggatttgtgcagatgctcagagtgtagtggatatttatgtaaactatgactgtgacttaaatgcagccaatatatttgaaagactagtaaatgatctatcaaaaattgctcaaggaaggggcagtcaagaacttggtatgagtaatgttcaggaattgagcctgaggaaaaaaggtttagaatgcttagtgtcgattttgaagtgtatggttgaatggagtaaggatcagtatgtgaatcccaactcccagacaactcttggtcaggaaaaaccctcagagcaagagatgagtgaaatcaaacaccctgagacaataaacagatacggaagtttaaattccctggagtcaacatcatcatcaggaataggcagctacagtacacagatgtctggcactgataatccagaacaatttgaggtcctaaagcaacaaaaagaaataatagaacaagggatagatttatttaataagaaaccaaagagaggaatacagtacctccaagaacaagggatgcttggcaccacacctgaagatattgcccaattcttacatcaagaggaaagattagactctactcaagtgggtgaggttcccggggggataatggataaatttaaccaaagaagtcatgtatgcatatgtggaccaacatgacttttcaggaaaagacttcgtttcagcccttcgtatgtttctagaaggatttcgtcttccaggggaagctcagaaaatcgatcgattaatggaaaaatttgctgcaagatacctagaatgcaaccaaggacaaactctctttgctagtgcggatacagcttatgttttggcttattcaattatcatgttgaccacagaccttcacagtccacaggtgaaaaataaaatgacaaaggaacaatacattaagatgaatagaggtatcaatgacagtaaagaccttcctgaagagtatctatcagccatctataatgaaatagctgggaaaaagatatcaatgaaagaaacaaaagaactaacaatccctacaaaatcaagtaaacagaatgtagccagtgaaaaacaaagaagacttctgtataacttagaaatggagcagatggccaagacagctaaagcactcatggaggccgtgagccatgttcaggcaccctttacaagtgcaacacatttggagcatgtgaggcccatgtttaagttggcttggacgccttttctggctgcattcagtgtgggtctacaagattgtgatgatactgaagtagcctctctttgcctggaaggtataagatgtgcaatcagaattgcatgcattttcagcattcagctggagagagatgcatatgtccaggcactagcaagatttaccttactcacagtgagttccggtattactgaaatgaaacagaagaacattgacacaataaaaacacttatcacagtggctcatacagatggaaattatttaggaaattcatggcatgagattctgaagtgcatcagtcagttggagctggcacagcttataggaactggagtgaaacctcgatacatttctggaacagtgcgaggcagagaaggatctcttactggaacaaaagatcaggctcctgatgaatttgtgggtttagggctagttggaggaaatgtggactggaaacagatagcaagtattcaggaatccattggagaaaccagttctcagagtgttgttgttgctgtagatagaatattcacaggatctacaaggctagatggaaatgccattgtggattttgtccgttggctctgtgctgtgtctatggatgaattactttccacgacacacccaagaatgtttagtctacaaaaaatagtagaaatatcatattacaacatgggaagaataagattacagtggtctcgaatttgggaagttattggagatcattttaataaggttgggtgtaatcctaatgaagatgtagctatttttgcagtagactccttgaggcagttgtcaatgaagttcttagagaaaggggagcttgctaacttcagattccagaaggatttcttaagaccttttgaacatataatgaaacggaacaggtctccaacaattcgagatatggttgtacggtgtatagcacagatggttaattctcaagctgctaacattcgatctggatggaagaacattttctctgtatttcatctagctgcatctgatcaagatgaaagcatagtggaacttgcattccaaacaaccgggcacattgtcacccttgtatttgaaaaacactttccagcgaccattgattctttccaggatgcagtgaagtgtttgtctgaatttgcgtgcaatgcagctttcccagacacaagtatggaagcaattcgacttattcgccattgtgcaaaatatgtgtctgatagacctcaggctttcaaggaatacacaagcgatgatatgaacgtagcacctgaagacagggtgtgggtgagaggatggttcccaattctctttgagttatcctgtatcatcaatagatgcaaattagatgtaagaaccaggggtttaacagtaatgtttgaaataatgaaaacatatggccacacttatgagaaacactggtggcaggatttatttagaattgttttcagaatctttgacaatatgaaattgccagaacaacagacagagaaagctgaatggatgacaacaacttgcaatcatgcactttatgcaatctgtgatgtattcactcagtatttagaagtactcagtgatgtacttttggatgacatttttgctcagctctactggtgtgtgcagcaagacaatgagcagttagcgcgatctggtacaaactgtttagagaatgttgttattctgaatggtgaaaaatttaccctagaaatctgggataaaacttgcaactgcacactggatatcttcaaaaccacaatcccacatgcgctgttgacctggcgacccaattctggagaaactgcccccccacctccatctcctgtaagtgaaaagccattggatacaatatcacagaagtctgtagatattcatgattctattcaaccaaggtctgtggataacagaccacaagcaccactggtttctgcgtctgctgttaatgaagaagtcagcaaaattaaatctacagcaaaatttccagaacaaaaattgtttgctgccctgttgattaaatgtgttgtgcagctggaactcatccagactatcgacaacattgtcttcttcccagccacaagtaagaaagaagatgcagaaaacttagctgcagcacagagagatgcggtggactttgatgttcgcgttgatactcaagaccaaggaatgtaccgctttttaacatcacaacaactttttaagctactggactgcttattagagtcacatagatttgcaaaagcgtttaattccaacaacgaacagaggactgccctgtggaaagcaggattcaaaggcaaatccaagcccaaccttctgaagcaggagaccagcagcctggcctgtgggctgcgcattctcttccggatgtacatggatgagagccgcgttagtgcctgggaggaggtccagcagaggcttttgaatgtctgcagtgaagcactaagttacttcctcactctaacatcagaaagtcatcgagaagcctggactaacttactgcttttgtttctaactaaagttctaaagataagtgataataggtttaaagctcatgcatcattctactaccctctcttatgtgaaattatgcaatttgacttgattcctgaacttcgtgctgttcttagaagattttttctgcgaatcggagtagtttttcagatatcacaaccacctgaacaggaacttggaataaacaagcaatgatgggaacttaatatttttgttggcatttacatccctctgctctttaaaaggacgctggagctgaggtttcctacctgaaaaatgatttctctggattgcagtgtctgagttactggtaaagatgcttagaagtcttactcaaacttgcaacactccagtcccttttagtgctggtggattttgtgtgttatattggcctcatgttgagcagaaagcctgtttaaacagtgtcagctcatgctcacgggtccttccctgtcttccacggcaggaaaagccccacgtttttggcaggtgtggaagtgaaacttacccaaagaactatagatgtaaagattgaacttctacaagaagtacaactcaggagagctgtattttgaaggataaaatgtttataattggggagtggggagagaagaagaaattattgttcatggtaaaagatatttagcaactatggtattcttattctgaagatttttgcacactcaggctatctgagatactggtaatcatcctgtgaaaaatgtacagagatgcaggtctgtaatataaaaatcttaaaacattatatagttcttcctgcactgttttctttattttcttattcatttgctaaatacccataatattttgtcaaatgcactaaacatttgggtggaactttcttttttattttatagggatttttagttttgccctttttggtaggtggtgattttgaggctgtaacatgcccagaagctgttgtggccgacacttcaacaatagggaaaaaaaggtagaaaatatccctactgacagtaactacctgtcacatatttctcttaggacttttaaagatgagccattaaaatagaatgatcctttatggaccaaaacttgaatcactgcaaaatgaatccagattgctgtcattttcttttcttttgggtggtggggcttgatgtagattttactctatgtacagaatttaacgttgaatatattaaaataacaaatctggcatggtttgcggaggttagatttactggaaatgtattcatactgtgaattgtgcctctgatggttaaaagacaagattgtcaagcattccgtattaacagtgggatgtagaaaattttttcagatgggacaaaatgtatatggtacagatgtaaagttttctatgtaaaaaattctgtacaactttctgtacaatattgattcccatctggcatattctaatcaggttataggtcaataaagtttttgaattatttcatcagtgcaatcaaaacctgtataacccacccccatgtttcattgattctggtctattaaggctgaacaactatggaaaagacattttcagccagaactacaaattcaatattgtttggttctggtattttctttccagcttctagcattagatcctccttacactgtacttaccataggatacttatttttaaggcaatttttaaaatttttatttatcttg

SEQ ID NO: 89718 - DNA, 2284 bp, Homo sapiens
atggctctgctgtccgagggcctggacgaggtgcccgccgcctgcctgtcgccgtgcgggccgcccaacccgaccgagctgttcagcgagtcacggcgcctggctctggaggagctggtggcgggcggccccgaagccttcgcggccttcctgcgacgcgagcgcctggctcgtttcctgaaccccgatgaggtgcacgccattctgcgcgcggcggagaggccgggagaggagggcgcggcggcggcggcggcggccgaggactcgtcggctcctcgcacgactgctcttcgggcacctacttccccgagcagtcggacctggagccaccgctgttggagcttggctggcccgccttctaccagggcgcctaccgcggcgccacgcgtgtcgagacgcacttccagccccgcggcgctggcgaaggtggcccctacggctgcaaggacgctctgcgccagcagctccgctcggcgcgagaggtgattgcagtggtcatggacgtgttcacagacatcgacatcttcagagacctgcaagaaatatgcaggaaacagggagttgctgtgtatatccttctggaccaggctctcctctctcaatttctggatatgtgcatggatctgaaagttcatcctgaacaggaaaagttaatgacagttcggactatcacaggaaatatctactatgcaaggtcaggaactaagattattgggaaggttcacgaaaagttcacgttgattgatggcatccgcgtggcaacaggctcctacagttttacatggacggatggcaaattaaacagcagtaacttggtaattctgtctggccaagtggttgaacactttgatctggagttccgaatcctgtatgcccagtccaagcccatcagccccaaactcctgtctcacttccagagcagcaacaagtttgatcacctcaccaaccgaaaaccacagtccaaggagctcaccctgggcaacctgctgcggatgcggctggctaggctgtcaagtactcccaggaaggcggacctggacccagagatgcccgcagagggcaaggcagagcgcaagccccatgactgtgagtcctctactgttagtgaggaagactacttcagcagccacagggacgagctccagagcagaaaggccattgacgctgccactcaaacagagccaggagaggagatgccagggctgagtgtgagtgaggtgggaacacaaaccagcatcaccacagcatgtgctggtacccagactgcagtcatcaccaggatagcaagctctcaaaccacgatttggtccagatcgaccactactcagactgacatggatgagaacattctctttcctcgaggaactcaatctacagaagggtcaccagtctcaaaaatgtctgtatcgagatcttccagtttgaagtcttcctcctctgtgtcttcccaaggctctgtggcaagctccactggttctcccgcttccatcagaaccactgacttccacaatcctggctatcccaagtacctgggcaccccccacctggaactgtacttgagtgactcacttagaaacttgaacaaagagcggcaattccacttcgctggtatcaggtcccggctcaaccacatgctggctatgctgtcaaggagaacactctttactgaaaaccaccttggccttcattctggcaatttcagcagagttaatttgcttgctgttagagatgtagcactttatccttcctatcagtaactgctccgtgttcagactcctgggtttcttccagggcttacagtggacatcatcagcttcctgctttaaaaaatatcttatgtccctaaattgcctttcttttacctggactttgtcacctttgttgtctttggaattctttagggtggcatattattttacatgctttgttttgtcatgtatataccaggtattggttttatggtttaaacactatggatacaggggtttgttttgcacaattttaatagtcatgcactacataatgatgttttggtcaatgacagaccacgtatatgctggcagtctcataagattataatactgtatttttactataccttttctatgtttagatacaaataccattatgttacagttgcctacagtattcagtgcagtaacatgatgtacaggtttgtagcctgttttgcatttttcttaggttgtatgctcttctgttttaaaggtttgaatcaccagcatttttgtgatcaaaatcctatttagaaaaaataaaactactt

SEQ ID NO: 89719 - DNA, 2358 bp, Homo sapiens; identical to SEQ ID NO: 75282

SEQ ID NO: 89720 - DNA, 1391 bp, Homo sapiens
ggcacgaggagatgctgatcctacagcactcccgctgtgcctcagcagtgagctgggtgtaaaggcaggaggcttgctggggtctgacacttccctgccctcctccaggagggacacatctggggctctatgaggaggacagctttcatcctgggctctggacttctctcatttgtggccttctggaactcagtgacatggcatcttcagagattttggggtgcttctggctacttttggcaagcccagtgggagaggctgctgactacatttgaagggaaggagtggatcctcttctttataggtgccatccaagtgccttgtctcttcttctggagcttcaatgggcttctattggtggttgacacaacaggaaaacctaacttcatctctcgctaccgaattcaggtcggcaagaatgaacctgtggatcctgtgaaactgcgccagtctatccgcacagttcttttcaaccagtgcatgatatctttccccatgggtggtcttcctctatcccttcctcaaatggggggagagacccctgccgccgtgagctacccaccttttcactgggttcctcccgggagctgggcatctttacccttgacggagaaaaccttggtcctaactattcacaccggctccttcaccacccaacattctacaagaaaatccacaagaaacaccatgagtggacagctcccattggcgtgatctctctctatgcccaccctatagagcatgcagtctccaacatgctaccggtgatagtgggcccattagtaatgggctcccacttgtcctccatcaccatgtggttttccttggccctcatcatcaccaccatctcccactgtggctaccaccttcccttcctgccttcgcctgaattccacgactaccaccatctcaagttcaaccagtgctatggggtgctgggtgtgctggaccacctccatgggactgacaccatgttcaagcagaccaaggcctacgagagacatgtcctcctgctgggcttcaccccgctctctgagagcatcccagactccccaaagaggatggagtgagagacagcctaagtgtcatcctggctgtccctcagccatgggatgcagacacggcttcctgattgcacctaacaatttgcctccttcggccacacgccctaatgatggcaccaccagggtagagggaaggtcggcttcccggaaaagcagggccaaggatgaggctttcttcaaactactgcccttgatgtccctcaatgggatcaggagttagcttaagaaaaaggaaaacacagctccccagactggaggctggtcagagggaggagacccctggtcctctgctgtggaaggagaggggttcagccgtcgaaacgaaaa

SEQ ID NO: 89721 - DNA, 2162 bp, Homo sapiens; identical to SEQ ID NO: 61218

SEQ ID NO: 89722 - DNA, 1179 bp, Homo sapiens
atttattctctttaattgtttttcaaagtttgtatgcagattctcccccaattttgtatgggggttggaattttgtttttatcttcaacagatatgctatccaaaatttttcagtgagaaacccctgggtgtgtttgtgtcatgccatatgaataataattgcacttctaagaaaagcttttcaggacaccgtggtttctcatgccaatactggtggaaaaatttccatttgttcgaaaatcagagagaacactggaatgttacgttcataacttactaaggattagtgtatattttccaaccttgaggcatgaaattctggagcttattattgaaaaactactcaagctggatgtgaatgcatcccggcagggtattgaagatgctgaagaaacagcaaatcaaacttgtggtgggacagattccacggaaggattgtttaatatgggattcgcagaggcatttttggaacatctttggaaaaacttgcaggatccaagtaatcctgccatcatcaggcaggctgctggaaattatattggaagctttttggcaagagctaaatttatttctcttattactgtaaaaccatgcctagatcttttggttaactggctgcacatataccttaataaccaggattcgggaacaaaggcattctgcgatgttgcctctccatggacccattttactcagcctgcccaagctgtgttctacacctttgtttttagaacacaagcagcttttgagcggaaacctgaaagaaggtttgcagtatcttcagagtctgaattttgagcggatagtgatgagccagctaaatcccctgaagatttgcctgccctcagtggttaacttttttgctgcaatcacaaataagtaccagctcgtcttctgctacaccatcatcgagaggaacaatcgccagatgctgccagtcattaggagtaccactggaggagactcagtgcagacctgcacaaacccactggacaccttcgtcccctttgatccctgtgtgctgaagaggtgaggtctgtgcagaccctgggtgaggggcgagttggctatggcctgtttaactccacctgtgcagactgcagctcagcctcgtccatgcttcgtgactcagccttgtcctcagggaagctggggctggtgcaactttcagaagtggtc

SEQ ID NO: 89723 - DNA, 3648 bp, Homo sapiens
gtccgcgcagcgctgggcggccgtcgcgggccgttgggggtgcaggctgctcgcactgctgctactggtgcctggacccggcggcgcctctgagatcaccttcgagcttcctgacaacgccaagcagtgcttctacgaggacatcgctcagggcaccaagtgcaccctggagttccaggtgattactggtggtcactatgatgtagattgtcgattagaagatcctgatggtaaagtgttatacaaagagatgaagaaacagtatgatagttttaccttcacagcctccaaaaatgggacatacaaattttgcttcagcaatgaaattttctactttcacacataaaactgtatattttgattttcaagttggagaagacccacctttgtttcctagtgagaaccgagtcagtgctcttacccagatggaatctgcctgtgtttcaattcacgaagctctgaagtctgtcatcgattatcagactcatttccgtttaagagaagctcaaggccgaagccgagcagaggatctaaatacaagagtggcctattggtcagtaggagaagccctcattcttctggtggttagcatagggcaggtatttcttttgaaaagctttttctcagataaaagaaccaccacaactcgtgttggatcataactacgttttgagaattgatgcaccattgccactgtaatattgctgtcctctaattaattttaggtactgaagaacttaatattggcaacatttttaaatccttactcatacacttgttgggagggatgtacaatgcatattcccaaactgtggaaaggacacctttttttatttgtaaaggtggaaaaactttggaactcattttgggctattcatgttaaatattcaacaccaatgatctactctgttcgcagttgtttatatctactcttcgcacactaaactttggtattttgattccttttaaccatttaagactacttttcttataggtagttgatattttaaaaaccttagatttaatgtctacatgtgttagggaggaagaaaattgccttttaattgttaataagaaaaccaaatgtgatgaactgtagcccaagccctattctgcactgttcagttttatggaggaaaaataaatctaccataggaatgttagttaatattgatatatcatggtaaaattgatttctcactagcttagaaaatgtcagacttttgtttttggggtttataatttaaaccagctatgctattttttcataaaggcatttgtagtacacagaaaacagtagtttcagtagtgtaaaagagtttatacaggccttaaatatcagactttgtaacaggtagaaatattacagaataatttaagacactacaatgggggcaaatgaaataggaaaatttttagtgagttacccgtactcattacattttcagtgcttttacaaggaaaaaaggtgatatgtttaattttaacattttaattggctagctcttgcccttatatgactttaatgtctgtgagtcattcccagcttaaattaacaattgttagtattagtctcacacataagtgccatacattttatcctcatggatgtgatgcactgaaaagttagttgctctccttttttcttttttttgtcgtgcatattttatttctgtagtttctggttagctaccctaaagtgatttaaaaatttagaatgctttgtgtttcctatttggtaatcttcattgacttttctttagttaatgagtattaaatagtgcatattctgtagactatagggtttacattgtgttgcatcttataacttgtatagattgagctgattgaaataagattttgttccaagtattatctgatagaatacaagatgattcaaaattatatagatatttaaagcttttctgctgttttttttttttttaaatggcaacggtttttttgccgggccttttttccttacccaaaagggaggagttttgaacaagacaaaactgtcatattgtaaaaactttggtatgggatcccttaaaatactgattggatacccttcctagtcacttaccaatactgactagaagttaactcttaattctaagctatcttaaaatgcatatatatacttcttgcatggaagagcaaaacaaattcaagttgtcatgcctgataatttcagatgccaccgtatagcaaagggtgaacatgttttcaaccctttaactttttacggtgtttgaagaccagctactccttaatatttatcaatggattaagaagtttaagattttgcagatttatcaatttgggtttttgtactgaagttgtcttgcggctttgcaagtgtccctttatatttaaatttgaaagttgtaagcactgatgttaatgtgattgatcagcatgggcatatgtaaaatgtccttttctggttgcctctctatgctattgtgttcagatacttacaccataattaaacagtaagttatagacttgctgagtttggcatagatagtgcactcatttaatctgtgcctctcaaaacttcagaatattagcatattaccacaaataatttttggtgaaactattgagatattaaaatttttgaaatcactactgttacctgttatagaaaatagtgttggcttagtctagtctctgtgtaactggttacattttgatggttgtctatactcaactggatatgtgtatgtaaattagaaaatacatacctatccagacataaatgctaagtaacatttttttcttcctccaactacataatttgtagctcatcatttttccttaatcctttcctaacttgttgcagcagtttgaatttcccagatatttatgtttgaacataatggctcagaatacatatttgaacatcatagttgtatatatttttaaagtagaataaataatggaaagcaacttgatatacaagtttatactaaaatttcaactgtgtgaagatacattttaaggcattactttgctaataatctacacattcttttttctattaaataaacaaatggtttgtggttcacagctttcatccaagcttggtgataatcaattttgaaaatacagtggactgaaaagcaaatttattctttcgaagatttcatttaaatctctgtactatgcatttttgtttcagtttgtaaatgtgtaacatttatagttaaataggacaaagcaggccctatgactattgttttcaaaaaattaatatataaataattcagaggggtttttcatttacttttgaaaagaaatttctttaacaggattgcacctatcaatttcttgtagaataaaaaaaaatctttcaacaaactgactttacttgtttctgtcaggatttaaatctttctaaagctccttataaacttaaagcctagagtacagttctgtaatgagagtgattatttatttggtattttattaaaatatctgagggactgtccaagaaagaaggtgaaagagaaataccacgtctgtactgcctaatttgtaaccttctctttgcattccttactgaaagtttgtgtaggtgaaaagcagttaaatcatcagttgctctaaagaggtcttaatttttaagtaaattacctt

SEQ ID NO: 89724 - DNA, 1108 bp, Homo sapiens; identical to SEQ ID NO: 61130
  misc_feature (1)...(1108): n = a,t,c or g

SEQ ID NO: 89725 - DNA, 1439 bp, Homo sapiens
tttttttttttttagctgctttctcggactgtattattttctgaaagtaagaaactttccctgggcagaactctttctagttcccatggggatgggcaggataggcgagaggccgagcccccacttccaggtctctgggcagggcggggttaggcagcagcgggtgtcactcacacagtgactttcacttgtgctttcagtgctcaggacatgggcacctgccggcttccttctagcccggttggacagctccggcagctggtttggggaggtaaaattataggagcgtgatgtcacccgggccactcagggcagagcctggctgctgggcagaagggcacttgggccgggctgcttcagccgagagggccattcggtgtcctgcccacagagagagaaacagtgagagaccaagagagcaaaccagagagatagggagggggaatgcaaggggtccctgggggactcaggagtcccagtggagaatgagaggcaggccccccgtggtggccggggccctggctgccagaggaccgggctggtgaggaggcgaggatgtggactttcgtcacccagctgttggtcacgctggtgctgctgagcttcttcctggtcagctgtcagaacgtgatgcacattgtcagggggtccctgtgctttgtgctaaagcacatccaccaggagctggacaaggagctgggggagagcgagggcctcagtgacgacgaggagaccatctccaccagggtggtccggcggcgggtcttcctgaaggggaatgagtttcagaatattccaggggagcaggtgacagaggagcaattcacggatgagcagggcaacattgtcaccaagaagatcattcgcaaggtggttcgacagatagacttgtccagcgccgatgccgcccaggagcacgaggaggtggagctgagagggagtggcctacagccggacctgatagagggcaggaagggggcgcagatagtgaagcgggccagcctgaaaacgaggagaacagtgaccccgagccggttctccttggaagtagcctctcgggaggtaacgctgcccttctcatcccctctgcatggccctggtcttcagtggagtggctgctccctgtctcaccctatcccctcccagccaccccagcatgatgtgggacaaacaacttgttgttgtgtctcgaggcagagattctcacttcccaaccctgctaacagttggctctgaaccccagcttcctcatcaaggaaacagagttaataatatccacttatcagggaccgcacggttttgtaagaatgccttttgggccgggcacagtggctcatgtctgtaatcccagcattttgtgaggtcgaggcaaaaggattgctttaggccaggagttcaagaccagcctgggcaacagagcaagaccccatcacaaaaaa

SEQ ID NO: 89726 - DNA, 2485 bp, Homo sapiens; identical to SEQ ID NO: 60623

SEQ ID NO: 89727 - DNA, 5623 bp, Homo sapiens
ttttttgatatttaatgatgtagcttctaaatttggtagttctgtctttgagtgtgaacttaaaaattatgaagatgcggctgggcgcgggggctcacacctgtcatccaggcactttgggactacaggcatgagccactgcatctggcagcaacatatatttcaaaagagtagcctggccactaggatctacctacctacatttttggtgcaaactattactttggggacatctttcttttttccttttcttttttttttttttaatttacagatggggtcttgttatgtttcccaagaggctcaagtgcagtggctattcacaggcatgatcatagcacactatagccttgaactcctggcctcaagtgatcttcccacatagctgagacaacaggtacatgccactgtgcccagcaggacatttttcttaatagaaaactactatcgtgaagaattatgtttatctcttaactatgtctactcaactagtttcaacatagtagtgaaattaacagtatcacgaaaagcaatgttccatgttaatttccatgtcgaagcaatgttctttgacccaacatttggataaatctcattcttgatgctagctatttcttggggtatgggttgctttaatcaacctctgcaaaactccgatcttagtaattccaagtgaaagaaccttgctagttgttcttactctgtacagaaatatatcagtctggattgattggacttggagttctatcttgatatgacaattttttctggtaagaccttgctcagaaatatgacccatgttgtcaaattttcataaatatcttatttttagaaatcccatcactactttacattaggctttctctttcagtgttcacaggcatcagagctctggatgaaaaaggcagatcccaactcccacagcacgtctttaccgtttcccaacgatgctcaggcccaggccccggccagctttcttctgcagatccacagggaaaatctccaagttctcctcatcccggtagtgtgcctcatctctatacaccaccagccgcaccttctggggggtctgcctcagggctgtgatggcttcttcgtggctggagttcctcaggtcaaccccattaaccaagggtgtgtcttttcctcccacaatgctgagaccaagccctgaacgtctcttggatatttctataatcatttcctgtccagggacaatgggacacgttgcggggtccactgacagaggagcctggaaaccaccatagcctgtgaagtctgcatctgttgaatggtatgatgaagctggtgctaatggtatctcttgtgaactgaaggagacttttgttggatatttttgctgtttcatctggctgacagccagtttgaagctttcactttcaggcaattgtttaataccaaccttcgaggctgccatcgttcctcactactaataggttcggtgccgctctgatcctcaatagaagatggagaacttgatggcactggaaagggagtaacggccatctgattgactgcatcctcgtttctgatgaaaaccagcttgacttttgatggggcagtcttaataatggcagatgcgattttggtgacttcttccatacagaatctgattgtttatctctaagagttcatctccaatatgcattcgtccatctgcggcagcaggtccttccgggttaattcccaccacaaatatgctcatgcgtgatcggtctttattaccagcaaggctgagtccaagtccattcttatctttttcaagttcaataatgtgcagttctccaggcagatctgcatatctttgtctgattttttggtcggtaaaggcatcttcttcttcattttcatcactgtcatcagtcagagctttataaggaggaggaagtttcattggcggtggagcagttccttgcctcttttctttcttttcttgggtgtcctggttctggttaccggtgattttgttggccttgttatgtacgttaggaatgactcgtggagtggatgacaaactctgaacaatgaacaccacagggtttcctgcattcttaatggcctcaactgcttcgctgtgtgaggcattctgcaaatctactccagacacctcaagtattttatctccagttttaagtgcgttcgtcttccctgctggactgtcttctaaaacttgtttgatgaatatacctttaagctcctctccattctttagacgttttataacagtttgtccaccaacaatactgatcccaagagacacattgggttctctaaaaatctcaacaattctcggtggaccccagtggctaaaatttggagtttcttctccttcgccttcttctctctcaggtaactcacatgtatcagtggcatatctagaagacaacattcctgtgtatgctgaggccttggaaataactcgtgtcgcttggtgttgatataaaggcaaatcttcttgctccctcctttgagccacaacaggaaggtcaatgagcaagctaggaccttggacatcattcgggatcatgcctaaatccagactagtttttgctaatgaattaagattttccaggtcgtcaaatctgccttgttgactgtttccttcagttgatggtacagatggtagggactccatgacaaaattttctttcatcacattttcagggcaatagccatacggctgtgcctcctgggaatagacagtcctcccggttcttgcctcttgagactcggatggttcattatcatgcaaccactgtgtaccaaagtgaagttcattcacagagggcacaggagtggcctcttgaatgtgcgacaagggatacaactccatggatggtgagggatcttgatataactcatattcttcatcaacaagcatttctctttcttcatccatttcctgcaatctaggagtcagaaattcatgcatctcccaggcctccttgctttgctctatctctttttgttgggaatggaaagactttcccagatctagaaatggttcatccacaagttcttctttaaaatatggttcatctctaaatcccttgggtgcttcgagtattaaagatgaatttatatcatgaattgttcctgaaaattcagtcttgtcttcattactgcttgaatgtaaaatataacaactttcttcttcattatcttccaccaaaggcttacagatgccaaggtgtactaggcctggtggcacagctttcaatatttccacagcttcagcaagtgaggtgttgtccaaacagtattcattgactgagaccaggcggtctccaggtaatagtcccccacttctttctgctacaccatctgctaccagggagcggatcacaatcactgatcttgtaggatctaaagggtcctggtaatccaaaatgctgaatcccaaacctttacaatcttttactagttcaacaatcttgacttcaggggaccacagtgctaattccccatcatcatcttcttcagtattgacatccatattgtggtcaacctctgtctcaggaagagaggtttcagtgcgccttggttcatctacagaagcttcatcatcaaacaacctccgacagcaaaccaaagtaaaagggggtggcacttctttaagaaaggagactgcttctcggcgagattttccataaagctgcatgccattgacctcaagcagctcatcttctggctgtaggagacccaatgtatcaacaggaccaccagaaacaattgaagaaatataatggtgcccatcaaaggaatccacttccacaccaagcctcagagtgtgaataggcagcagctttgaatatttctgtaactcagcatcatctgcaatctgtgtgtccaaagtagcaaccattacttcataatcaggacccaacaggttttcccatctggatttcagctcattttctggagagtctgggactttttccaatttttctaaggcttgtatgttgtcattttttaaagtatcaattctttctttaatttcctcatcttcaccatccacattagtttcagtttccactgctccagttagaaagagagctggtggtttcagtggttctacaacagttcctctgtctgaaggtggttcaagtggagaagtagatgaggatgtcttccttcgaactagggttaggtgtaccacctgccctgcatttcgtaatacttcaacaacatcatggttggcaaaaccctgaatgttcacgccatcgacagcaactattttgtcattcacttgaatgtggccattgtggtacgcagcactgccaggtattatacttttcacataaatccctgaagcttcccctgtatgagatgttccaacatagccaacaattctaattccaagactctgcccatcttttctcacaagctcaacattataagtttcaaaaagagaactgtcagaaccagggcccttgctggctacagtaggcagggcaacaggtaaggctgcaggggcagggggggtgactgaaatgtcaccagctggatctctagcaacgagcatcctgactgaattcccacagttccttagaacttgtgcaacttgctcactggtcattccctgcacgtttgtgccaccaatcttcaagatgtggtcccctgtctggagtcttccatctcgatctgctaatcctccaggaactatagtcctcacaaccacgccacttgtttttcctccaactattccaaaacctagtccagagccatcattaatgagctcaacctcttcaacatggccccaacaaactgtttcaggcagagttgtatcatttaggctgctagaagtactgctttttgtgtggactggttccctggccacaatcagtctcaaagatccagtggtttgttgtaataatgcaattgcttgctgatgggaaatgttctgatccaatggcgtgtgattaatggccaatatttgatcattttcctttaatctttgatccctgtctgctacactccctggctggacatccttcacgaagatatcaacttttccgagattttgacttctgagggccaccacactgaatccaaggcctccagttgaaggccgttctatatctatatattcaatttgccggccctgagccatctgttgaatgactgagttaaagtcttcatttcccaacttcggggtccacggaaataacccagatacagtcgagttattagagggcctgtggacatttccattagtaatggaaccatctgtgaacactaacaaacctttcctagaaaaatcaaagttggctgaacaatctgagggtatatggttgagttgacccttcagttgcttgatggactgctgaagtgtgagtatctggttgaagagaggactctttagtgtctcataaaacatagataacttctcattctgcgacgtgtcacccttctcctgcaatttcattttcaggcgatcaagtacctgcagcacctgcagtttatctgtagcaggattttcaggcattttgaattattctcttcaatcactcttaaagacacctggtgcgctggaggagcaggtgggagcccgggtcgggcgggctcggtgtcggccctgcctcacctgggcggaagtgag

SEQ ID NO: 89728 - DNA, 2252 bp, Homo sapiens; identical to SEQ ID NO: 60681

SEQ ID NO: 89729 - DNA, 1277 bp, Homo sapiens
ttttttttttttgggcagggatccgaaaacgactttattgaagatggagttggcaagacctagccccacttcccacccccagagccgttcctgtctccctcactcacacgctttccacaagctctgcacttccctgcacctgcctgggtgccctgggaaggcgtctctccccgacttatgaccctggggtggagaccgagcgcccaagcaggctggcctgtttttaaagtgctctgacatgcagtgctcctgtcggaagggtgatgagcaggccacaggagagttcctcacgccctgccagccccgtgcttgggctgggcttcctctgccccagagctgaaggagtaatgcaggcctggagcagtgattctcaacgtacattccttggcgtttatgctactcctctttctcccctggggcctgggagatgagacctctgggtgtttggtttttgttttgtttgatgcacccaggaaaatgagagcaagttccaggaagcgaagtgagaacacgcagtcagatctgatattcccagctctccccgtcctccagacccctgttgattatcccacgcaggtctctcctcagggtcccttgccgaagcctttcccaattggcactgctgcgggaggtatcttcgagacactgagggcataggaagggacaggtgggggctgaagggacagcccagctctagtttttccactgagtctttgtccaaatcctcagagccccgggtgtggaaggcctgtgcgtagcgttggatccgcctgccgagatgacgatccatagcctagtctatcacatgcctgcaagcgacacctaagctggttcatcaccagtgtccagtacgtgcccgttaccgcaggatccgcggagccacgcgccacaggcagcgaggcagcttccgctccagcatcaccgtggtggccacaatctgcgtatgggaacaaaaggagaagtcagagatgaggctgggcgcagacagaggtaggggtagggcagcctttgttgaccttcttcagtgggagagagttgatagagcttgagaccaacaattctttacccaatgacccaacatccatgacgcagccaggccagaggcaggagaaagacaggaagcagaagccccattcccaggagcacaggcaccagagaaagcaaatagaaagggcttttaagggctcccagatattttgaccctacagacataaaggccacttataaatataaacatcccacttagaatatcaatatatattcctggagaaaataaa

SEQ ID NO: 89730 - DNA, 1047 bp, Homo sapiens; identical to SEQ ID NO: 61050

SEQ ID NO: 89731 - DNA, 2221 bp, Homo sapiens
cccccttttttttttttttaatataaacagacagtatccacatagtttatttctcacagttctcctgacaaatgaacatcattcaagaacatactgtatacacagataagaagaaacatacaaaatgttttaaatgatgcacaacaaaatccagcagtataaaagaatgcatgtgaacccttgctcactgtgcagactaaatttaatcacttgtttaaatagtaataaaaatacaatcttttatggatcttgtgcagactacaaaagagggaaattattaccatatatatgatttttatattaggcagttttctttgatgagttgtactgacaactccaaatacagaggcagaagggctgtgtattttaaagggaattaatgttgtgaattagaaactttaacacagttactaccactgggcacttttccccataggtttgtacacatcacatgatcatcttatataacattacatttaaaaaatatatctgagtgacaattttataacattcacacaccatgagctggttaaggaagcaatgccacagttgcctcctgtagtgcttcactgttggtaattaaggacaattcattgtggttaaaagaaattagatatcaatatgattaagcagctccaatttactaaaggccatcaatgaccaccactgggacagtgagttcttttaaagtgtatatcctagaagcaaaccccatcattggttaaaactttgtctaaagaagtcagtttctgtgctgaaaactattttcacaaaactgaaggctactaaactgttttaatataaatactttgtcttctcattatcatatttatgaccaagttctttgaaacctttggaatttactctctctttaatgtgtgctctcgttccatctcacccatttaagatcaccacctaaaacgcagtggtgaaaaattcaccagggaaacctttgctcaccaggaatgttcagctgctgaacagtgatctagagccacaacggtgcagagctgtacttgacgagaacactcaggaagctctcatgctgtgagtgtcatttctgggaaagcagagaatctttccaaactgtgctcataattaacaatgataccattgcctatgtgttgaagaggactagtaaatgatgttctcttccatgtcatctgtttgctggaaagtagtttgggtcaaggtaattgtaactggtgccctgagacacacagtagtctctgtctaagaatgtctctggacctataaataggttctaattggtgatctcccttgtgaatatcctgtttcatgtagacagtctgaaacaagaatccacagaaatcccaaagacatttcctggaggacaatcccctgcaatgcccaccgaacacccctggatgggttctatgccacagttatcacacttaaagcccacatgttgcacaaatccactttcagcttgcatatgctgaagtttctgcttctttaactttttaaactgtaatagttctttatattcaggtaaattcctatacatgataggaatactttcgtcatctgatgcatcttcaacagcagtgttcatgtggctatgaaaacaagatcggtcatcatcttcatccatatacactggcggttcatgtgaagtcatgaaagtgccaaggcttaaagagatgcttattaagagggtgctgtcgtctgcttgttgaagactttttggagtatatatataagtttggtgttctgcctggtactggaatgccagctttagttagctttatgaaatacttctgtactcggctggcaacctgttttgctgtcctgttgcccaattcatctgctatcttctgccagcgtcgagattctacttcttcaggagggtatttgatgagtagctgttccagctttttctgttcttcaacagtccacaactggttaaatgtttcaggtttggtatcatcacacaagcgtcctcttatcatctgaggacgactgcttgagccttctggaccatcactcaaaggcaacatagaatatgaaagggactctccatccttcttaggatctaaaggactttttggtctagcaggtaaacctttatcaaaaactagcttaactcttctagtatgtcttttacgatttttaaattctctttccaccctcccaaggctatgggtatattggtcccatacgaaatcaggcaattgaacaactctctcggacgcgtggg

SEQ ID NO: 89732 - DNA, 3608 bp, Homo sapiens; identical to SEQ ID NO: 61049

SEQ ID NO: 89733 - DNA, 4116 bp, Homo sapiens; identical to SEQ ID NO: 61042
  misc_feature (1)...(4116): n = a,t,c or g

SEQ ID NO: 89734 - DNA, 1631 bp, Homo sapiens
cctgtttgttgtggtgcatgatgacccaaggtggggaacacccaggtactggctgggggcactatatcggaatcagcaaagctcacccactgcaccacctgggctgctgcctctggagtacttccccgcagctcctcattgctcacatagtaggcaatggcgttgctctcaaacacacagaatccatcatcaccctcaaatgctgggaccttgccggcaggaaatttgcggaatcaccatggcggctgggaccctgtacacgtatcctgaaaactggagggccttcaaggctctcatcgctgctcagtacagcggggctcaggtccgcgtgctctccgcaccaccccacttccattttggccaaaccaaccgcacccctgaatttctccgcaaatttcctgccggcaaggtcccagcatttgagggtgatgatggattctgtgtgtttgagagcaacgccattgcctactatgtgagcaatgaggagctgcggggaagtactccagaggcagcagcccaggtggtgcagtgggtgagctttgctgattccgatatagtgcccccagccagtacctgggtgttccccaccttgggcatcatgcaccacaacaaacaggccactgagaatgcaaaggaggaagtgaggcgaattctggggctgctggatgcttacttgaagacgaggacttttctggtgggcgaacgagtgacattggctgacatcacagttgtctgcaccctgttgtggctctataagcaggttctagagccttctttccgccaggcctttcccaataccaaccgctggttcctcacctgcattaaccagccccagttccgggctggtctttggggaagtgaaactgtgtgagaagatggcccagttttgatgctaaaaagtttgcagagacccaacctaaaaaggacacaccacggaaagagaagggttcacgggaagagaagcagaagccccaggctgagcggaaggaggagaaaaaggcggctgcccctgctcctgaggaggagatggatgaatgtgagcaggcgctggctgctgagcccaaggccaaggaccccttcgctcacctgcccaagagtacctttgtgttggatgaatttaagcgcaagtactccaatgaggacacactctctgtggcactgccatatttctgggagcactttgataaggacggctggtccctgtggtactcagagtatcgcttccctgaagaactcactcagaccttcatgagctgcaatctcatcactggaatgttccagcgactggacaagctgaggaagaatgccttcgccagtgtcatcctttttggaaccaacaatagcagctccatttctggagtctgggtcttccgaggccaggagcttgcctttccgctgagtccagattggcaggtggactacgagtcatacacatggcggaaactggatcctggcagcgaggagacccagacgctggttcgagagtacttttcctgggagggggccttccagcatgtgggcaaagccttcaatcagggcaagatcttcaagtgaacatctcttgccatcacctagctgcctgcacctgcccttcagggagatgggggtcattaaaggaaacctgaacattg

SEQ ID NO: 89735 - DNA, 1527 bp, Homo sapiens
accccatgcatggagtgtataaaaggggaagggctaagggagccacagaacctcagtggatctcagagagagccccagactgagggaagcatggatggatggagaaggatgcctcgctggggactgctgctgctgctctggggctcctgtacctttggtctcccgacagacaccaccacctttaaacggatcttcctcaagagaatgccctcaatccgagaaagcctgaaggaacgaggtgtggacatggccaggcttggtcccgagtggagccaacccatgaagaggctgacacttggcaacaccacctcctccgtgatcctcaccaactacatggacacccagtactatggcgagattggcatcggcaccccaccccagaccttcaaagtcgtctttgacactggttcgtccaatgtttgggtgccctcctccaagtgcagccgtctctacactgcctgtgtgtatcacaagctcttcgatgcttcggattcctccagctacaagcacaatggaacagaactcaccctccgctattcaacagggacagtcagtggctttctcagccaggacatcatcaccgtgggtggaatcacggtgacacagatgtttggagaggtcacggagatgcccgccttacccttcatgctggccgagtttgatggggttgtgggcatgggcttcattgaacaggccattggcagggtcacccctatcttcgacaacatcatctcccaaggggtgctaaaagaggacgtcttctctttctactacaacagagattccgagaattcccaatcgctgggaggacagattgtgctgggaggcagcgacccccagcattacgaagggaatttccactatatcaacctcatcaagactggtgtctggcagattcaaatgaagggggtgtctgtggggtcatccaccttgctctgtgaagacggctgcctggcattggtagacaccggtgcatcctacatctcaggttctaccagctccatagagaagctcatggaggccttgggagccaaggagaagaggctgtttgattatgtcgtgaagtgtaacgagggccctacacttcccccgacttttcttttcctcttgggaggcaaagatacaccgctcaccagcgcggactatttatttcaggaatcctacagtagtaaaaagctgtccacactggcaatccacgccatgtatatcccgccacccactggacccacgcttggccctgggggccacctttcatccgaaagttttacacagagtttgatcggggtaacaacccgcatggcttcgccttggcccgctgaggccctttgccaccgcagggaaggccctgccttcagccctggcccagagttggaaccctctttgaaatgcccctctgcctgggcttatgccctcaaatggagacattggatgtggagctcctgctggatgggggccctgacccctgccccagcccttccctgctttgaggacaaagagaataaagacttcatgttcacaaaaaaaaaa

SEQ ID NO: 89736 - DNA, 3003 bp, Homo sapiens; identical to SEQ ID NO: 60936

SEQ ID NO: 89737 - DNA, 1701 bp, Homo sapiens; identical to SEQ ID NO: 60677

SEQ ID NO: 89738 - DNA, 1182 bp, Homo sapiens
tttttttttttttgagtgagcccgctagtttattcaatactaggaataagccggtataaaatacatttttagaaaattcacttggagataaaaaatcttgtccccactcctcccccaatcccacacatctgtgctcttctgcctgagttaattcagctttgctgagcctcctgcaagagcttgagcagggggtcgtcagccctgagggcgaaggtgagcgtgcgctgctggtagtgcctagggtcacactccaagttctcgatcacctcagccagcaggtgggcccgctccacgcctgagccgggggcctcgaagcccagggcggtgaagtgcacatgcaggtggtagtaggagggcaggtagtgcaggtatactcgcagatggtctcccttcatccggtagcgctgcaggatggcctcctgcccctggtggaggatgttcctgagcagcggcaagtgctccggagtaaggtcgcgtagggatctgatgccccggcgatggcagatggcgatcaagtacaagtcatcgagctgctgttggttccacttgaggtcagggatgaggacaaaaccatcagagggatctgggttctcgaaaacaatccggtccgcttcagccttcttgtcgagaatgttatacacccactggatgctgaggctctgggactcccaggtggggtaaagtaatattcctgtagtcatctccccgtctctcggatcaggcggaggtccctggcgccaggtacttctgcaggtgtttctctgtggcagggtaaaccacggtcgtctttacatcattcagttgtcttggagggaacaagtgataggtgctgtagatatcattggagaactgcaattggagctcagggctgcccgtcaggagctgagccacctgttccacctgaaatggcgtcttctccaggatcacaacggcatcctctccatccccatccccagaggcctcattcaccttcccgtgtaggaaaatgattttgtcccgcgcagactccctcagcaccttctgcagtctgaagccggagaacggtaagcggacaggagcacaggtaccatttccaactcctgcctccttttcctctgtgctggcggcgtgggcctcctccacgtccaattcgcgcttcctcttgcctagttgaggagctgcgtccgccatgctgcctcgtgc

SEQ ID NO: 89739 - DNA, 754 bp, Homo sapiens
ttttttttttttgcaattttataactttatttgatctgacgatcagcgattagttctcatccacattgactgtctgtagatttttgaaagtggtaacaggtacataggtaaccaaagtatatagcttatttggggaatcttcatcctcattacgttttctggacagccgcacacggattcggtatggcacattccttattcctttggcccaaacagctttgttgagcctggtgtcaatgcgcacatctggagttcccatctccttcatggcaaatttccgaatctctttgagtgcccgaggtgcacgcttcttgaagcccactccatggatgcgcttgagaatgttgatggggtattctcggggttaccacttcgttgatggccagaaacggcccttttttcttctcgccaacccttctttggcgggagccattctgcagcgtccaagttggaaagccccttctgtcgtcttctcgcagccgtacccttctgtcgtcttctcgcagccgtgcccttctgtcgtcttctcgcagccgtacccttctgtcgtcttctcgcagccgtacccttctgtcgtcttctcgcagccgtacccttctgtcgtcttctcgcagccgtacccttctgtcgtcttctcgcagccgtacccttctgtcgtcttctcgcagccgtacccttctgtcgtcttctcgcagccgtacccttctgtcgtcttctcgcagccgtacccttctgtcgtcttctcgcagcagta

SEQ ID NO: 89740 - DNA, 4407 bp, Homo sapiens; identical to SEQ ID NO: 60605

SEQ ID NO: 89741 - DNA, 1534 bp, Homo sapiens
ttttttttttttgaaggttctcaggtctttatttgctctctcaaattccaggaattgacttatttaattaatccatcaacctctcatagcaaatatttgagaaaacaaatttatattcagattcttattttcagtagggaagtaagaagttgcagctcagtgcacgtaaagttgagacagagatggagacatccagccccacctctctggaacaagaaagatgactggggaggaaacacaggtcagcatgggaacaggggtcacagtggacacaagggtgggctgtctctccacctcctcacattatgctaacagggacgcagacacattcaggtgcctttgcagaaagagatgccagaggctcttgaagtcacaaaggggaggcgtgaagaaatcctgcatctcagtccctcacaagacagctgtctcaggcttttcaagctgtgagagacacatcagagccctgggcactgtcgctgcacgcagcctgagagtagctccctccttttccacctgaactcttcctcctacacatcacagcagcgaccacagctccgatgaccacaactgctaggacagccaggccagcaacaatgcccacgatggggacggtggactgggaagacggctcccatctcagggtgaggggcttcggcagcccctcatgctgtacatggcatgtgtatctctgctcttctccagaaggcaccaccacagctgccccactttctggaaggttctatctcctgctggtctggtctccacaagctcagtgtcctgagtttggtcctcggcatccccgctgccaggtcagtgtgatctcccgcagggtagaaacccagggcccagcacctcagggtggcctcatggtcagagatggggtggtgggtcacgtgtgtctttggggggtcagcgcgctccagcttgtccttcccgttctccaggtacctgcggagccactccacgcactcgccctccaggtaggctctccgctgctccgcctcacgggccgcctcccacttgcgctgggtgatctgagccgccgtgtccgcggcggtccaggagcgcaggtcctcgttcagggcgatgtaatccttgccgtcgtaggcgtactggtcatgcccgcggaggaggcgcccgtccggccccacgtcgcagccgtacatgctctggagggtgtgagacccggcctcgctctggttgtagtagccgcgcaggttccgcaggctctctcggtcagtctgtgcctgggccttgtagatctgtgtgttccggtcccaatactccggcccctcctgctctatccacggcgcccgcggctcctctctcggactcgcggcgtcgctgtcgaacctcacgaactgggtgtcgtccacgtagcccactgagatgaagcggggctccccgcggccgggccgggacacggaggtgtagaaatacctcatggagtgggagccggcccaggtctcggtcagggccagggccgccgagagcagcaggaggacggttcggggcgccatgaccagcatctcgg

SEQ ID NO: 89742 - DNA, 1626 bp, Homo sapiens
aaaaagaaatcaagaatgcaattttatttacaatagtcacgccggaaatacctagaaataaatttaactgaggatgtaaaagacctctacaaggagagttcaatgcgtagcgggagcggagagctgaccccagagagccctgggcagccccacccgtcgccgccggcttatgttaccatcacaccccggggaggacgccgcagctgccgcagccggccccagtcaccatcaccgcaaccatgagcagcgaggccgagacccagcagccgcccgccgccccccccgccgcccccgccctcagcgccgccgacaccaaagcccggcactacgggcaacggcgcagggagcggtggcccgggcggcctcacatcggcggcgcctgccggcggggacaagaaggtcatcgcaacgaaggttttgggaacagtaaaatggttcaatgtaaggaacggatatggtttcatcaacaggaatgacaccaaggaagatgtatttgtacaccagactgccataaagaagaataaccccaggaagtaccttcgcagtgtaggagatggagagactgtggagtttgatgttgttgaaggagaaaagggtgcggaggcagcaaatgttacaggtcctggtggtgttccagttcaaggcagtaaatatgcagcagaccgtaaccattatagacgctatccacgtcgtaggggtcctccacgcaattaccagcaaaattaccagaatagtgagagtggggaaaagaacgagggatcggagagtgctcccgaaggccaggcccaacaacgccggccctaccgcaggcgaaggttcccaccttactacatgcggagaccctatgggcgtcgaccacagtattccaaccctcctgtgcagggagaagtgatggagggtgctgacaaccagggtgcaggagaacaaggtagaccagtgaggcagaatatgtatcggggatatagaccacgattccgcaggggccctcctcgccaaagacagcctagagaggacggcaatgaagaagataaagaaaatcaaggagatgagacccaaggtcagcagccacctcaacgtcggtaccgccgcaacttcaattaccgacgcagacgcccagaaaaccctaaaccacaagatggcaaagagacaaaagcagccgatccaccagctgagaattcgtccgctcccgaggctgagcagggcggggctgagtaaatgccggcttaccatctctaccatcatccggtttagtcatccaacaagaagaaatatgaaattccagcaataagaaatgaacaaaagattggagctgaagacctaaagtgcttgctttttgcccgttgaccagataaatagaactatctgcattatctatgcagcatggggtttttattatttttacctaaagacgtctctttttggtaataacaaacgtgttttttaaaaaagcctggtttttctcaatacgcctttaaaggtttttaaattgtttcatatctggtcaagttgagatttttaagaacttcatttttaatttgtaataaaagtttacaacttgattttttcaaaaaagtcaacaaactgcaagcacctgttaataaaggtcttaaataattaaaaaaaaaa

SEQ ID NO: 89743 - DNA, 4912 bp, Homo sapiens
  misc_feature (1)...(4912): n = a,t,c or g
cagagaacgtttgtctgcctgatgagagccacttgggttaagaaactacctgtgaatagtcatcatttctgtccttcattggggaatacttttagaggccagtttccaaaaattctgcttaaaaaagaattctggttttgtcttactcttccagatgagatatcacagaggcttgggcctagattgtcatcagcatactgctatactattcgtttgttcttattaagccttattgtgtgtaatgctgttactttttcagagtgttgcggagataggaacatgggagagaaacaatctgggtaacatgaaagtgatgctggttgctaagggaaggcaacttgattctgtgggaagggctgtagctgatccatccgttgtctagatttgagtatgagcacagtggaagaggattctgacacagtaacagtagaaactgtgaactctgtgactttgactcaggacacagaagggaatctcattcttcactgccctcagaatgaagcggatgaaatagactcagaagatagtattgaacctccacataaaaggctttgtttgtcctctgaggatgatcagagtattgatgattctactccttgcatatcagttgttgcacttccactttcagaaaatgatcagagctttgaagtgaccatgactgcgaccacagaagtagcagatgatgaggttactgaggggactgtgacacagatacagattttgcagaatgagcaactagatgaaatatctcccttgggtaacgaggaagtttcagcagttagccaagcatggtttacaactaaagaagataaggattctctgactaataaaggacataaatggaagcaggggatgtggtccaaggaagaaattgatattttgatgaacaatattgaacgctatcttaaggcacgcggaataaaagatgctacagaaatcatctttgagatgtcaaaagacgaaagaaaagatttctacaggactatagcatggggtctgaaccggcctttgtttgcagtttatagaagagtgcttcgcatgtatgatgacagaaaccatgtgggaaaatatacacctgaagaaattgagaagctcaaggagctccggataaagcatggcaatgactgggcaacaataggggcggcgctaggaagaagtgcatcttctgtcaaagatcggtgccgactgatgaaggatacttgcaacacagggaagtggacagaagaagaagaaaagagacttgcagaagtggttcatgagttgacaagcactgagcccaggtgacatagtcacacagggtgtgtcttgggcagctgtggctgaacgagtcggtacccgctcagaaaagcaatgtcgttctaaatggctcaactacctgaattggaaacagagtgggggtactgaatggaccaaggaagatgaaatcaatctcatcctcaggatagcagaacttgatgtagctgatgaaaatgacattaactgggatctgttagctgagggatggagtagtgtccgttcaccacaatggctacgaagtaaatggtggaccatcaaaaggcaaattgcaaaccataaggatgtttcgttccctgtcttaataaaaggtcttaaacagttacatgagaaccaaaaaaacaacccaacgcttttggagaataaatcaggatctggagttccaaacagtaataccaattccagtgtgcagcatgttcagataagagttgcccgcttggaagataatacagccatctcttctagccccatggcagcattgcagattccagtccagatcacccatgtttcttcagcagactctcctgctaccgttgactcagaaacaataacactaaacagtggaacactacagacatttgagattcttccctctttccatctacagcccactggcactccaggcacctacctacttcaaacaagctcaagccaaggccttcccctaactctgactgctagtcccacagtaaccctgacagctgctgctccttgcnttctcctgaacagattattgttcatgctttatccccagaacatttgttgaacacaagtgataatgttacaggtgcagtgtcacacaccaagagtcatcattcagactgttgccacagaggacatcacttcttccatatcccaaggcaggaactgaccgtcgatagtgatattcagttcattctggattttcctgagcctccagacgccctagaaggcaaacactttcccagatgaaattcatcaccctaagatgactgtggagccatcatttaatgatgctcatgtatccaaattcagtgaccaaaatagcacagaactgatgaatagtgttatggtcagaacagaaaaagaaatctctgacaccgaccttaaacaagaggaatcaccctctgatttagccagtgcttatgttactgagggtttagagtctcccactatagaagaacaagttgatcaaacaattgatgatgaaacaatacttatcgttccttcaccacatggctttatccaggcatctgatgttatagatactgaatctgtcttgcctttgacaacactaacagatcccatactccaacatcatcaggaagaatcaaatatcattggatcatccttgggcagtcctgtttcagaagattcaaaggatgtcgaagatttggtaaactgtcattagaataattcttagaaataggcagttcaagcaaagaaggcacactgttaattacaacctcttcaaagaaataggagcaacccccaagaggcttaatttaccaatttaaatagccacagtccttaagccacacacattgttgctgctatgactttttacctcctttaaacacatcatctgaggttgagttttatgacagtatgtagttgagtggaggctgggagttttaagcataaatccctgtttagtgttacatgggaataaggaatttcattcacttcagccactaagaaaagtttagaatcacgaaagcttaactgctgtggtttaaagtacagtttctctaaagatcagacatggcactgtctcctctcaagcctggttgtagttcagatgagtcttttcaacatggtcttcaacatggtctagagcttaccagtgatcttctgatcttcaagaagactaagtttgagacttgaccagcatacaagtatagagacctaggaggtggtcttgtggtggtacatttggttaacccattgctggcagtgggagctgatttaggcagggtaaacaggaaagcattaaaagttaaaattcactacaggttttttgttacttttaaagggaatatggataagcatagtaacaaaacccaccagaatctaagcagttttcaccccctcagaaaccactgtcattagtttacaaagttagcactttgaagtaaaactaaatgaggaaggaagtaatgttacctatccttgataccatgaccatttattagatgttttgctatataaattaccgagagaatagtttgtcatccacttagtgtgttagctggtggggtacaatataacctctcatctcaggctattttaaaaaaacaatatttgcttctataacaaaaggaaacaaatctaagaatcattcctgtactacagaagggttaaggcaaaggtagccttttgggctttttaatgaatatgacccctatagaaaagtcaagaaaaaaaaacccttgtataaattattttatttattattgtaattagatcttcacaaagttgtcttttcactgtgttttgtcaacgtgaaattaaattgtagttataagcaaaagttggttgcctagggaacaattgtatattcagtttaacagaaataaaagaatatttgtcttaagatgcaagatttgtttttacatagccttttgccatacaattataaaaatttcatttcaaaagtgaaatttttttgtgctgttttagctttaagggttggaatgtttaggtgcaacatcagctccttaaagaaaaagcaaagtgatctaggatatgtctcccttgcaagagggaattaacatttacaattaacatgaaaatcatgtatcagacttctgcaggagattcttcagcataccttatccaaaaattactcactgtcctaatgtatcattttgaagagtcctggtaagtacttctccttggcagcctcaccttcccacatcatggaagtacaggtttgcacatatacacaacatgatgatagaaaatatgatatagtaaattagctttctaaatttcggttctaagtctccttgtcgataccagtagataagtatgcaggcagtaatactactcaaagagatgcagacagcaaagaatatattcaacggttttggaggtagttgagggaaaacaaaagcacttatcagcgttactagaatcaataaggatgttaagctgccaacaactaaattgatgattcgatccttggcggacgtctccccaaacagaggtctgttgtccaggccactggtgccgtaggtcctggtagcaaagtcctccattttggggtttcttcactttccccaagccacttaaaagcaagacagcatgacctcccgaggtctcaggtccacgactgcaagcctcctcctcacggctcccgcatagccgaacccgagtggtcggggaagcgctggcgccagggatgggtgggggctcacacgcggggaacgcgactgctccgccccggccccgcgcacctcctcatcttgagcagctcggcatcccctaggcgctcgcacgctggggggccctggccgcgccggggagagtgggccctgggtccacacccccgccgggatccggtgccgaggcccaggaacgcgggccagatgcgtgggagaggaatcgagcggtcccgtcgcagcgctgcggatca

SEQ ID NO: 89744 - DNA, 4712 bp, Homo sapiens
  misc_feature (1)...(4712): n = a,t,c or g
tttcgtgcggctgccgaggcacagcggcgattcggcgttggcggaaaatggcggcggcttcggaggagctaaatggcgccgggacccctggggggtggggtgggccgggaggttgagtagagaactgggccagaaggagtggagacaaaagcacaaaaaccagcctgattgtatctggaaaaaaccattatgttacagttgataggctcaccccaaaatatgcttttggggactgatttagcacctgcatattctgcgtgaatctctttaattggttgcagttgagctaatggtggagccaaaatgctattgccctgtcttcatcaacatttaatcaagtgttgcggagataggaacatgggagagaaacaatctgggtaacatgaaagtgatgctggttgctaagggaaggcaacttgattctgtgggaagggctgtagctgatccatccgttgtctagatttgagtatgagcacagtggaagaggattctgacacagtaacagtagaaactgtgaactctgtgactttgactcaggacacagaagggaatctcattcttcactgccctcagaatgaagcggatgaaatagactcagaagatagtattgaacctccacataaaaggctttgtttgtcctctgaggatgatcagagtattgatgattctactccttgcatatcagttgttgcacttccactttcagaaaatgatcagagctttgaagtgaccatgactgcgaccacagaagtagcagatgatgaggttactgaggggactgtgacacagatacagattttgcagaatgagcaactagatgaaatatctcccttgggtaacgaggaagtttcagcagttagccaagcatggtttacaactaaagaagataaggattctctgactaataaaggacataaatggaagcaggggatgtggtccaaggaagaaattgatattttgatgaacaatattgaacgctatcttaaggcacgcggaataaaagatgctacagaaatcatctttgagatgtcaaaagacgaaagaaaagatttctacaggactatagcatggggtctgaaccggcctttgtttgcagtttatagaagagtgcttcgcatgtatgatgacagaaaccatgtgggaaaatatacacctgaagaaattgagaagctcaaggagctccggataaagcatggcaatgactgggcaacaataggggcggcgctaggaagaagtgcatcttctgtcaaagatcggtgccgactgatgaaggatacttgcaacacagggaagtggacagaagaagaagaaaagagacttgcagaagtggttcatgagttgacaagcactgagcccaggtgacatagtcacacagggtgtgtcttgggcagctgtggctgaacgagtcggtacccgctcagaaaagcaatgtcgttctaaatggctcaactacctgaattggaaacagagtgggggtactgaatggaccaaggaagatgaaatcaatctcatcctcaggatagcagaacttgatgtagctgatgaaaatgacattaactgggatctgttagctgagggatggagtagtgtccgttcaccacaatggctacgaagtaaatggtggaccatcaaaaggcaaattgcaaaccataaggatgtttcgttccctgtcttaataaaaggtcttaaacagttacatgagaaccaaaaaaacaacccaacgcttttggagaataaatcaggatctggagttccaaacagtaataccaattccagtgtgcagcatgttcagataagagttgcccgcttggaagataatacagccatctcttctagccccatggcagcattgcagattccagtccagatcacccatgtttcttcagcagactctcctgctaccgttgactcagaaacaataacactaaacagtggaacactacagacatttgagattcttccctctttccatctacagcccactggcactccaggcacctacctacttcaaacaagctcaagccaaggccttcccctaactctgactgctagtcccacagtaaccctgacagctgctgctccttgcnttctcctgaacagattattgttcatgctttatccccagaacatttgttgaacacaagtgataatgttacaggtgcagtgtcacacaccaagagtcatcattcagactgttgccacagaggacatcacttcttccatatcccaaggcaggaactgaccgtcgatagtgatattcagttcattctggattttcctgagcctccagacgccctagaaggcaaacactttcccagatgaaattcatcaccctaagatgactgtggagccatcatttaatgatgctcatgtatccaaattcagtgaccaaaatagcacagaactgatgaatagtgttatggtcagaacagaaaaagaaatctctgacaccgaccttaaacaagaggaatcaccctctgatttagccagtgcttatgttactgagggtttagagtctcccactatagaagaacaagttgatcaaacaattgatgatgaaacaatacttatcgttccttcaccacatggctttatccaggcatctgatgttatagatactgaatctgtcttgcctttgacaacactaacagatcccatactccaacatcatcaggaagaatcaaatatcattggatcatccttgggcagtcctgtttcagaagattcaaaggatgtcgaagatttggtaaactgtcattagaataattcttagaaataggcagttcaagcaaagaaggcacactgttaattacaacctcttcaaagaaataggagcaacccccaagaggcttaatttaccaatttaaatagccacagtccttaagccacacacattgttgctgctatgactttttacctcctttaaacacatcatctgaggttgagttttatgacagtatgtagttgagtggaggctgggagttttaagcataaatccctgtttagtgttacatgggaataaggaatttcattcacttcagccactaagaaaagtttagaatcacgaaagcttaactgctgtggtttaaagtacagtttctctaaagatcagacatggcactgtctcctctcaagcctggttgtagttcagatgagtcttttcaacatggtcttcaacatggtctagagcttaccagtgatcttctgatcttcaagaagactaagtttgagacttgaccagcatacaagtatagagacctaggaggtggtcttgtggtggtacatttggttaacccattgctggcagtgggagctgatttaggcagggtaaacaggaaagcattaaaagttaaaattcactacaggttttttgttacttttaaagggaatatggataagcatagtaacaaaacccaccagaatctaagcagttttcaccccctcagaaaccactgtcattagtttacaaagttagcactttgaagtaaaactaaatgaggaaggaagtaatgttacctatccttgataccatgaccatttattagatgttttgctatataaattaccgagagaatagtttgtcatccacttagtgtgttagctggtggggtacaatataacctctcatctcaggctattttaaaaaaacaatatttgcttctataacaaaaggaaacaaatctaagaatcattcctgtactacagaagggttaaggcaaaggtagccttttgggctttttaatgaatatgacccctatagaaaagtcaagaaaaaaaaacccttgtataaattattttatttattattgtaattagatcttcacaaagttgtcttttcactgtgttttgtcaacgtgaaattaaattgtagttataagcaaaagttggttgcctagggaacaattgtatattcagtttaacagaaataaaagaatatttgtcttaagatgcaagatttgtttttacatagccttttgccatacaattataaaaatttcatttcaaaagtgaaatttttttgtgctgttttagctttaagggttggaatgtttaggtgcaacatcagctccttaaagaaaaagcaaagtgatctaggatatgtctcccttgcaagagggaattaacatttacaattaacatgaaaatcatgtatcagacttctgcaggagattcttcagcataccttatccaaaaattactcactgtcctaatgtatcattttgaagagtcctggtaagtacttctccttggcagcctcaccttcccacatcatggaagtacaggtttgcacatatacacaacatgatgatagaaaatatgatatagtaaattagctttctaaatttcggttctaagtctccttgtcgataccagtagataagtatgcaggcagtaatactactcaaagagatgcagacagcaaagaatatattcaacggttttggaggtagttgagggaaaacaaaagcacttatcagcgttactagaatcaataaggatgttaagctgccaacaactaaattgatgattcgatccttggcggacgtctccccaaacagaggtctgttgtccaggccactggtgccgtaggtcctggtagcaaagtcctccattttggggtttctccactttccccaagccacttaaaagcaagacagcatgacctcccgaggtctcaggtccacgactgcaagcctcctcctcacacgaaa

SEQ ID NO: 89745 - DNA, 2291 bp, Homo sapiens
tgactgcccctttctctttctttctcagaaatgcctctaccgctgctgccgatggacctgaagggagagcccggcccccctgggaagcccgggccctggggtccccctggcccccctggcttcccaggaaaaccaggccatggaaagccaggactccatgggcagcctggccctgctgggccccctggcttctcccggatgggcaaggctggtcccccagggctccctggcaacgtcgggccaccagggcagccggggcttcggggggagccaggaatacgaggggaccagggcctccggggacccccaggaccccctggcctcccgggcccctcaggcattactatccctggaaaaccaggtgcccaaggggtgccagggcccccaggattccagggggaaccagggccccagggggagcctgggcccccaggtgatcgaggcctcaagggggataatggagtgggccagcccgggctgcctggggccccagggcaggggggtgcccccggcccccccggcctccctggtccagctggcttaggcaaacctggtttggatgggcttcctggggccccaggagacaagggtgagtctgggcctcctggagttccaggccccaggggggagccaggagctgtgggcccaaaaggacctcctggagtagacggtgtgggagtcccaggggcagcagggttgccaggaccacagggcccatcaggggccaaaggggagccaggaacccggggcccccctgggctgataggccccactggctatgggatgccaggactgccaggccccaagggggacaggggcccagctggggtcccaggactcttgggggacaggggtgagccaggggaggatggggagccaggggagcagggcccacagggtcttgggggtccccctgggcttcctgggtctgcagggcttcctggcagacgtgggccccctgggcctaagggtgaggcagggcctggaggacccccaggagtgcctggcattcgaggtgaccaggggcctagtgggctggctgggaaaccaggggtcccaggtgagaggggacttcctggggcccatggaccccctggaccaactgggcccaagggtgagccgggtttcacgggtcgccctggaggaccaggggtggcaggagccctggggcagaaaggtgacttggggctccctgggcagcctggcctgaggggtccctcaggaatcccaggactccagggtccagctggccctattggcccccaaggcctgccgggcctgaagggggaaccaggcctgccagggccccctggagaggggagagcaggggaacctggcacggctgggcccacgggggcccccaggggtccctggctcccctggaatcacggggcctccggggcctcccgggaccccctggtgcccctggggccttcgatgagactggcatcgcaggcttgcacctgcccaacggcggtgtggagggtgccgtgctgggcaaggggggcaagccacagtttgggctgggcgagctgtctgcccatgccacaccggccttcactgcggtgctcacctcgcccttacccgcctcgggcatgcccgtgaaatttgaccggactctctacaatggccacagcggctacaacccagccactggcatcttcacctgccctgtgggcggcgtctactactttgcttaccatgtgcacgtcaagggcaccaacgtgtgggtggccctgtacaagaacaacgtgccggccacctatacctacgatgagtacaagaagggctacctggaccaggcatctggtggggccgtgctccagctgcggcccaacgaccaggtctgggtgcagatgccgtcggaccaggccaacggcctctactccacggagtacatccactcctccttttcaggattcttgctctgccccacataacccgcggggggtgtcctgctgccctggcctcctcccctttagtggtagagcgaccttttcaattacaaagaacctcctggaaaaaaaaacaaaagctgaacagaggcggccgtggccttggcccgaggagactaacttgctttctccctgcatgcaggctgagattgtttctggaaggggctggcctgagtttctttcccccaaatgtctgtgcagtgtcagggctgcaccccataggccctgaggcacacagcccagccccttgtgagtcctggcctctgctgggccctgaaggagctgagagggagctcaactccccaccccgccacgtggggagaccgcccttccccc

SEQ ID NO: 89746 - DNA, 7028 bp, Homo sapiens; identical to SEQ ID NO: 60576

SEQ ID NO: 89747 - DNA, 1744 bp, Homo sapiens; identical to SEQ ID NO: 60725

SEQ ID NO: 89748 - DNA, 2377 bp, Homo sapiens
tatgtgttgaagcccactttcacaaagcagcaaattgcaaacttggacaagcaagccaaattgtcccgggcatatgatggtaccacttacctgccgggtattgtgggactgaataacataaaggccaatgattatgccaacgctgtccttcagcgtgcttggcgcctgcgctggacgactcggccggtagtggagatgtccggccggtctaagcgggagtctcgcggttccactcgcgggaagcgagagtctgagtcgcggggcagctccggtcgcgtcaagcgggagcgagatcgggagcgggagcctgaggcggcgagctcccggggcagccctgtgcgcgtgaagcgggagttcgagccggcgagcgcgcgcgaggccccggcttctgttgtcccgtttgtgcgggtgaagcgggagcgcgaggtcgatgaggactcggagcctgagcgggaggtgcgagcaaagaatggccgagtggattctgaggaccggaggagccgccactgcccgtacctggacaccattaacaggagtgtgctggactttgactttgagaaactgtgttctatctccctctcacacatcaatgcttatgcctgtctggtgtgtggcaagtactttcaaggccggggtttgaagtctcacgcctacattcacagtgtccagtttagccaccatgttttcctcaacctccacaccctcaagttttactgccttccagacaactatgagatcatcgattcctcattggaggatatcacgtatgtgttgaagcccactttcacaaagcagcaaattgcaaacttggacaagcaagccaaattgtcccgggcatatgatggtaccacttacctgccgggtattgtgggactgaataacataaaggccaatgattatgccaacgctgtccttcaggctctatctaatgttcctcctctccggaactactttctggaagaagacaattataagaacatcaaacgtcctccaggggatatcatgttcttgttggtccagcgttttggagagctgatgagaaagctctggaaccctcgaaatttcaaggcacatgtgtctccccatgagatgcttcaggcagttgtactttgcagtaagaagacttttcagatcaccaaacaaggagatggcgttgactttctgtcttggtttctgaatgctctgcactcagctctggggggcacaaagaagaaaaagaagactattgtgactgatgttttccaggggtccatgaggatcttcactaaaaagcttccccatcctgatctgccagcagaagaaaaagagcagttgctccataatgacgagtaccaggagacaatggtggagtccacttttatgtacctgacgctggaccttcctactgcccccctctacaaggacgagaaggagcagctcatcattccccaagtgccactcttcaacatcctggctaagttcaatggcatcactgagaaggaatataagacttacaaggagaactttctgaagcgcttccagcttaccaagttgcctccatatctaatcttttgtatcaagagattcactaagaacaacttctttgttgagaagaatccaactattgtcaatttccctattacaaatgtggatctgagagaatacttgtctgaagaagtacaagcagtacacaagaataccacctatgacctcattgccaacatcgtgcatgacggcaagccctccgagggctcctaccggatccacgtgcttcatcatgggacaggcaaatggtatgaattacaagacctccaggtgactgacatccttccccagatgatcacactgtcagaggcttacattcagatttggaagaggcgagataatgatgaaaccaaccagcagggggcttgaaggaggcgtctagggctttgctcccaagggctgtggctgatgatggtaaataagaacacagaagctgtagctgaacacaggctggctggtgggcttcctaggccagcccagcttgtatgggttctggctacaccagagcaccaagagcccacttgcctgggatggccccacactgtcactcagctgttctttgatcatttttttctagattgatgctcctttctcccatgcattgagctcccatctagcttcagcagggcagaacccttctccagatgtgtgtaacttatgtcttgagtatctgggagtagttgaagaacagataattccttccaaacatcaagccttgggattcttggagcaagcagaaagccagtaacttcgctctgttagaggtggaggattttcctatggttccccccatttcctgatttgtatttttagatggattaaatagtctcctgtttttaaaccaaaaaaaaaa

SEQ ID NO: 89749 - DNA, 1140 bp, Homo sapiens
tgactctgctctctgtcctgtctcctcatctgcaaaattaggaagcctgtcttgattatctccaggaacctcccaccttttcattccagcctctgacaaactctgcacattaggccaggagaagcccccgagccaagtctcttttctcattctcttccaacaagtgcttggagctccaagaaggccccctttgcactatgagcaaccaggtgctctgctgtgtggtcctttgtttcctgggagcaaacaccgtggatggtggaatcactcagtccccaaagtacctgttcagaaaggaaggacagaatgtgaccctgagttgtgaacagaatttgaaccacgatgccatgtactggtaccgacaggacccagggcaagggctgagattgatctactactcacagatagtaaatgactttcagaaaggagatatagctgaagggtacagcgtctctcgggagaagaaggaatcctttcctctcactgtgacatcggcccaaaagaacccgacagctttctatctctgtgccagtagtataggggcagggctcccttatagcaatcagccccagcattttggtgatgggactcgactctccatcctagaggacctgaacaaggtgttcccacccgaggtcgctgtgtttgagccatcagaagcagagatctcccacacccaaaaggccacactggtgtgcctggccacaggcttcttccctgaccacgtggagctgagctggtgggtgaatgggaaggaggtgcacagtggggtcagcacggacccgcagcccctcaaggagcagcccgccctcaatgactccagatactgcctgagcagccgcctgagggtctcggccaccttctggcagaacccccgaaaccacttccgttgccaagtccagttctacgggctctcggagaatgacgagtggacccaggatagggccaaacccgtcacccagatcgtcagcgccgaggcctggggtagagcagactgtggctttacctcggtgtcctaccaacaaggggtcctgtcttgccaccatcctctatgagatcctactagggaaggccaccctgtatgctgtgctggtcagcgcccttgtgttgatggccatggtcaagagaaaggatttctga

SEQ ID NO: 89750 - DNA, 8461 bp, Homo sapiens; identical to SEQ ID NO: 60719

SEQ ID NO: 89751 - DNA, 1734 bp, Homo sapiens
ttttttttttttggaaacaaatcaatgtgaagagactttaatggcaaagtgcactggagagttaaaatggttacatgggtaatttaagaaaaaatttagtgggaaaaagggaaagggctgaactgccaaaataattttcttatccagttttacatttgctttctccatgtgctacaattatagacacctgatagttcctagccttagacataacttgcagcatcagccactctgctgcactttagatcacattagttagggctagagcccagccccatttacacggcatctgatgaatggttagctgtggcagttctaccataatgccattttgctccaaagaaatccagttaagtggctgtccatggcccagtagtttcacctctgttgcccccagaatagctttgggatggccaaggaacagctgtcctgatgtgggccatttaagaaaaatggcatagactaatttttctttaggcttggatgtgtaccacacatctggggtgacagtgtcattctgggatcgccaggtatgggtttcataaatagcttctccattgacttttagccaggaccccatttgcctcagtcgctcctcaaaaactacagaaatggtgccatctagtgtgggcccaatattcatcaaaagatttcctccacatgaaactgtctctacaagttgcttcaccaattcttcaattgtaagatagtcagagattccagcttccctcctatagccccaggacagtttgtctattgtcatgcagttttcccatttatgtggcaaaagatgtcctgggttataacgatcactgcaggtatagaagccaccatgcttacagatgctaccagctccccaacgatcattggtgactactgtgccccgaactgggctttcattatataaccaggccaagaagcctgtgctgttccagtattgatccggtgctcctccgtcaccatccgaccacagaacctcaggctgatagttgttcactaactcatagagctctggcaatgtcttagaaactggaaattgccgcttatggaatgaactggattcatcctcaaggaagagcggatgaaaccattcaaaaagggaatagtacagtccaaaacgcaggtcagttctgttcctaatggctacctcaagttccttgacaatgtccctcttgggcccctcatctatggcattccagttccacgaatattctgaccccccacaaggtaaagccttcatgatgtttggaagttaagacaatgtatttggcaccagaggcctgaaaaatatctgcccaactggttggcattaaaaaattttgctgtaaatagtggtccaaaatcttcatatttgaaactaggagggtaattatctttcataaattccacatacttcggtatcttttccttttgccaataccaccagaaccactcgctaccgaagctgggcacggaaaacactccccagtggatgaagatgccgaacttggcctggtcaaaccacgcgggcagctggcgggcgtccagggactcccaggtggggtcgaagcgcgtggcgctgtgggcagggcacggcggcggcggcagcagcagcaacagcaacagcagcaacgggaacgcgagcctggggagctcctggggccgcatgtcccggcgcaggccggctgtcctctctgcaggctcccgcggcctcgggagcgctgttcttccgtctctgccgctgagtatgccgcc

SEQ ID NO: 89752 - DNA, 5117 bp, Homo sapiens
gtgatggtgtttgtacatgctcgaaatgccactgtaagaacagctatgtctctaatagaaagagcaaaaaattgtggccatattcccttcttttttcctacccaaggacatgactatgtacttgcagaaaaacaggtacaaaggtcgagaaataagcaagtacgagaattattcccagatggttttagtattcatcatgcaggaatgcttcggcaggacagaaatttagttgaaaacttgttttctaatgggcatatcaaagtcctagtgtgtacagctacgttagcctggggtgtcaatcttcccgcccatgctgttattattaagggaacccaaatatatgctgcaaaaagaggctcctttgttgcccttggaattttagatgtcatgcagatatttggtcgagctggacgcccccaatttgacaaatttggggaaggaataattataacaacgcatgataaactcagccattccctccctttgctcactcaacgaaacccaattgagagtcagtttctggaaagccttgcagataacctaaatgcagagattgctctgggaacagttactaatgtggaagaagcagtgaagtggataagttacacttatctttatgtacggatgagagcaaatccattagcatatggcatcagtcacaaggcttatcagattgacccaccattaaagaaagcatcgagaacagtttggtcattgaaggttggacgaaaactagacaaaagctcagatgattcgttttgaggagcgaactggatatttttcctcaactgatttgggtagaactgccagccattactatattaaatacaacaccattgagacctttaatgaactctttgatgctcacaaaacagaaggtgatatctttgccatagtctccaaagctgaagaatttgatcaaattaaggtcagagaagaggaaatagaggagttagataccttattaagcaatttttgtgaactctccactcctggaggtgtagagaatagttatgggaaaataaacatcttacttcaaacttatatcaaccgaggagaaatggacagtttctcccttatatcagattctgcatatgttgcacagaatgcagctagaattgtccgtgctctttttgaaattgctctgaggaaacgttggcctaccatgacctacaggctcctgaatcttagtaaagccattgacaagaggctttggggttgggctagccctttgagacaattttcaatcctaccaccacacatgctaacaagattagaagaaaaaaagcttactgtggataagctgaaagacatgaggaaagatgaaataggtcacattttacatcatgtgaatattggactgaaggtcaaacaatgtgttcatcagattccttctgttatgatggaagcatccattcagcctatcacaaggactgtcctccgagtgacactcagcatctatgctgatttcacttggaatgatcaggtacatgggacagtaggagaaccttggtggatttgggtagaagatcctacaaatgatcatatttatcattcagagtattttctagctctaaaaaaacaagtcattagtaaagaagcccaactactggtatttacaatccctatttttgagcctttgccttcccaatactacatccgagcagtgtctgatagatggttgggtgctgaggcagtatgtattatcaactttcaacatctaattctaccagagagacatcctcctcatacagaattactggatcttcagcctttaccaatcacagctttgggatgtaaagcatatgaagccctgtacaacttcagccactttaaccctgtacagacacaaatatttcatacattgtatcacacggattgtaatgtcctacttggagcacctactggatcgggaaagactgttgcagctgaattagccattttcagagtcttcaacaaataccctacttcaaaggcggtatatattgcacccctaaaagccctagtacgtgaaagaatggatgattggaaagttagaatagaagaaaaacttggtaaaaaagttattgaactaacaggggatgtgactcctgatatgaaatccattgccaaggctgaccttatcgtcactacgccagagaagtgggatggagtcagcagaagctggcaaaataggaactatgttcagcaagtcactattctcatcatagatgagatccatctgcttggggaggaaagaggccctgttctagaggtcattgtatctcgaacaaattttatctcatcacacacagaaaagcctgttagaatagttggactatctactgcattagctaatgccagagaccttgctgattggctcaatattaagcagatgggcttgtttaacttccgaccatcagtacgcccagttccactggaagttcacattcaaggctttccaggtcaacattactgtcctcgtatggctagtatgaacaagcctgcatttcaggcaattagaagccattctccagccaaacctgttttgatatttgtctcatcaagacgtcaaactcgtcttactgctttggaattgatcgccttcctggctactgaagaagatccaaagcagtggttaaacatggatgaaagagagatggagaacatcattgcaacagtaagagattccaacctcaagctgacccttgctttcgggataggaatgcatcatgctggactacatgagagggaccgaaaaacagtagaggaactatttgtaaactgtaaagttcaggttcttattgctacaagcacattagcctggggtgtaaactttccagctcatttagtaattattaagggaacagaatactatgatggaaaaacaagacgttatgtggattttcccattacagatgtcctccagatgatggggcgtgctgggaggccgcagttcgatgaccaaggcaaagctgtaattctagttcatgacataaagaaagacttttataaaaaatttctttatgaacctttcccagtagaatcaagtttattaggagtgctctctgaccacttaaatgcagagattgctggtggtacaattacatctaagcaagatgcattggattatatcacctggacttactttttccgacgtcttatcatgaatcccagctattacaatttgggtgatgtgagccatgattctgtgaacaagtttctgtcccatctgattgagaagtccctgattgaattggaactttcctactgtattgaaattggagaggataatcgcagcattgaacctctaacttatggccgaattgcctcctattactatttgaagcatcaaacagttaaaatgttcaaggaccgcttgaagcctgaatgcagtactgaagaactgctttcaattctaagtgatgcagaagaatatacagatttgccagtgagacacaatgaagatcatatgaatagtgaactggcaaaatgtcttcccattgaatcaaatcctcattcatttgacagccctcacaccaaagcacatctcctgctacaggcacatctcagccgagccatgctaccctgcccagattatgacactgataccaaaacagtcttggaccaagctctcagagtatgtcaggcaatgctggacgtggctgcaaaccagggctggctggtgactgtcctgaatatcaccaacctgattcagatggtgatccagggtcggtggttaaaggactcttctcttcttacactaccaaacatagaaaaccatcatcttcaccttttcaagaaatggaagccgattatgaagggcccacatgctaggggtcggacctccatcgagtgccttcctgaactgatccatgcctgtggagggaaagaccatgtatttagctccatggtagaaagtgagctacatgctgcaaaaacgaaacaggcatggaatttcttatctcacttgccagagataaatgttggcataagtgttaaaggctcgtgggatgacttagttgaaggacataatgaactctctgtctcaactctgactgcagacaaacgagatgacaacaaatggatcaaattgcatgctgaccaagagtatgtgcttcaagtgagcttgcagagagtccactttgggttccacaagggaaagccagagagctgtgcagttactcctcgatttcccaaatcaaaagacgaaggatggtttttgatattaggagaagtggataagagagaacttattgctttgaaaagagtaggatatattcgaaatcatcatgttgcttccctttctttttatacccctgaaatacctggaaggtatatctacacattatatttcatgagtgactgctaccttggcctggaccagcagtatgacatctatctcaacgttacacaagcgagtctttctgcacaggtcaacaccaaggtctctgattccctgactgacctggcattaaagtaacttgacctgaacaatccatttgaaaggagtggctaagaattctctctgttcagtcatctagacaaatcgaattacttgatgtttgccttgaaagaatcaacttctaacctcaaccatccaggaaattgacagtggctgcagtattgactccagtgacataaagttaaccacagtggccttttaacaaatgttgccttttataatgttatctttatgagtttcttgatatgtaagatgaaaaagcatttagaataatcttttaatttgtgtatatttgggatgatatttaggagctatcaatcaaattttacatctcacaatgtactgtttacatggatattggctgctttttttaaggaaaaccacattgagatgtgacaagtgttaggacttgtcacagatttctaactctgccgcataaactataaatctgtaaggcggtacacagcgtgtcttgttagcaaaatttatactttgatatgatcacatgtagaagtagcttcaagaatttcttgtagtcataaatgtttaataatatatgatgtaaaattatattatggagcctaatgatgataacaaagaaaacaatatactgatcttagaaaatgtagacatggttaactgggaaataaaatatagagtggcacttcaagac

SEQ ID NO: 89753 - DNA, 3821 bp, Homo sapiens; identical to SEQ ID NO: 61178

SEQ ID NO: 89754 - DNA, 2350 bp, Homo sapiens
ttttttttttttaccaaaagaaatctttattcttcagcaggtagacaacatctgccagccctggtcctcagggccacactcatatgcactcacccctcagcagcatatcgccccttttctgacatataaatgcaagagacccaggaccctagatctttcttcaaacgcaagtgtctcacacacacttattttacaaatccactagaaatatggactcttatgttctttgtacagccatgcaacagaggcctagcatttgtgctgtgtctgtgggaaaggcagtcagagaccagtggtttccctgctttggggaagatggctcaacagttagtaatcccaggttagattgtcagaacagtctaggccaggactgagggctcagctgccagggctccccaacagaaaccactcccctctggctgacactgcttccttgcgcaccagtctcttcttgtcatccaggggtttggctaaggcccgaatcacctgtggtttgtacggcagcagcacaggggtgggcaggcgagtgagagcatgcatgcactgcagtgcggcgatccggacagccatggaagggctagagctgaggttcagaaacttggtgacgagggtgtccacgtgaagactcatgacttggggtgcttccagtagaagaggctgaaggcagctgagggtggagagctgcaccacacagtcagggcaggacagggcctccagcagcaaggaaagaagcgtgggcagctctggcaagagtacaggcttgggcagcctgttaagtacatgagaaagacccttcaagtagtttggcttcacatcttggggagcagcatggaagccctggaccaaagcaggcacattatctgtgaagaaccgctggcggaacatgatccgcacttcggcatggccagcacgagtcagcacatcagtgcagtcagacatgagcagagagaagccatcagctgctgctggacctaattctgggtcactcaggaggcccatgagccgggctgtaaggcaggagctgagaggatggtatctgagcactagggcctttgttacccagagaagaagagtgaaggcctgactacgacagggcccagagcccaggccagcctccactttgtccacagctagctgtaggaattcatccagctgctgccctgcagggtgcttgttgaggagtcctgcaaagcacttggcagcagcggtggaagaaaaggggcagctgtggcagcagctcagttccaaaagctcccgcatgagttggttcagctgagggatttccacatttcgaggcagggagcagacaaaggccataagcagtgcaatcagccgcctctgccctgaggagccatcctggaatggctggaatctgctcgggaagctgttttcaggcagaaaggacacgttgccatccaagaagaggggcacaatgtgtgtcacactctgggcagctaactcagggctcaggtgggttgtagcagtgccaatgacagacaccatggcagccaacacctcatcctccaatagtacttttctcagaactgagggctccttctctggcatagaggcctgcacagccaaggcaagcaggcaaggtatagctgtctggtggaaataccagcaactctcagggtcctgctgacatttttctgccatctgtctgaggctctgacagacagcaataacgtcactggattgtgcaaccatattccctctgttcacttgccagagatgctgcagcagcagaggcagtgtctccttgacgatgctgggatgtgttgatacagctgacaaggcttgcagacagcacagatgccgggagcattgggtgggctcatctccgttagtcaaatttgactcccctacacgcagctcctcagcgagcttgggtacgaggtggctgctgaaggccacagggtagagagcagccagggttcctgatgcttccagtgctgccaccctgcaactctgggaatcctccttcaggaagctcagtctgtacaggtgacccactgccagctccaagtcctcataagataggagatctggctgggcacccaagactgtcagtgtacggatgccaacaagctgaagctgggtgctggggtctgttagagccatgaataccagtgagcacagctggtccttgaagccattcagaggcctttgatctttgtcttcatagctccatttctgctgcagcttcaagaaacccaggagcatttcaaggattgtccgccgctggctgctctgactgtgcttgtggaactgttccagcagtaaaggcagtacattgctggtgacagagtcacaggcccgggcagatgcacctgcagctgcctgcaac

SEQ ID NO: 89755 - DNA, 1121 bp, Homo sapiens; identical to SEQ ID NO: 60913

SEQ ID NO: 89756 - DNA, 1612 bp, Homo sapiens; identical to SEQ ID NO: 60757
  misc_feature (1)...(1612): n = a,t,c or g

SEQ ID NO: 89757 - DNA, 4790 bp, Homo sapiens; identical to SEQ ID NO: 60981

SEQ ID NO: 89758 - DNA, 4994 bp, Homo sapiens; identical to SEQ ID NO: 80921

SEQ ID NO: 89759 - DNA, 790 bp, Homo sapiens; identical to SEQ ID NO: 61091

SEQ ID NO: 89760 - DNA, 897 bp, Homo sapiens
  misc_feature (1)...(897): n = a,t,c or g
ctatgttcccaaatggtctccctacctttgtcccctccttccaacccatgacactcctcctgccagataaagattctcaaggcctggctcttggcatgttgttcctctactctaaaactccccaaaacttgtcacagcctgctggaccaagccccatctcctctctatcacagctgggtccccagagcctggccctgcagaccttgccaccacagttacaccccagtcccccttctgataccccgtctgccccaatgcttaccacccttgccaactcagcctccagccctctcgtcagccgcctccttcctaaaacctccctcctctgggctccatggcccccactctccaggttttccttctgcctcttggcctgccccccatggtccacttcaggggcttctcttcttctggccatggtctctaaagtcccaagctcagcccttttctctctctaccttctcataggcaagcccttctcctctcagacattcaggtaccaactgcactccgatggcccgtgactctctcttccaggactgctcctcagagctcaagacctgcaaagccctgccagcatctgaaactccacctccccatagaaactcagcctcatccttgcagattggtgccccagggagaggcacatgctctttctcctctccaagcctttgcccaagctgtcccttctctccggaattccccctacctccctggnccatctggaaatgtccaatctccactgccatgaccattttttaaatgctacagcagtgtccccaactcaataagcccttcccgactgcacccagacataaattcctcctctgagtaccttctgggcctggagtgaggctctcactgggcctgggaacattcatctccccaccctttagc

SEQ ID NO: 89761 - DNA, 1134 bp, Homo sapiens; identical to SEQ ID NO: 60932

SEQ ID NO: 89762 - DNA, 6327 bp, Homo sapiens
tttcgtcggggatcgccggcgggcggcaagcggaggcggcccaggcccggcggtctccgagatgtcacgatggctgtggccatggtcaaactgtgtgaaagagcgggtctgccgctacttgctgcaccactacttaggtcacttcttccaagagcacctcagcctggaccagctcagcctcgatctgtacaagggcagcgttgccctgcgagacatccacctggaaatctggtctgtgaacgaggtgctggagtcaatggagtcaccgctggagctggtggaaggcttcgtgggctccatcgaggtggccgtgccctgggctgctctgctcaccgaccactgcacagtgcgcgtgtccggccttcagctcaccttgcagccccgccggggtccagcgccaggggctgccgactcacagagctgggcctcatgcatgaccacaagcctgcagctggcccaggagtgtctgcgggatgggctaccggagccctctgagccaccacagcccctggaggggctggagatgtttgcccagaccattgagactgtgcttcggaggatcaaagtgaccttcctggacactgtcgtgagggtggagcactctccgggtgatggggaacgtggtgtggccgtcgaggtccgtgtgcagagactggagtactgtgatgaggcagtgcgggacccaagccaggcgccgccggtggatgtgcatcagccgcctgccttcctgcacaagctgctgcagctggcaggggtccgcctgcactacgaggagctcccggcacaggaagagcctccagagccccccttgcagatcggcagctgctcagggtacatggagctgatggtgaagttgaagcaaaatgaggccttccctggccccaagttggaggtggcgggacagctgggctccctgcacctgctcctgaccccgaggcagctccagcaacttcaggaactgctcagcgccgtgagccttacagaccacgagggcctggctgacaagctgaacaagagccgcccgctaggtgccgaagacctgtggctgattgagcaggacctgaaccagcagctgcaggcaggggcagtggctgagcccctcagcccagacccccttaccaacccccttctcaacctggataacactgacctcttcttctccatggctggcctcacaagcagtgtggcctcagccctctctgagctctccctctccgatgtagacctggcctcctctgtgcgcagcgacatggcctcccgccggctctctgcccaggcccacccagctggcaagatggcccccaaccccctcctggacaccatgcgccctgactcgctgctgaagatgaccttggggggtgtgaccctgaccttgcttcagacgtctgccccatcttccggaccacctgacctcgccacgcactttttcaccgagtttgatgccaccaaggatgggcccttcggttcccgagacttccatcaccttcgaccacgcttccagagggcctgtccctgtagccatgttcggctaacgggcacagccgtgcagctgtcctgggagctgcggacgggcagtcggggccggcggacaaccagcatggaagtgcacttcgggcagctggaggtgctggagtgtctgtggccccggggcacctctgagcctgagtacacggagatcctgacctttcctggtacgctgggctcccaggcctcagctcggccctgcgcccatctgcgccacacacagatcctgcgccgtgtgcctaagagccgaccccggcgctcagttgcctgccattgccactcagaactggccctggacctggccaacttccaggcggacgtggagctgggggccctggaccggctggccgccctactgcgcctggccaccgtacctgctgagcctccagccggcctgctgacagagcccctgccggcgatggagcagcagacggtatttcggctctctgcaccccgggccacgctgcggctgcgcttccccattgccgacctgcggcctgagcgggacccctgggcgggccaggccgtgcgggctgagcagcttcggctggagctgagtgagccccagttccggtcagagcttagcagtgggcctggtcccccagtccccacccacctggaactcacctgctccgacctacatggtatctatgaagatggagggaagccacctgtcccttgcctgcgtgtctccaaagccctggaccccaagagcactgggcgcaagtacttcctgccccaggtagtggtgactgtgaacccccagtccagcagcacacagtgggaggtggccccggagaagggagaggaactggagctgtcagtggagagtccctgtgagctgcgggaacctgagccctcgcccttctcctctaagaggaccatgtatgagacagaggagatggtgatccctggagaccctgaggagatgaggacgttccagagccggaccctggcactgtcccgctgcagcctggaagtgatcctgcccagtgtccacatctttctgcccagcaaggaggtctacgagagcatctacaacaggatcaacaacgacctgctcatgtgggagcctgcagatctgcttcccacccccgaccccgccgcccagccctcgggcttccccggcccctcaggcttctggcacgacagctttaagatgtgcaagtcagccttcaagctggccaactgctttgatctcaccccagactcggactcggatgacgaggatgcccacttcttctcagtgggggcatcaggtggcccacaggccgctgcccctgaggccccaagtcttcacttgcagagcaccttctctacactggtgacagtgctgaaggggcggatcacagccctctgtgagaccaaggatgagggtgggaagcggctggaggctgtgcacggggagctggtgctggacatggagcacggtaccctcttcagcgtctcccagtactgtggccagccaggacttggctacttctgtctggaagctgaaaaggcaacactctaccaccgagcggccgtggatgactacccgctgcccagtcacctggaccttcccagtttcgctcccccggctcagctggccccaaccatctacccatcggaggaaggggtgaccgagcggggagcctcgggccgcaagggccagggccggggaccccacatgttgtccactgctgtgcgcatccacctggacccccacaagaatgtgaaggagttcctggtgacactgcggttgcacaaagccaccttgcgccactacatggccctgcccgagcagagctggcattcccagttgttggagttcctagacgtgctggatgaccctgtgctgggctacctgcccccgacggtcatcaccatcctgcacacacacctgttctcctgctctgtggactataggccactctacctcccagtgcgtgtcctcatcaccgcggagaccttcactctctccagcaacatcatcatggacacctccaccttcctgctcaggttcatcctcgatgactccgccttgtacctgtccgacaagtgtgaggtggagaccctggacctgcggcgagattatgtctgtgttttggatgttgacctcttggaacttgtgattaaaacctggaaagggagcaccgagggcaaactgagccagccactattcgagctgcgctgctccaacaatgtggtacacgtgcacagctgtgccgactcctgtgccctgctggtcaacctgctccagtacgtaatgagcacaggcgatctgcaccccccaccccggccccccagccccacggagatcgccggccagaaggtacagctctcggagagtcctgcctctctgccctcgtgccccccagtggagacggccctcatcaaccagcgtgacctggccgacgccctcctggacaccgagcgcagcctacgggagctggcccagccttcaggtggccacctccctcaggcgtcgcccatctccgtctacctattcccaggtgaacggagtggggccccacccccttcaccacctgtcgggggccctgctggcagcttagggtcatgctcagaggagaaggaagatgaaagggaagaggagggcgatggagacaccctggacagtgatgagttctgcatccttgatgctcccggcctgggcatcccgccccgagatggggagcctgtggtgacacagctgcatcccggccccatcgttgtgagggacggttacttctcacggccgatcggcagcacggactttgcttcgggcaactgcccatttcccagtgcccagcactcgggtggtgctacgtgaggtctccctcgtctggcacctctatgggggccgagactttggcccccaccccggccacagggcaagaactggcctctcaggtcccaggagctccccttcccgctgctctggccccaaccggccccagaactcatggcgcacgcaggggggcagcgggcggcagcaccatgtcctcatggagatccagctgagcaaggtaagcttccagcacgaggtgtacccagcggagccagccacaggccctgcggcccccagccaggagctggaggagcgaccgctgtcccgtcaggtgttcatcgtgcaggagctggaggtccaaaaccggctcgcctcctcccagatcaacaagttcctgtacctacacacgagtgagcggatgccgcgacgtgcccactctaacatgctcaccatcaaagcgctgcatgtggcccccactaccaacctgggtgggcctgagtgctgtctccgcgtctcgctgatgcccctgcggctcaatgtggaccaggatgccctcttcttcctcaaggacttcttcactagtctgggggccggcatcaaccccgtggtcccaggggagacctccgctgaggctcgccccgagactcgagcccagcccagcagccccctggaagggcaggccgaaggcgtagagaccactggttcgcaggaggccccaggaggtggacacagcccctcccctcctgaccagcagcccatctacttcagagagttccgcttcacgtctgaggtccccatctggctggattaccatggcaagcacgtcacgatggaccaggtgggcacttttgctggcctcctcatcggcctggcccaactcaactgctccgagctgaagctaaagcggctctgttgcaggcacgggctcctgggtgtggacaaggtgctgggctatgccctcaacgagtggctgcaggacatccgcaagaaccagctgcccggcctgctgggaggcgtgggccccatgcactcggttgtccagctcttccaagggttccgggacctgctgtggctgcccattgagcagtacaggaaggatggccgcctcatgcgggggctgcagcgaggggctgcctcctttggctcatccacagcctctgccgccctggaactcagcaaccggttggtacaggctatccaggccacagctgagaccgtgtatgacatcctgtccccggcagcccccgtctcccgctccctgcaggataagcgctctgcgcggaggctgcgcaggggccagcagcctgccgacctgcgggagggtgtggccaaggcctacgacacagtgcgagagggcatcttggatacagctcagaccatctgtgacgtggcatcgcggggccatgagcagaaggggctgacgggcgccgtggggggcgtgatccgccagctgcccccgactgtggtgaagccgctcatcctggccacggaggccacgtccagcctgctcgggggcatgcgcaaccagattgtccccgacgcccacaaggaccacgccctcaagtggcgctcggacagtgcccaagactgagcctggggtgcccggcacccagaggggtgctgcccaccatgctcctgagcctcccaagagctgcagcccacgggcccggcccggcctggcccttcaggggatggccactgtgaaggacgccttcccagcctgcccgttgccaatctgctgtgagaggggggcctccctgccttggggccttagccctggctctgcacttttcctccggggagaaaggacactgcccctcccccgacctgggcccacactgctgccttctcccaggacggaggcttttggaccctcggaccccatcccactcagccaagtgtctttctgtgtctggggggaggaggggatgatatccgtgtggttcgatgtattatttttaagctccgtgagtgcgtgggtcaagtgtctgcatgaagtggaataaactgcccaccgccaaaaaaaaaaaaaa

SEQ ID NO: 89763 - DNA, 3386 bp, Homo sapiens
  misc_feature (1)...(3386): n = a,t,c or g
tttgttatacaacttagtatcttattgcctaaaaaaaaatttcttatcattgtttcaaaaaagcaaaatcatggaaaatttttgttgtccaggcaaataaaaggtcattttaatttagctgcaatttcagtgttcctcactaggtggcatttaaatgtcgcctgatgtcattaagcaccatccaaaaagtctgcttcataatctattttcaagacttggtgattctgaaagttttggtttttgtgactttgtttctcaggaaaaaaaatattcctacttaaattttaagtctataattcaatttaaatatgtgtgtgtctcatccaggataggataggttgtcttctattttccattttacctatttactttttttgtaagaaaagagaaaaatgaattctaaagatgttccccatgggttttgattgtgtctaagctatgatgaccttcatataatcagcataaacataaaacaaattttttacttaacatgagtgcactttactaatcctcatgggcacagtggctcacgcctgtaatcccagcacttggggaggacaatgtgggtggatcacgaggtcaggagttcgagaacagcctggccaacatggcaacaccccatctctacaaaaaaatacaagaatcagctgggcgtggtgatgtgttcctgtaatctcagctactcgggaggcagaggcaggaggattgcttgaacccgggaggcagaggttgtagttagccgagatctcgccactgcactccagtctggacgacagagtgagactcagtctcaaataaataaataaatacataaatataaggaaaaaaataaagctgctttctcctcttcctcctctttggtctcatctggctctgctccaggcatctgccacaaagtgggtgcttacacctgctgcttttgctgggaagctcttgagtgtgttcaggcaacctctgagctctctgtggaggagcctggtcccgctgttctgctggctgagggcaaccttctggctgctagctaccaagaggagaaagcagcagctggtcctgagagggccagatgagaccaaagaggaggaagaggaccctcctctgcccaccaccccaaccagcgtgaactatcacttcactcgccagtgcaactacaaatgcggcttctgtttccacacagccaaaacatcctttgtgctgccccttgaggaagcaaagagaggattgcttttgcttaagggaggctggtattggagaagatcaacttttcaggtgggagagccatttcttcaagaccggggagaatacctgggcaagttggtgaggttctgcaaagtagagttgcggctgcccagcgtgagcattcgtgagcaatggaagcctgatccgggagaggtggttccagaattatgggtgagtatttggacattctcgctatctcctgtgacagctttgacgaggaagtcaattgtccttattggccgtggcaatgagaaagaagaaccatgtggaaaaccttcaaaagctgatggaggtggtgtagggattatagagtccctttcaagataaattctgtcattaatccgtttcaacgtggaagaggacatgacggaacagatcaaagcactaaaccctgtccgctggaaagtgttccagtgcctcttaattgaaggtgagaattgtggagaagatgctcctnagagaagcagaaagatttgttattggtgatgaagaatttgaaagattcttggagcgccacaaagaagtgtcctgcttggtgcctgaatctaaccagaagatgaaagactcctaccttattctggatgaatatatgcgctttctgaactgtagaaagggacggaaggacccttccaagtccatcctggatgttggtgtagaagaagctataaaattcagtggatttgatgaaaagatgtttctgaagcgaggaggaaaatacatatggagtaaggctgatctgaagctggattggtagagcggaaagtggaacgagacttcaacacaccagtgggaaaactcctagagtaactgccattgtctgcaatactatcccgttggtatttcccagtggctgaaaacctgattttctgctgcacgtggcatctgattacctgtggtcactgaacacacgaataacttggatagcaaatcctgagacaatggaaaaccattaactttacttcattggcttataaccttgttgttattgaaacagcacttctgtttttgagtttgttttagctaaaaagaaggaatacacacaggaataatgaccccaaaaatgcttagataaggcccctatacacaggacctgacatttagctcaatgatgcgtttgtaagaaataagctctagtgatatctgtgggggcaatatttaatttggatttgattttttaaaacaatgtttactgcgatttctatatttccattttgaaactatttcttgttccaggtttgttcatttgacagagtcagtattttttgccaaatatccagataaccagttttcacatctgagacattacaaagtatctgcctcaattatttctgctggttataatgcttttttttttttttgcttttatgccattgcagtcttgtactttttactgtgatgtacagaaatagtcaacaggatgtttccaaggacatatggatatggtaatcctaccaattttcaagaagtctctagaaagagataacacatggaaagacggcgtggtgcagcccagcccacggtgcctgttccatgaatgctggctacctatgtgtgtggtacctgttgtgtccctttctcttcaaagatccctgagcaaaacaaagatacgctttccatttgatgatggagttgacatggaggcagtgcttgcattgctttgttcgcctatcatctggccacatgaggctgtcaagcaaaagaataggagtgtagttgagtagctggttggccctacatttctgagaagtgacgggcacactgggttggcataagatatcctaaaatccacgctggaaccttgggcaaggaagaatgtgagcaagagtagagagagtgcctggatttcatgtcagtgaagccatgtcaccatatcatatttttgaatgaactctgagtcagttgaaatagggtaccatctaggtcagtttaagaagagtcagctcagagaaagcaaagcataagggaaaatgtcacgtaaactagaatcagggaacaaaatcctctccttgtggaaatatcccatgcagtttgttgatacaacttagtatcttattgcctaaaaaaaaatttcttatcattgtttcaaaaaagcaaaatcatggaaaatttttgttgtccaggcaaataaaaggtcattttaatttagctgc

SEQ ID NO: 89764 - DNA, 4688 bp, Homo sapiens
cgacgccccgggccgcccgcccgtccgcttgccaaccatggagctggaggacggtgtggtgtatcaggaggagcccggcggctccggggccgtgatgtcggagcgggtgtccggcctggccggctccatctaccgcgagttcgagcggcttatcgtgcgctatgacgaggaggtggtcaaagagctgatcccgctggtggtggctgtgctggagaacctggactcggtgttcgcgcaggaccaggagcaccaggtggagctggagctgctgcgggacgacaacgagcagctcatcacccagtacgagcgagagaaggcgctgcgcaagcacgctgaggagaaattcattgaatttgaagactctcaagaacaggaaaaaaaggacttacagacccgagtggaatctttagaatctcaaacaagacaacttgagctgaaagcgaaaaactatgctgaccagattagcatacttgaagaaagagaagcagaactgaagaaggaatataatgcattacatcaaagacacactgagatgatccataattatatggaacatttagaaagaacaaaacttcatcagctctcagggagtgatcaactagaatccacagctcatagtagaattagaaaagaacgccctatatcattaggaattttcccattacctgctggagatggattgcttacacctgatgctcagaaaggaggagagacccctggatctgagcaatggaaatttcaggaattaagtcaaccacgttctcataccagcctgaaggatgagctttctgatgttagccaaggcggatctaaagctaccactccagcatcaacagctaattcagatgtggcaacaattcctactgatactcccttaaaggaagaaaacgaaggatttgtgaaggttacagatgcgccaaataaatcagagataagcaaacacattgaagtacaggtagcccaggaaactagaaatgtatctactggctctgctgaaaatgaagaaaagtcagaagttcaagcaatcatcgaatctactcctgagctggatatggacaaagatctcagtggatataaaggttcaagcactcccaccaaaggcatagagaacaaagcttttgatcgcaatacagaatctctctttgaagaactgtcttcagctggctcaggcctaataggagatgtggatgaaggagcagatttactaggaatgggtcgggaagttgagaatcttatattagaaaatacacaactgttggaaaccaaaaatgctttgaacatagtgaagaatgatttgatagcaaaagtggatgaactgacctgtgagaaagatgtgctgcaaggggaattggaggctgtgaagcaagccaaactgaaactagaggaaaagaacagagaattggaggaagagcttaggaaagctcgggcagaagctgaagatgcaaggcaaaaagcaaaagatgacgatgatagtgatattcccacagcccagaggaaacggtttactagagtagaaatggcccgtgttctcatggagcgaaaccagtataaagagagattgatggagcttcaggaagctgttcgatggacagagatgattcgggcatcacgagaaaatccagccatgcaggaaaaaaaaaggtcaagcatttggcagttttttagccgacttttcagctcctcaagtaacacgactaagaagcctgaaccacctgttaatctgaagtacaatgcacccacgtctcatgttactccgtccgtcaagaaaagaagcagcaccttatctcagctccctggggataagtccaaagcctttgatttccttagtgaagaaactgaagctagtttagcctcacgcagagaacaaaagagagagcagtatcgtcaggtaaaagcacatgttcagaaggaagacggtagagtgcaggcttttggctggagtctgcctcagaagtacaaacaggtaaccaatggtcaaggtgaaaataagatgaaaaatttacctgtgcctgtctatctcagacctctggatgaaaaagatacatcaatgaagctgtggtgtgctgttggagtcaatttatctggtgggaagaccagagatggtggttctgttgttggagcaagtgtattttacaaggatgttgctggtttggatacagaaggcagtaaacagcgaagtgcctctcagagtagtttagataagttagatcaggaacttaaggaacagcagaaggagttaaaaaatcaagaagaattatccagtctagtttggatctgtaccagcactcattcggctacaaaagttcttattattgatgctgttcaacctggcaacatcctagacagtttcactgtttgcaactctcatgttctgtgcattgcaagtgtgccaggtgcacgagaaacagactaccctgcaggagaagatctttcagaatctggtcaggtagacaaagcatctttatgtggaagtatgacaagcaacagctcagcagagacagacagcctgttaggaggcatcacagtggttggttgttctgcagaaggtgtgacgggagctgccacttcccctagtacaaatggtgcttctccagtgatggataaaccaccagaaatggaagcagaaaatagtgaggttgatgaaaatgttccaacagcagaagaaagcaactgaagctacagaagggaatgcggggtcagctgaagacacagttggacatctcccaaactggcgtctacacagagcatgtctttacagatcctttgggaagttcagatcccagaagacctctccccagtgtatcagtcgagcaatgactcagatgcatataaagatcaaatatcagtactgccaaatgaacaagacttggtgagagaagaagcccagaaaatgagtagtcttttaccaactatgtggcttggagctcaaaatggctgtttgtatgtccattcatctgtagcccagtggaggaaatgtctccattccattaaacttaaagattcgattctcagtattgtacacgtgaagggaatcgtgttagtagccctggctgacggcacccttgcaatctttcacagaggagtggatgggcagtgggatttgtcaaactatcacctcttagaccttggacggcctcatcattccatccgttgcatgactgtggtacatgacaaagtctggtgtggctataggaacaaaatctatgtggtgcagccaaaggccatgaaaatagagaaatcttttgatgcacatcccaggaaggagagccaagtgcgacagcttgcgtgggtgggggatggcgtgtgggtctccattcgcttggattctacgctccgtctctatcatgcacacacttatcaacatctacaggatgtggacattgagccttatgtaagcaaaatgttaggtactggaaaactgggcttctcttttgtgagaattacagctcttatggtgtcttgtaatcgtttgtgggtggggacaggaaatggtgtcattatctccatcccattgacagaaaccgtaatcctccaccagggacgtttactggggctgagggcaaataaaacctcaggtgtaccaggaaatcgtcctggaagtgtaatccgtgtatatggtgatgaaaacagtgataaagtgactccagggacatttataccctattgttcaatggcacatgcacagctttgcttccatgggcaccgggatgctgtgaaattctttgtggcagtcccaggtcaagtcatcagcccacaaagtagcagtagtggcacggatctgacgggtgacaaaggcaggggccatctgcacaggagcctggtagtcagacgcccttgaagtctatgcttgtcatcagtggaggagagggctacatcgacttccgaatgggtgatgaaggtggagaatcagaacttcttggagaggatcttccacttgaaccttctgtcaccaaagcagaaaggagtcacttgatagtgtggcaagtgatgtatgggcaatgagtgagcccatgggaaacaggttggaagatgggggaagccgtctcttctgcatggtttatttttccctctatcctttttattttaatggtctttttgtggagataagtttccaccacataatgtgtgaagcatttttttcctgttaactttatattaccaaaatcccgttcttacccataaccaatacagaggaactagctgtgttactgcaccagtgttataggtaacttcagtatattatgaacaaatccaaagaatgtttacttccccgcaaactgggtgaattatagaaagccaatcccagatgtggtttactctgccacgagtctaatgtcattcacttcattttgatggggtcacttggttagctgtccacctaataatgggaattaatgggaaacactttgataaatgaaactgtacccgttaaatacaatagcctgagttttcccccagtgtattgtaaaattgacacacactaattacaagatggattatcgaggatgtatctaaatgtcccgagagggttaaaagctaactgtaaattactttaactttcactttcaaatctgacaaatcttgtttatatggtatataaaactttgttttcatcagatttgggggggttttatattaaagaaattaagactacactatttaaataaacgtttcctgtttctgactta

SEQ ID NO: 89765 - DNA, 1403 bp, Homo sapiens
ccccccacccccgttaaatttgggccccctttggtttttttttaatgggcccccctttttttttttttttttttaaaggaaaaaattcaaagtttattcaacattaagaataacagacagataaaggtttggacttaacagcataaataccaccaatatcatggtgtacaattaaactaacctcatgtcaacttgtacctgtttaacagatgcgatctttgtggtgttgccaaaaggataatggattattgttatgtttggtaaggtgctcaaaattaaagactttatgtcgacttattcacacacatacacacacacacacatgcacgcacacacacacacacacactcttacacttagcctcctgcaaaatgtattgactttagttgctatatccgattcggataaggctttgctcattttttaaatgacattattaattgcagaaaaaacgtggaggagaccttggccttgccagtgggggtacctaggagcagaaggtgatcgccacctggagggcagatcacttagtctcagacacctgcagggtgctgagaccccagtgctaaatccagatctccaattgccatcacacataggcaagcaggcctggtcccatgccttgggatcgctctaattgactgtgataaagattgagttttccttaaaggaagaatagggtaaaatgagataaactactagaaaaaccaaagaatagctttgcatttcacagaatgtctattgttttacactgggggcagtggggagggtgccactgataattcttgcttcttccgaaaacagaccctagacatctgattgtacatttggaattactgtgagttccccaccaaaccagtgggttagaaggaacctctgggtggtctagtacaggtttccattccacccaccccactgtggaatcccatctgtactctcctcaaagggtccttctgctttgagggatgggtcagtggaggcctgttgtatttgaagacaaaaggcctatcacagtcttgcctaatgtggtatttgaatggttcaaagtggccacttcctgaagagaaagaagtaatgatctacagccctcccctcaacaaactacctccttaaggcagcaccagcagaaagataggctggtcaatttttgcctttctttgccaagtctagttaaaagaaacaacaatgtgacctcatcaggaggtcctaagctgttccttccaaatcatgtctagatgatgtcagtatgatatgatttggattcattgttaatggccaaataattaatctctgaaagatgcttaggatgaaaaggtgaaaaatgacaaagggactctcataatagctgcagcgtgcagacatgcgtctgactccggttgacccaaatcactcagagtcaagcc

SEQ ID NO: 89766 - DNA, 487 bp, Homo sapiens
  misc_feature (1)...(487): n = a,t,c or g
nacttgataccgtcagcctacngcanganctnnaannnccgggncgacccacgcgtccgcccacgcgtccgcccaggacagggcacgtatggttaccccggcgagcgcaacctatccctaaccagggccttgacgcgctccccgcggtagtgttgcgcccctgagggatccttgccctacatccccaactccccccacaatccggatcctcacccccagggggtcggaggagcgcaaggtccactccccactgttgtcagccacgctccccgacgggtcctaagcatgcaccctctctccagcattctaagacacggaatctctcaaggtttcccagcgaacactccctccccaaggtcctgagccttgtccccagaggagtcccaagcctgagcgccctccccaacttcctgagacgcaacatctccccggggttcctaaacgcgcacctactccccaactacctgagcctcagccccggggatat

SEQ ID NO: 89767 - DNA, 5718 bp, Homo sapiens
ttttttttttttactaatatagagattttatttaaactgtattgaatttttacagcacattgcatgtttgtcacaacgcaactgcacagtttggatttttggccacatcatgtcacttacacccacaacagctttgaaaggagtatttgatgaacacatctgagccaaaagcccagagtctctctccaaggccatgcagtttgttcactgatgggacagtccctcaaaacagcccacgctaagtagacagatacagtctccccaaatgttaccaatcttactccccttgaaaacaggcagagtgaagtgcaatgaaagacaagttaattaaaaagccactcacaactggcagtaaattttaatgattgataaaatggctttaaaataattttatggtatcagaaacaaggaacagcttgttactttttcaatgatctcaggaattttgcagacacaaaatctccattattcagctccatttaaatgaaaaaaaaagttccgctaggctgacctaaatatgccaaaactttttaggttacatctatggcaagtacaaaagaaccacagatgcgtctctgtaggactgaaaaggtcaggacaaataatgattcttgttctaaatgcagatcctagttattttggaatgaaatgctgttttctagaaagcaacatgaaagtagcagtaagaaagatgactaccatcatttcaaaacaggataagcctaaatataatttaccatttatatgtcaacaaattaaggaaaactgtataaagtcctagtggtttcattataggccaaggagactgtatctgtcccacccacagtacatggctatatcactgtatcttttggttaagtgccactggtacatattaagatgaaaaaaaacaaaaacaaaaacaaaaaaacaaaataaaattttttaaaaaccaacaacgtttggtccaaatggacacatgttctttcccaattttggtatcaaggctttattctcttctgtttgggttccattgttaagtgcacagaaatagacagcagcatttgtactgaaaccctcacataccaaacagcatatgctaggaggtaaaaaccaaacgctaaattctaccctcaaggtgtcaagtgttcaggataagaagcaatgtgacccagaggaggcatcagccaagggaaagacaacatgggggaaatgggcaatggaacaacaacaacgaaaacctttgttttattttcatgccaggagaggatcaaggtgtagctcctgtgttagcaccaggacaactaggaaaagtcaggtgcaaagagtagggcacaatcagcagatatttcacaaggataatttttgcttttcccttctcattcttcacagtgcataactcaagagctgccactgtgtaacagagacgactgccttcacagctcaaaataactcaatgtttgccaggaccgaacatcagcagagttttcctctgctcccaaaaatgtctcactccctagaactgttcccctaaactgaatattcaccaatgctggctgatgagccaactgaaaaatacattgaaacctccacttgctgagccagtcttcaaaccaaactccacagaaagacagtactaatgcaactagaaggagtgcctctaaaggctgagccttcatgcagacacagagcacagaggtacaggatatagttcatctcaaataggacaggaattcctaccttgtatactataatctgcttttgtcaaggtggaggagagatgggtctggttatcacttggagtttggttatacatatgcctttctattgctgtttggggcactttgcaccaggcaacatctacgcaatcatcatcttgtgacctccaggagaaagaggctggagtcaccaactcaacattaagcttccagaccctgggtctgggttaggaccattaccccaaggtgagggtatcaccagtagaggacctcctgctaaattgcaattcctctgctccagtttcatgataccaaggaggatttctcaagatggtatctctgagctctgtgatttcatgagccacaccaaggaaccttccaaactacaactgaagaagatcctcccttcaaacctgctaaaattggacaggtttctccccggcattcaactggaagctgtagcaatgggtttcttcagctgttggctcatgagttccctggcacgagagacttgaatgtgttcgtaacatgagttacagacgagaactgggtcatagagttgctgatcaggaatgggcagcttcaggtggcagcatccagcacaaaatacattcccacaatttctgcaatggtgtcttcgtttggccaaccagaattcacagtcacagttatagcagtgtgatgccatatggtctggaacccagcgagtcacctcagtctctttcttatcaacaggttcccagcttgcttctgaaaggcagtcttcactgtgatcagagccaaaatcctcagtatcactgccatctgactccttcaaacatgtaaaatcatcctcatagtccatggggggctctgctggaggggcacagcagtgacggatgtccagcctcatctgaagctcacgcacctgtcgacgtagctgctccacctcttgtttgtaccctgcttcgatttgccgtaacctatgctggatcacatccgtgggaaaggggagtccatcatcatccaaatacagaggaggcactggagaagggcagttcagtggaacgggctttgtgctagagacttgctttggatgactggacaaccacatctggttctttcctcctgggccagtacaatgtccattggaatgactagaacagacaggtgacttcacaccttctctctgagcccactggcccccaaagcagggccctgtggcccgcatctgcttactgtttggcctcttgctacaacagccataggaaagcagccgccgaggggtggcctccccacttgggaatgaagtcaccatcccttggaagctgtcccagttggaccctagaaaagagaactcactgatctggctctgagaaattggcttccggaccaattccaatggcattttcccaaagcgaggattttccaataactgcccattcctattatttcctcttttaccaatgtcttcctccccatgggtcagatccggcacagaactcagttgttcctggtgggagatacttgccacagaccctgagggatcttggttgaggaaagtcagtgcttgggtctagaggagtttggcaggcagcactcggtgggttgcaaacggtgctgaggctgtgatcaagaacacacttggagggcacacctagcatggagtctggctgggcctgttggggcgtacctgtaggagagttctgggaagactcaggaaaattacaaactccatcacacttgttagaaatgaccttggagagtgcactgacagcttctgtttcaggacaatgttcaggtggctcccctatgccatctaaagtcctacccagctcatcctgggcagaagggtctggagctggtcccttagtctcttctaggactttgatctcaggatcagaggtgttgctcttcatttcccgaggcactgcggtattaagcagtttgtaacttggagaacagcttttgtgactcttgaaaggtttattgctcaagtagtctttctggctgctgggcagaggaggaggaagacccacttctcctacagtttgctgaggccctcctaccccagagtccacaaagcttgtctctgatccctcaggattgctgtgccagggctccaggcctaccctgacctcctgacagtggttattcaggttagggtcactggatgtacgagtcagggggctgcttgtgtcacaggcagaaagaagatcatccatggatctggttttaggtaatctgtccagagagcggccagagaactcctggctctgggccactggggaaaggtaaagatccatgttttcttccccaagtgtgcatggagatgatgctggcagataaacagctgtccagaggtgcagggcccggacatgacaaacaggatgcaggaccatgtctgagctgggtgtgtagaggaagttatgaaagtttttattgccagctcgaaggagcgcccacacagagcaggtcccgctttgtagatgttgcgcttctctcgctacacaggggttgttggccaggaaggtgccgtagaggcaggagtatgtgtgttgcaccagttttaccaggaatgcttcattaaattcaaacaggcaggggaactgcttaagcaactgatgaacagaatcaagccactggaggaacacagggcattgttcgttttggtcctccacattctcttggtggccacagcgatctccaaacttgtgcccaaaatccagccagtcagactccactaacacttggaagccctccaacgtcctgtaatatgggtccagtaatattttggccagggctacgatctgcggtgtgcggtcccagccatctgagcagtgtaccagcacaggccggccttcccggtctactgtattagccaccagcacagctgcttttagcatcaccgacaagtgctgcagccatttggtactctccagtgccgacaaccagttgctaggatccggcatctggctacacacagcccggaggtactgaaagctgttccggatggcatggatgttggccattcccatgaacacgacctcacagttgggatagtactcttcacattcacagcctccacccttggcccggttggccactgctgccgtgtaggatcgcgcatccaggatcagcagcttttgaggagctgctgtgctctccactccagagcacgcagtcagagaagaatcaaagtcagcatcacacgcctcgctggtatcattattcccggtgctgagggagcccccagtggcccttgtccccgggtccagggcacaggctttagcaatggacgtgaccaggtactcatcatcagcattgcgccagccccaccagctgatctctggctggctgcagcgggcgatggcagccccattgcgcaagtgtctatacacaaccacgggaatccgcttccaggagcggaaggaagccacgttctccagctctttgtcagtgatccacacaggaaccagcagcttctgggggtaactggggcacaatttgtagttgctgttgatgtgtgagactctccagacgttctgcaggtcaaagcccatccttgcaagctccgcctcctgtcgacaacgtatgtgctcacctggctgacataggtgagtgtgctggtcctcctcggtcagccccaggcaccaggcatggtaggcaaaggcaaagaggtcttcaggcttggcaggtcttgctgtggctcggcttagccgtgagagccactcttggcactgcttaaaagtggagaagtggcacctgccaggcaagaagccacaggcctaggtgaggcaaagtgcagttgtgccatggggctatcagggccaaaaacacagccacaggaaggctgtgaggagagaaggctgcaaagcaagaggtaaagcagtggggacccagggtggggggacgagggacactggccaacacccaacagaagttgtctcttgtgataattctcttcccaagaactcctgtgtttgaggcatacttatcctctcgaatggggcgctactgtttctcgtatcaaatctaaatg

SEQ ID NO: 89768 - DNA, 1873 bp, Homo sapiens
gaaaaacaactattggtttttcttgggatgactgaatgacctttttctcttcagttgctgattttatagggctagatcccagaattgctgcatggcttatagatcctagtgatgccacaccctcttttgaagatttagtagaaaaatactgtgaaaaatccattacagttaaagtgaacagcacatatggaaattcctcaagaaatattgtgaatcagaatgtacgtgagaacctgaagacactctacagacttacaatggacctttgctctaaactgaaggattatggtttatggcaactatttcgtactttggagcttcctctgataccaattttggcagtgatggaaagccatgccattcaggtgaacaaagaggagatggagaagacgtcagcacttcttggggctcgtctcaaggaattggagcaagaagctcattttgttgcaggagaacggtttcttataacgagcaataaccagcttcgagagatcctctttggcaagttaaagctgcacctgctgagtcaaaggaacagtctccccagaacggggttgcagaaatacccgtctacagtgtcagaagcattaaatgctctgcgagaccttcatccattacccaagataattttggaatacaggcaggttcacaagatcaagtcaacctttgtagatggattactagcttgcatgaaaaagggctccatttcctctacatggaatcagactggaactgtgactggaagactttcagccaagcatcctaatatccaaggtatctccaagcacccaattcagattactacacctaagaattttaaaggtaaagaagacaagattctcacgatctccccgagggccatgtttgtttcatccaaaggccacacctttctagcagcagacttttcacagattgaattgcgcattcttacacatttatctggagatccggaacttctgaagttattccaggaatctgaaagagatgatgtattttctactctgacttcacagtggaaggatgtgcccgtggaacaggtgacacacgcagacagagagcaaaccaagaaggtggtgtacgcggtggtctatggagcagggaaggagcggctggctgcttgccttggagttcctattcaggaagctgcccagtttttggagagttttttgcagaagtacaagaaaatcaaggacttcgcccgagcagctattgcccagtgtcaccagacaggctgtgtggtgtccatcatgggcagaaggagacccctgccaaggattcacgctcatgaccagcaactccgggcacaagcagagcgacaggcagtgaacttcgtggtgcaaggctccgctgctgacctctgcaagctggccatgatccatgtcttcactgcagtggctgcttcccacaccttgacggccaggctggtggcccagatccatgatgagctgctgtttgaagtggaagatccgcagatcccggagtgtgcagctctcgtcaggaggaccatggagtccttggaacaggtacccctcaaggtgagcctgagtgccggccgctcatggggacacctggtgccactgcaggaggcctggggccctccgccaggcccatgtcgcactgagtctcccagcaacagcctggctgcccctgggtcccctgccagcacccagcccccacccctgcatttttcgccttcattttgtctgtagccccaggcaacagtgggaggagagaactggtttccagcagtccattgtgtggccttccccaaggtcaccagctctgtacgccccaggacgcattaaccctttggggctggggtggcccgccatcccctggagtaaatgcctgtgcaaagccctcaaaaaaaaaa

SEQ ID NO: 89769 - DNA, 1600 bp, Homo sapiens
ttaaagaaaatactttattatgtcatgaaaaaaaaggcctcaaccaactagattcatacttgatttgaaaaaaaaatggaaaatttattaattagacagtatgtgggcatcctgttccacatgggaatgagaagatgctataggttctctaagtattgcacagtctgaaaaaataacaaaaaaagggaaggggaggaaaaaaaaaaatcacatgatattgggaaccatctcacattatgaataatctaccaagaaacatttaaaaaagaaaaccctttgtttctacagtagctttaagtttatagttcttggaatgactgtattccattgaagacatctcagtaacaggaagctgttttagcaatcccatgtgcaaatattaataaaaaatatataaaataatgcaattcatctcttgccttcaccccggcaatcatgacatttctgagaactgttttgcttgaaaatgggttaagctgtaagttttgcctgaagctccatctctgcagcccgtttgagtgcaacatccactagaagctgaaatccactgaagtcctggttgaggtccggtggagtagggggaggagtgttgaaaagaccactctgtgtattcgtacttggtccagatttacaagtgtcctctgggtacatgagagaagagtctcttaagtttacttgtcgctatctgctgaatattctgtgttttgcccacaaccgaccgactggcaggagagagaaagggacaatctttcaatggcagtcacagtggtatggcagatcactgatggacgagccaaaactgatcccggggattggcgggcttagcagacaggggcctcccctagggttgggtttggccccgcgcgtaaaagaatgaaatggggtctcctctagagctggcatgaagtttttgatgcccatcacggactccacagagctcgtttcagaaatcttggccccacggcgggaaattgtgaactgatttggatctttgccatcctttctcagcatgtcagggaggagcctgcggcgggcgttgatgaaccagttacagacctgtagcgtagacaggtgtgtttgctgggacagcaacgctttttcttgctctgaaggataggcattgtaacggtgctcatacagccaatcccgaagaatctgcacagactccttgggtaggttgccccttctccttctcttgcctgagccagcggatgaagaaaggtccaagggaatgtccatgctgtcctcatcctcagtctcactgccagatgctgcaacaatacctttcttgcctttcattctggatctcccctcccagcgcgaggcaaggcgggggtctggaggggccaggagcggggacacaggggataagcgaacgtctccttcacagccgactctcccgtaacttgtaggacgtgctccagccgttattgctaaacaggacgctctgatcccaggcgcccgctccttgggtggaattcaagtgacacttgggcttcctcccgccgggatcttctggcagccggccgggggctctccctcgcccaactctctcccctcccctctccgctcctttgttccctgctcctgctcggcgcac

SEQ ID NO: 89770 - DNA, 2231 bp, Homo sapiens
  misc_feature (1)...(2231): n = a,t,c or g
gcgggccgccgtacgcccggggctgcggctctcccgcgtgggccgcggccgctcggctccgcgggcagccgcgccgtcctgccccgcgcgcgcgctagccgctgtcggccgcaggagccccgggaatctggaggggccgtggggcggagggcggggcctgcgggcggacggcggccgaagccgcacgggagacgacgaggaggagccggaagatgcggacgagaacgccgaggaggagctgctgcggggagagcctctgctgccggcggggacccagcgcgtgtgtctggttcaccctgacgtcaagtggggcccggggaagtcgcagatgactcgagccgagtggcaggtggcggaggccacagcgctggtgcacacgctggacggctggtccgtggtgcagacaatggtcgtgtccaccaaaacgccggacaggaagctcatctttggcaaagggaactttgagcacctgacagaaaagatccgagggtctccagacatcacgtgcgtcttcctgaacgtggagaggatggctgccccgaccaagaaagaactggaagccgcctggggcgtggaggtgtttgaccgcttcacggtcgtcctgcacatcttccgctgtaacgcccgcacgaaggaggcccggcttcaggtggccctggcggagatgccgctgcacaggtcgaacttgaaaagggacgtcgcccacctgtaccgaggagtcggctcgcgctacatcatggggtcaggagaatccttcatgcagctgcagcagcgtctcctgagagagaaggaggctaagatcaggaaggccttggacaggcttcgcaagaagaggcacctgctccgccggcagcggacgaggcgggagttccccgtgatctccgtggtggggtacaccaactgcggaaagaccacgctgatcaaggcactgacgggcgatgccgccatccagccacgggaccagctgtttgccacgctggacgtcacgtgcccacgcgggcacgctgccctcacgcatgaccgtcctgtacgtggacaccatcggcttcctctcccagctgccgcacggcctcatcgagtccttctccgccaccctggaagacgtggcccactcggatctcatcttgcacgtaagggacgttcagccaccccgaggcggagctccagaaatgcagcgttctgtccacgctgcgtggcctgcagctgcccgccccgctcctggactccatggtggaggttcacaacaaggtggacctcgtgcccgggtacagccccacggaaccgaacgtcggtgnccgtgtctgccctgcggggccacggggctccaggagctgaaagctgagctcgatgcggcggttttgaaggcgacggggagacagatcctcactctccgtgtgaggctcgcaggggcgcagctcagctggctgtataaggaggccacagttcaggaggtggacgtgatccctgaggacggggcggccgacgtgagggtcatcatcagcaactcagcctacggcaaattccggaagctctttccaggatgaacggacgcccacagaggcctgcggggtgggggcatcgctgcctggggagctgaggcgttaccgctgtgttgggggcagcttggtgtcaggtgcagcagggtcctccttgtctggttctgcacccgtctcgctcccagccatttgctgggatgaccgtgcaggccggtgacacggccgcacctgccccaaagcgggccgcccgagcgtccactccaagcctgagcatccacacaattccagtgggccctcggtgcctgctgtgaactgctttccctcggaatgtttccgtaacaggacattaaacctttgtttttacttccgtgagcagcatttccagttcctcctgcacctgccgtgagccgtggccctggtgggcaccgacggcccctccgcccggctgtctgtgttcacagatggtctcggtttcccatggtggtgtcggggaaatgacgaaaaatcaggtttcccggcagcacagagaacccttccacaaaagtagaagggaaagcaaatagttttactaaagaagcagcttcaaaccagaccgtgagccaccgcacccggcctccttgagttaacattttctaaagatgcctccggcgtgcttatccttgaaagctgccagaggtgtcttggctgcattggtggtaataaaattcatactcatatttgactttaaaaaaaaaa

SEQ ID NO: 89771 - DNA, 2359 bp, Homo sapiens
aaaacctacaacaaatacacggtgctgagattatcaccagcaatatcccagaactcaaatatgaagatggaacagtgcccgtggcaacaaagaagtaaaaaacttcaagcagacgctgttgtgctgttggatgagagttcaggaccaccaagccagctgctttggacccgccaggatacccagctccctcaggaaagcgctctattacctgctccatatcctgccttcactaaagatggaagccaaggaaacctgccgcaagcagatatcacactaatgagccaggcccaagatagcaggagcatattatttcaggagtcagtgacatttgaggatgtagctgtgaacttcactaacagggagtggcagtgtctgacctacgctcaaaggcatctctataaggatgtgatgttggaaaattatgggaacatggtatcacttggatttccatttcctaaacctcctttaatctctcatctggagcgagaagtagacccctgtgtgcaggatccacaggacagggagtccctaagctgctcctacccagtgtcagctgacaagatgtggcctgagaatgaaaaggcaagttcacaacaagagatttttgaaaatggagaagcctactggatgaaatttaacagtctcctaaaagttgattcccgggatcctaaggttagagaagtttgtgttcaggatgtcaaattagagaatcaatgggaaacatctataagggagaaactgagagaagagaaagaaggctctgaggaagtgacctgcaaaaaaggaaagaaccagaaagtgcttagtaaaaacttgaatccaaactcaaaacatagtcaatgtaataaagttcttatagcacagaaactccatgaatgtgccaggtgtggcaaaaacttcagttggcactcagatctaattctccatgagcaaattcattctggtgagaaaccccatgtgtgtaatgagtgtgggaaagcattcaagaccagaaatcagctttctatgcaccggataatccacacaggggagaaaccttttaattgcacccagtgtgggaaggctttcaacagtagatcagctctttgccgacataaaaaaacccacagtggggagaagcctcacgagtgcagggactgtgggaaggccttcaagaccaggaaccgtctctgtatgcatcagcttatccacaccggggagaagccttacaaatgtaactgctgtgggaaggccttccagtttaagcattcccttaccatccatggcagaatccacactggggagaagccatatgaatgtgaggagtgcgggaaggcccttcagtgggagttcagacctcaccaaacacataagaagtgccacactggggaacgaccttatgagtgcagcaagtgtggaagggccttcagtcggagctcagacctaagcaaacacaaacgaatccatactcgggagaaacactatgggtgtccccagtgtggaaaagacttcagcatcaaggcagaactcaccaaacacagaaggatccacactgaagagaaacgttacaggtgtgaggagtgtgggaaagcctttcgtcataactgtaagcgcagggctcatgaacgagagcatacaggggagaagccctatcaatgcagggattgtgggaaaaccttccaagatcagcactgccttaccatccatcagagaatccacactggagagaaaccttacaaatgtttagagtgtgggaaagctttcagtgggaagtcaaacttgaccaatcatcgaagaattcacactggagagaagcctcacaaatgtgaggtatgtggaatggccttccatcatagttcagtcctgaggcagcacaaaagaatccacactggtgagaagccatacacctgcagtgagtgtggcacgtccttccgtcagggctcagctctgattggacataagcgagttcatactggggagaaaccttatgaatgtgaggaatgtggaaaagcttttagagtgagctcaaatcttactggacataagaaaagaaaacatcaagtatggagtacccatgaacttgatgggagtaggaaatccctctctccagtgactgtttctcagacctcagtagtcagtattttgaccagtgcctgagtataacgattctgggggttactttctgtttttcctacctctcagggctggtccttctggctcttatattagttattcctgatttcctgacccttaattgtgagattccccaaagacattgtcctttaccttcttattcactattttttcagtgagcacatttacttccaagagtttatcaatcacttcctaatattaataaacacttattagtgcttaaaaa

SEQ ID NO: 89772 - DNA, 2372 bp, Homo sapiens; identical to SEQ ID NO: 61136

SEQ ID NO: 89773 - DNA, 3603 bp, Homo sapiens
tgcggtcagaggagcaggaggaggtcccccgacatgcctgaggcaaaaccagcggccaaaaaggcccccaaaggcaaagatgcccccaaaggagcccccaaggaggctccccctaaggaggctcctgcagaggcccccaaagaagccccacccgaggaccagtccccgactgcagaggagcccaccggcgttttcctgaagaagccggactccgtctcagtggagactgggaaggacgcagtggtcgtggccaaggtgaacgggaaggagctcccagacaaaccgaccatcaagtggttcaaggggaagtggctggagctgggcagcaagagtggcgcccgcttctccttcaaggagtcccacaactcccccagcaatgtgtacaccgtggagctgcacattgggaaggtggtactgggggaccgtgggtattaccgcctcgaggtcaaagccaaggacacctgtgacagctgtggcttcaacatcgatgtggaggcaccccgtcaggatgcctctgggcagagtctagaaagcttcaagcgtacgagtgaaaagaagtcggatactgcaggtgagctggatttcagtggcctgttgaagaagagggaggtggtggaggaggagaagaagaagaaaaagaaagatgacgatgacctaggcatccccccggagatttgggagctcctgaaaggggcaaagaagagcgagtacgagaaaatcgccttccagtatggcatcaccgacctccggggcatgctgaagcggctgaaaaaggctaaggtcgaggtcaagaagagtgcagcattcacaaagaagctggatccagcctaccaagtggacagaggcaacaagatcaagttgatggtagagatcagcgacccagacctgaccctcaagtggttcaagaacggccaggagatcaaaccaagcagcaagtacgtgtttgagaacgttggtaagaagcgaattcttaccatcaacaagtgcacgctggcggatgacgctgcctatgaagtagctgtcaaggatgagaagtgtttcaccgagctcttcgtcaaagaacctccagtcctaattgtcacacctcttgaggaccagcaggtgtttgtgggtgaccgggtggaaatggcagtggaggtgtcagaagagggtgcccaggtgatgtggatgaaagatggtgtggaactgactcgggaggattccttcaaggcccggtaccgcttcaagaaggacgggaagcgccacatcctcatcttctcagacgtggtccaggaggacaggggtcgctatcaggtcataaccaatggcggccagtgtgaggccgagctgattgtggaagagaaacagctggaggtcctgcaggacatcgcggatctgacggtgaaggcctcagaacaagctgtgttcaagtgcgaggtgtctgatgagaaagtgacgggcaagtggtataagaatggggtcgaggtgcggcccagcaagaggatcaccatttcccatgtaggcaggttccacaagctggtgatcgatgacgtccgccccgaggatgagggagactacacgtttgtgcctgacggctacgcccttggttcgctctcggccaagctcaacttcctggaaatcaaggtggagtacgttcccaagcaaagagccaccaaagatcccacttggatttgcctcggggggaaagacctcagagaatgccgatttgtggttgtggctggaaacaagctgaggcttgacgttgtccatcacaggggaagccccctccccgttcgctaccttggctgaagggagaatgaggtattcacgaccaccgagggcaggacccgcatcgagaagcgggtggactgcagcagctttgtgattgagagtgcgcagcgggaagacgagggccgctacaccatcaaggtcaccaaccccatcggcgaggacgtggcttccatcttcctgcaagttgtagatgtcccagaccccccggaggctgtgcgcatcacctcggttggagaggattgggccatccttgtctgggagccaccaatgtacgatggggggaagccagtcaccgggtacctcgtagagcggaagaagaagggctctcagcgctggatgaagctgaactttgaggtcttcacagagaccacctatgagtccaccaagatgatcgagggcatcctctatgagatgcgtgtcttcgccgtcaatgctataggggtctcccagcccagcatgaacaccaagccttttatgcctattgcacccacgagtgaacccctgcacctgatagtggaggatgtgacagacaccaccaccacactcaagtggaggcctccgaacaggatcggggcaggtggcatcgatgggtacctggtggagtactgcctggaaggctccgaggaatgggtccctgccaacaccgagcccgtggagcgctgtggcttcaccgtcaagaatctcccgaccggagccagaatcctcttccgagtagttggggtcaacatcgcggggcgcagcgagccggccaccctggcccagccggtcaccatcagggagattgcggagccacccaagatccggcttccccgccatctccgccagacctacatccgcaaagtgggcgagcagctcaaccttgtcgtccccttccagggaaagccccggccccaggtggtgtggaccaagggcggggccccgctggacacctcccgcgtgcacgtgcggaccagcgacttcgacaccgtgttcttcgtgcgccaggcggcccgctccgactccggggagtacgagctgagcgtgcagatcgagaacatgaaggacaccgccaccatccgcatccgcgttgtggaaaaggctgggccccccataaacgtgatggtgaaggaggtgtggggcacgaacgcgctggtggagtggcaggcccccaaagatgatgggaacagtgagatcatggggtatttcgtccagaaagcagacaaaaaaaccatggagtggttcaacgtctatgaacgtaacaggcacactagctgtactgtgtccgaccttatcgtgggcaatgaatactatttccgagtttacaccgagaacatctgtgggctcagtgactcacctggtgtctccaagaacacggcccgcatcctcaagacaggaatcaccttcaaaccgttcgagtataaggagcatgacttccggatggctcccaagttcctgacacctctcatagaccgcgtggtcgtggctgggtactcggcagccctcaactgtgctgtcagaggccacccgaagccgaaggtggtctggatgaagaacaagatggaaatccgtgaagatcccaagttcctgataaccaattaccaaggagtcctgacgctgaacatccgtcgcccctcgcccttcgacgctgggacttacacctgccgggccgtcaacgagctgggcgaggcgctggctgagtgcaagctggaggtccgagtgccgcagtgagacctgtcccctacctgccaagacaattggtggtggagtcctgaccccaatccccaacctcccaggactgtgttctttctggagttttcgctgagaacaaaacagtgttgtctggaaaaaaaaaaa

SEQ ID NO: 89774 - DNA, 6302 bp, Homo sapiens; identical to SEQ ID NO: 60596
  misc_feature (1)...(6302): n = a,t,c or g

SEQ ID NO: 89775 - DNA, 6309 bp, Homo sapiens; identical to SEQ ID NO: 60546

SEQ ID NO: 89776 - DNA, 1919 bp, Homo sapiens
cttccagaaacattcccaccccctccatacagccagctttgagtcactggctgctggctggccagtcacacagcaccatggacatgcagaggtaccagtgggcacttggtgtgtgctgcccagatgaggacacagagttagtcagaagattctcgggcaaatggatccaaaacagtcctggaatgcaaatgtgaagtatttccacagccgtggcaggaacacataactggcactatttataagcgataaaagggttatttcatgcatcctctttaagctgcaaatgcttcatttacaaaagaaaaaaacctgtccttttcattcatgagactggcttaaggatcaaatgagatctgtttttaatataaagatgttttcttaaaatctctgtatgaaattatctccggagagatagattcaccatgtttgccctgagatttagaggcctctgccttccactccacaccctgtttgtgaaggcccaagtcactcactatggcaaagaagtcattccctctaggttaggtgttaaaaaccaggttatgggtcttcctgggcatgggtggataatccacacgtggataatcaagagtcggactatatggggttcctccctccccctccccttccaccaggggatccctggacagagggccacagcgagactcttcagcggatgtagatcatgtcggagatggctccaggcaagtgggtcatgatctgcattcgcagccaccagtagtagtccatggggtggtagcgggtgtagggggtggtggcggtcagggcgtgtgtgacagcatcgatgacaggggacgtgtctgtggagccactgctgcagtaggtctccatcttggcgatcttttcatcaaagtacttcttgccgtagtccttgcgcacgacctcaggcagctcctcccacatcttcttggcgatggcctgaatgctctcagggctgtaaaggctggtggcagcgatgaagttgccgggctccaccacgctgaccttcacgcccagggggtacatctcatagcgcaggcagtccgagaaagcctctaccccgaacttggtgatgcagtacggggagcgggccgggttggccatgcggcccagcatgctgctgatattgacgacgcggcctttggcccttcggatgagggggagaaaggatttcgtcatccgcactgtgccccaaaggttcacttctgccacctgcttgtaggtctccaggctggtgaactccacctccccgaacgttgagatgccggcattgttaacgaggccccacatgcctttctcagggtccttcaggctcgagcggacaatctccaccactttctccacctcttcgctgctgcagacattgagctggacggttctcaatcggtcactgtttaggctgtccagctccttgaccccatcatggcctttgtccttcatcaagcagccagcaaacacaaggaagccttttgaatgcagatgcttggccaatgagaacccaaatccagagtcacagcctgtgaccaggacagctttgctgccaaccggctccgccgcactggcataagtccgacggccaatcgggataaaggaagtagaaccaagcaatagtgggcgtcttgctccattttctctatcacaggcacttagggtttttcctgggagccgtgacaggggtctggagaggcgggtggccagcatggtagcaacgggtgttagaatggcccagttcctcccggtggttccaaaaccaaatgggcagggggctccgctgcagagggctcgccgaggctctcgccttcacccggcgccgcgcaggtgcccgctctcctgcggggagagccgagggggggcgctgccgcagggtctttctggaagcccctccaccagcactcctgcggcctgcggcctccgccacc

SEQ ID NO: 89777 - DNA, 1278 bp, Homo sapiens
ttttttttttttctcagaacattcacctttaattctgttacaggttccagtatttgcgctggccctagtcagctgtgggtaagagtcacccatgggcaagagtggggaggggactgctcccccatgaaccacatcctcagtgttggccaaataccagcgtgttgggtaggcttcctgtgtccaccaggcctggccatgtcctgcacagtatagcttggacctctgggcctgaaccagggtgagcatcaaggcccccatttctcctcaccacggggtcgcttgtcagctccaggagccagtctggccccactgagaacttttcagtcgagggcctgatgagtcttgggaatgcgcttctgcaagagggcccaggctttctccacctggcgttgggtgatatgcggctcccacaaggtgctgagcaccacgtggctctgttccacaagctgctgcccgctcatctggctctgcagccggctttgagccgcggcttcactgaggccatccctctccacaatgcgtcttacagcctcagtctctgggatgacagcagtccacacctcatggaccaggttctgccagccggcttcaagcaacacagcggcatcaatcacacacacacgctttccctcagccacagcccgatccatctcctctcgggccagctttgcgataattggccacataatgtccgtgagtatcttcagctgcttcttattcccaaacacccggctgcctaggaccttcctgttgatgatgccatctttatggagaatatctgttccaaaggcctccaccacaggctggtaggcagggccacctggggcataggcccgatgacccaggtggtcactgtcaatgacaaacgcccccaggcccttcagtcgctgagctattgagctcttcccagagccactgatgccagtcagcccaattacatagagacatgtggggagctctggcctttcatatggaggccgaagcaggttccccaacattcgctggcggaagctggaggagctgactttgtcctcttcattctctgtatgtctgaggtccttcagcagctggatctggtacaaagcaagttcctccaggtcattctcaaggcggaagcggttgatggccatccccccacgataggtctcctcgctgaccaccaggaactccagggaggggtcagagccagcgggcccataggggtccagcagggggatgacatcaaaagtcaaggagggcttgatgtccaccaggaattcactcagatgttccacacgt

SEQ ID NO: 89778 - DNA, 2134 bp, Homo sapiens; identical to SEQ ID NO: 60689

SEQ ID NO: 89779 - DNA, 5126 bp, Homo sapiens
cagcatttgtgttcttgtctatcgtcttcttgcctggccggaatacaaactcgggccaatcagagggggctacgggacccgtgcggggcgtcgcgctgggggcggggcctgcgggggctgaagagcgagccgggcgggcgggccgcacgtgtcgggctggggctgaggctgaggctgaggttgaggcggcggcggcggcggccgggtgcccgggacagcgacgcagcgcgccggcggccgcgacagggccagcgagagccccgcagctctgccgcagctgccgcctcgccgcggccgggccggagtagcactgttgcgggagcgcggccttacgaggcggccggagcggtgggcacagctcggcgcggagcgtcctgtcaggcggcggccgagggcgtcgcggactctccccgcgatgatgccgatgatattaactgttttcttgagcaacaatgaacagattttaacagaagttcctataacaccggaaacaacctgtcgagatgttgtagaattttgcatggaacctggagaaggcagctgccatttaactgaagtgtggaggggaaatgaacgtcccataccctttgatcatatgatgtacgaacatcttcagaaatggggtccacggagggaagaagtgaaattttttcttcgacacgaggactccccaactgagaacagtgaacaaggtggccgtcagacccaagagcaacgaactcagagaaatgtaataaatgtacctggagaaaaacgtactgaaaatggggttgggaatccacgtgttgaacttaccctctcagagctccaagatatggcagctaggcaacagcagcagattgaaaatcagcagcagatgttggttgccaaggaacagcgtttacattttctaaagcaacaggagcgccgtcagcagcagtctatttctgaaaatgaaaagcttcagaaattgaaagaacgagttgaagcccaggagaacaagctgaagaaaattcgtgcaatgagaggacaagtcgactacagcaaaatcatgaacggcaatctgtctgctgaaatagaaaggttcagtgccatgttccaggaaaagaagcaggaagtacagactgcaattttaagggttgatcagcttagtcagcaattggaagatttaaagaaaggaaaactgaatgggttccagtcttacaatggcaaattgacgggaccagcggcggtggagttaaaaagactgtaccaagaactacagattcgtaaccaacttaaccaggaacaaaattcaaaacttcagcagcagaaggaactcttaaataagcgcaacatggaggtggccatgatggacaagcgaatcagtgaactgcgtgaacgtctctatgggaaaaaaattcaggcatgtgaaaaagtttttctgaaccgtgtgaatggcacgtcatcaccacagtcccctctgagcacatcgggcagggtcgctgctgtggggccttatatccaggttcccagtgccggaagctttcctgtgctgggggaccctataaagccccagtctctcagtattgcctcaaatgctgctcatggaagatccaaatccgctaatgatggaaactggccaacattaaaacagaattctagctcttccgtgaaaccagtgcaggtggccggtgcagactggaaggatccgagcgtggaggggtctgtcaagcagggcactgtctccagccagcctgtgcccttctcagcactgggacccacggagaagccgggcatcgagattggtaaagtgccacctcccatcccgggtgtaggcaagcagctgcctccaagctatgggacatacccaagtcctacacctctgggtcctgggtcgacaagctccctggaaaggaggaaggaaggcagcttgcccaggcccagtgcaggcctgccaagtcgacagaggcccaccctgctgcccgccacaggcagcaccccccagccaggctcctcacaacagattcagcagaggatttccgtaccgccaagtcccacgtacccgccagcgggaccacctgcatttccagctggggacagcaagcctgaactcccactgacagtggccattaggcctttcctggctgataaagggtcaaggccacagtctcccaggaaaggaccccagacagtgaattcaagttccatatactccatgtacctccagcaagccacaccacctaagaattaccagccggcagcacacagcgccttaaataagtcagttaaagcagtgtatggtaagcccgttttaccttcgggttcaacctctccatcgccgctgccgtttcttcacgggtcactgtccacgggcacaccacagcctcagccaccttcagaaagtactgagaaagagcctgagcaggatggccccgccgcccccgcagatggcagcaccgtggagagcctgccacggccactcagccccaccaagctcacgcccatcgtgcattcgccactgcgctaccagagtgatgcagacctggaggccctccgcaggaagctggccaacgcgccccggcccctgaaaaagcgcagctccatcacagagcccgagggccccggcgggcccaacatccagaagctgctgtaccagcgcttcaacaccctggccggtggcatggagggcacccctttctaccagcccagcccctcccaggacttcatggtcaccttggccgatgtggacaatggaaacaccaatgccaatggaaacctggaagagctcccccctgcccagcccacagccccactccccgctgagcctgccccgtcatcagatgccaatgataatgagttaccttcccccgaaccagaggagctcatctgtccccaaaccacccaccaaactgccgagccggcagaggacaataacaacaacgtggccacggtccccaccacggagcagatcccgagtcctgtggctgaggccccatctccaggggaagagcaggtccctccagcacctcttccccctgccagccaccctcctgccacctccacgaacaagcggaccaacttgaagaagcccaactcggagcggacggggcacgggctgagagtccggtttaaccccctggcactgctcctagacgcgtctctggaaggagagttcgatctggtgcagaggatcatctatgaggtggaagatcccagcaagcccaacgacgaagggatcaccccactgcacaacgccgtctgcgccggccaccatcacatcgtgaagttcctgctggattttggtgtcaacgtgaatgctgctgatagtgatggatggacgccgctgcactgcgctgcctcttgtaacagcgttcacctctgcaaacagctggtggagagtggtgccgccatttttgcctcaaccataagcgacattgaaactgctgcagacaagtgtgaggagatggaggaaggctacatccagtgctcccagtttctatatggggtgcaggaaaagctgggtgtgatgaacaaaggtgtggcgtatgctctgtgggactacgaggcccagaacagtgacgagctgtccttccacgaaggggacgccctcaccatcctgaggcgcaaggacgaaaagcgagactgaggtggtggtgggctcgccttggagaccgggagggctatgtgcccaaaaacctgctggggctgtatccacggattcaaacccccgacagcgaacactcgcctgaacttccttttggagcaccgcatggtcttgccagctaccaggagccacttaagagattattgtgctgttttccaggaaagctgcagctagaaaatggtcttaatggtgctcactttagcagacagcgtccacaatgtgaatcctacagtttccaggtgaggccctttctccagtttgcccattaactgggagaggtactttcgcctccaaggactgaattttgccaattactataaatccaaataaatacccactttcaaaacacccacccctcttgccattaagaagtcccataacccccggttggttgccagtgaagacagaagctcttactgacttggccccgaggcattcaccccctccagcagtgaacactgtccgccgctgtgaggcctgctcccctgcgaccgctctgccccccgtcaccgaatcggacactcatcctttctcacacttcccacacatgatccttcttcccttcatcaccaaaggaggcctctgtatgggaaacatgttccagtgttggtggcccagtgtgtatgcctcccagtacccactctgctcggccgccttgggggttccgcttcctgttccagttcacctaaaggctgattgtgcaggcccagcactgtggctggactgccgcgccacgggcaccaggacccctaagaccaagtgacaactgggagagcctcagcatatactcttctcctccgatctcacagcctgtcatgctgctcagtgtggttctcacccctgcaagctcaaattcagttccctgaatggagtcaggtgctggaggccgtggcagcggagggtggttggggttggggctgggggtggactggtgtgagggcagaccagggccaggtagacggggctgtttggtgcctgaaggatggcagacgcctggtgtcaggaggggccgccaccaaggagcagcagctggggcagaggagctggggtcaggggccacccctctctgccgatctccctgcctgggctggctgtgaggcccacctttgtcccaggcccagcctcaaggcaaggagggcgcttcactgaggtgtgaattgtacgtacaggctttttatataccaaaagtattttttgactagaccattcaaagctacccgaactatgttggaaattttttttttctcattaaaatacaggcccttaggctctatttttcatgtatgagtcgtgtgtaatttatgtaaaaatgtgtgtacagactcactgatgcagcactgtagcccatcaccttggagcactgactgtacatagtgtggtgaagaaaagtgaacgcccttgtagagcagcccgaccacaggagcatggccgctgccagcccagacgctgctgacgctgtgtaaatgtgcacaataaacccgtctcaccccgaaaaaaaaaa

SEQ ID NO: 89780 - DNA, 3474 bp, Homo sapiens
  misc_feature (1)...(3474): n = a,t,c or g
acgccgccgcctgtgtcatccgccattttgtgagaagcaaggcggcctccacgtttcctgagcgtcttcttcgcttttgcctcgaccgccccttgaccacagacatgtctcgggatcggttccggagtcgtggcggtggcggtggtggcttccacaggcgtggaggaggcggcggccgcggcggcctccacgacttccgttctccgccgcccggcatgggcctcaatcagaatcgcggccccatgggtcctggcccgggccagagcggccctaagcctccgatcccgccaccgcctccacaccaacagcaagcaacaagccaccaccgcaagcagccaccgccgcagcagccggccaccgcatcagcccgccgccgcatccacaagcncgcatcagcagcagcagccgccgccaccgccgcaggactcttccaagcccgtcgttgctcagggacccggccccgctcccggagtaggcagcgcaccaccagcctccagctcggccccgcccgccactccaccaacctcgggggccccgccagggtccgggccaggcccgactccgaccccgccgcctgcagtcacctcggcccctcccggggcgccgccacccaccccgccaagcagcggggtccctaccacacctcctcaggccggaggcccgccgcctccgcccgcggcagtcccgggcccgggtccagggcctaagcagggcccaggtccgggtggtcccaaaggcggcaaaatgcctggcgggccgaagccaggtggcggcccgggcctaagtacgcctggcggccaccccaagccgccgcatcgaggcggcggggagccccgcgggggccgccagcaccacccgccctaccaccagcagcatcaccaggggcccccgcccggcgggcccggcggccgcagcgaggagaagatctcgggacctcggaggggtttaaagccaatttgtctctcttgaggaggcctggagagaaaacttacacacagcgatgtcggttgtttgttgggaatctacctgctgatatcacggaggatgaattcaaaagactatttgctaaatatggagaaccaggagaagtttttatcaacaaaggcaaaggattcggatttattaagcttgaatctagagctttggctgaaattgccaaagccgaactggatgatacacccatgagaggtagacagcttcgagttcgctttgccacacatgctgctgccctttctgttcgtaatctttcaccttatgtttccaatgaactgttggaagaagcctttagccaatttggtcctattgaaagggctgttgtaatagtggatgatcgtggaagatctacagggaaaggcattgttgaatttgcttctaagccagcagcaagaaaggcatttgaacgatgcagtgaaggtgttttcttactgacgacaactcctcgtccagtcattgtggaaccacttgaacaactagatgatgaagatggtcttcctgaaaaacttgcccagaagaatccaatgtatcaaaaggagagagaaacccctcctcgttttgcccagcatggcacgtttgagtacgaatattctcagcgatggaagtctttggatgaaatggaaaaacagcaaagggaacaagttgaaaaaaacatgaaagatgcaaaagacaaattggaaagtgaaatggaagatgcctatcatgaacatcaggcaaatcttttgcgccaagatctgatgagacgacaggaagaattaagacgcatggaagaacttcacaatcaagaaatgcagaaacgtaaagaaatgcaattgaggcaagaggaggaacgacgtagaagagaggaagagatgatgattcgtcaacgtgagatggaagaacaaatgaggcgccaaagagaggaaagttacagccgaatgggctacatggatccacgggaaagagacatgcgaatgggtggcggaggagcaatgaacatgggagatccctatggttcaggaggccagaaatttccacctctaggaggtggtggtggcataggttatgaagctaatcctggcgttccaccagcaaccatgagtggttccatgatgggaagtgacatgcgtactgagcgctttgggcagggaggtgcggggcctgtgggtggacagggtcctagaggaatggggcctggaactccagcaggatatggtagagggagagaagagtacgaaggcccaaacaaaaaaccccgattttagatgtgatatttaggctttcattccagtttgttttgtttttttgtttagataccaatcttttaaattcttgcattttagtaagaaagctatctttttatggatgttagcagtttattgacctaatatttgtaaatggtctgtttgggcaggtaaaattatgtaatgcagtgtttggaacaggagaatttttttttcctttttatttctttattttttcttttttactgtataatgtccctcaagtttatggcagtgtaccttgtgccactgaatttccaaagtgtaccaattttttttttttttactgggcttcaaataaataaaaaaatagttataatattgatcttcaactttgccattcatgcttctatgcatattaggctacgtattccacattgaaagcatgagagtgtctaggcctttgaatggcatatgccatttctgggaaatgcatctggaggctaagtattgctttctacaaataattgccccctttgttttaaaaagaagaaatgcatattgaagtagtttgatgatttgtttggcatataggaagcacgctggtgctaagtattttttaaatggttatgtaagcaaagctgaactgtaaatcttcaggaatatgtattaagattgtggaatgggtgtaagacaattggtagggggtgaaagtgggtttgattaaatggatcttttatggccctatgatctatcctttacttgaaagcttttgaaaagtggaaaggtcattttgttgcatttccccatttcttgtttttaaaagaccaacaaatctcaagccctataaatggcttgtattgaacttttacatttgaattaaagatgttaaacatgaagtcttttcatgtattcaagtgatttataaagatggggtgtagtctaaaaaacaatacttgaaagtaagaaggtttagccaccacgcctggcctcttaatttcttttagcaacattttgtagttttcagtgtatgagtctttcacctcctgggttaagtttattcccaagtattttattttatcttattatttatttatgtattttgaaacagtcttactctgtcacccaggctggagtgcagtggctcaatctcggctcactgcaaacctccacctcccaggttcaagcgattctcctgcctcagccccccaagtagctgggattacaggtgcttgccactacacacggctaatttttgtatttttgggtgacagagcaa

SEQ ID NO: 89781 - DNA, 3381 bp, Homo sapiens
ccgggtcgacccacgcgtccgaaaaaatgaaaacaggcaggtctgcacttgttgtaactgacacaggagatatgtcagtattgaattctcccagacatcagagctgtataatgcatgttgatatggattgcttctttgtatcagtgggtatacgaaatagaccagatctcaaaggaaaaccagtggctgttacaagtaacagaggcacaggaagggcacctttacgtcctggcgctaacccccagctggagtggcagtattaccagaataaaatcctgaaaggcaaagcagatataccagattcatcattgtgggagaatccagattctgcgcaagcaaatggaattgattctgttttgtcaagggctgaaattgcatcttgtagttatgaggccaggcaacttggcattaagaacggaatgttttttgggcatgctaaacaactatgtcctaatcttcaagctgttccatacgattttcatgcatataaggaagtcgcacaaacattgtatgaaacattggcaagcctacactcataacattgaagctgtcagttgtgatgaagcgctggtagacattaccgaaatccttgcagagaccaaacttactcctgatgaatttgcaaatgctgttcgtatggaaatcaaagaccagacgaaatgtgctgcctctgttggaattggttctaatattctcctggctagaatggcaactagaaaagcaaaaccagatgggcagtaccacctaaaaccagaagaagtagatgattttatcagaggccagctagtgaccaatctaccaggagttggacattcaatggaatctaagttggcatctttgggaattaaaacttgtggagacttgcagtatatgaccatggcaaaactccaaaaagaatttggtcccaaaacaggtcagatgctttataggttctgccgtggcttggatgatagaccagttcgaactgaaaaggaaagaaaatctgtttcagctgagatcaactatggaataaggtttactcagccaaaagaggcagaagcttttcttctgagtctttcagaagaaattcaaagaagactagaagccactggcatgaagggtaaacgtctaactctcaaaatcatggtacgaaagcctggggctcctgtagaaactgcaaaatttggaggccatggaatttgtgataacattgccaggactgtaactcttgaccaggcaacagataatgcaaaaataattggaaaggcgatgctaaacatgtttcatacaatgaaactaaatatatcagatatgagaggggttgggattcacgtgaatcagttggttccaactaatctgaacccttccacatgtcccagtcgcccatcagttcagtcaagccactttcctagtgggtcatactctgtccgtgatgtcttccaagttcagaaagctaagaaatccaccgaagaggagcacaaagaagtatttcgggctgctgtggatctggaaatatcatctgcttctagaacttgcactttcttgccaccttttcctgcacatctgccgaccagtcctgatactaacaaggctgagtcttcagggaaatggaatggtctacatactcctgtcagtgtgcagtcgagacttaacctgagtatagaggtcccgtcaccttcccagctggatcagtctgttttagaagcacttccacctgatctccgggaacaagtagagcaagtctgtgctgtccagcaagcagagtcacatggcgacaaaaagaaagaaccagtaaatggctgtaatacaggaattttgccacaaccagttgggacagtcttgttgcaaataccagaacctcaagaatcgaacagtgacgcaggaataaatttaatagcccttccagcattttcacaggtggaccctgaggtatttgctgcccttcctgctgaacttcagagggagctgaaagcagcgtatgatcaaagacaaaggcagggcgagaacagcactcaccagcagtcagccagcgcatctgtgccaaagaatcctttacttcatctaaaggcagcagtgaaagaaaagaaaagaaacaagaagaaaaaaaccattggttcaccaaaaaggattcagagtcctttgaataacaagctgcttaacagtcctgcaaaaactctgccaggggcctgtggcagtccccagaagttaattgatgggtttctaaaacatgaaggacctcctgcagagaaacccctggaagaactctctgcttctacttcaggtgtgccaggcctttctagtttgcagtctgacccagctggctgtgtgagacctccagcacccaatctagctggagctgttgaattcaatgatgtgaagaccttgctcagagaatggataactacaatttcagatccaatggaagaagacattctccaagttgtgaaatactgtactgatctaatagaagaaaaagatttggaaaaactggatctagttataaaatacatgaaaaggctgatgcagcaatcggtggaatcggtttggaatatggcatttgactttattcttgacaatgtccaggtggttttacaacaaacttatggaagcacattaaaagttacataaatattaccagagagcctgatgctctctgatagctgtgccataagtgcttgtgaggtatttgcaaagtgcatgatagtaatgctcggagtttttataattttaaatttcttttaaagcaagtgttttgtacatttcttttcaaaaagtgccaaatttgtcagtattgcatgtaaataattgtgttaattattttactgtagcatagattctatttacaaaatgtttgtttataaagttttatggatttttacagtgaagtgtttacagttgtttaataaagaactgtatgtatattttgtacaggctcctttttgtgaatccttaaaaactcaactctaggaagcaactactgtttattatactaaaaggctgaaaaacctccaggccagactgctaagctctgaaattcctgagaggtctcagaccgggattctacttgttccaagaaagggtaaagcttctaaaccatcttattcttgtctccaagcatgaacacaggagcatgttaagaaaatctttactacttcttccatgcggagaaatctacatattttgaattagaaacaccctcacacccacttgaagatttttttcctgggaacattatgtcccgtagatcagaggtggtgttgtctttttgcttctactggccattgagaaactttgatgataaaaaagaacggtatagatttttcaaacgtatataaaatatttttatgttatatgttatgccataactttaaaataaaaatagtttaaaattcaaaaaaaaaa

SEQ ID NO: 89782 - DNA, 3792 bp, Homo sapiens
gcggccgcagcgtggagccgggtgattgtgaccgccgggggagccgggagccggccgcggcgccctctctccgtgtggccccctgagcggcccccctcccctgcccgggagggaggcggggggcacctgtgggcagccagtgaaccccgtcttcgatttgtcccgccggaacccgcaggaggacttcgagctgattcagcgcatcggcagcggcacctacggcgacgtctacaaggcacggaatgttaacactggtgaattagcagcaattaaagtaataaaattggaaccaggagaagactttgcagttgtgcagcaagaaattatcatgatgaaagacttgtaaacacccagagtattgttgcttatttttggaagctatcttcaggcgagataagctttggattttgcatggagtttttgtggaagtgggtcctttacaggatatttatcacgtaactggacctctgtcagaactgcaaattgcatatgttagcagagaaacactgcagggattatattatcttcacagtaaaggaaaaatgcacagagatataaagggagctaacattctattaacggataatggtcatgtgaaattggctgattttggagtatctgcacagataacagctacaattgccaaacggaagtctttcattggcacaccatattggatggctccagaagttgcagctgttgagaggaaggggggttacaatcaactctgtgatctctgggcagtgggaatcactgccatagaacttgcagagcttcagcctcctatgtttgacttacacccaatgagagcattatttctaatgacaaaaagcaattttcagcctcctaaactaaaggataaaatgaaatggtcaaatagttttcatcactttgtgaaaatggcacttaccaaaaatccgaaaaaaagacctactgctgaaaaattattacagcatccttttgtaacacaacatttgacacggtctttggcaatcgagctgttggataaagtaaataatccagatcattccacttaccatgatttcgatgatgatgatcctgagcctcttgttgctgtaccacatagaattcactcaacaagtagaaacgtgagagaagaaaaaacacgctcagagataacctttggccaagtgaaatttgatccacccttaagaaaggagacagaaccacatcatgaacttcccgacagtgatggttttttggacagttcagaagaaatatactacactgcaagatctaatctggatctgcaactggaatatggacaaggacaccaagggtggttactttttaggtgcaaacaagagtcttctcaagtctgttgaagaagaattgcatcagcgaggacacgtcgcacatttagaagatgatgaaggagatgatgatgaatctaaacactcaactctgaaagcaaaaattccacctcctttgccaccaaagcctaagtctatcttcataccacaggaaatgcattctactgaggatgaaaatcaaggaacaatcaagagatgtcccatgtcagggagcccgagcaaagccatcccaagttccacctagaccaccacctcccagattacccccacacaaacctgttgccttaggaaatggaatgagctccttccagttaaatggtgaacgagatggctcattatgtcaacaacagaatgaacatagaggcgaaaacctttcaagaaaagaaaagaaagatgtaccaaagcctattagtaatggtcttcctccaacacctaaagtgcatatgggtgcatgtttttcaaaagtttttaatgggtgtcccttgaaaattcactgtgcatcatcatggataaacccagatactagagatcagtacttgatatttggtgccgaagaagggatttataccctcaatcttaatgaacttcatgaaacatcaatggaacagctattccctcgaaggtgtacatggttgtatgtaatgaacaattgcttgctatcaatatctggtaaagcttctcagctttattcccataatttaccagggctttttgattatgcaagacaaatgcaaaagttacctgttgctattccagcacacaaactccctgacagaatactgccaaggaaattttctgtatcagcaaaaatccctgaaaccaaatggtgccagaagtgttgtgttgtaagaaatccttacacgggccataaatacctatgtggagcacttcagactagcattgttctattagaatgggttgaaccaatgcagaaatttatgttaattaagcacatagattttcctataccatgtccacttaaaatgtttgaaatgctggtagttcctgaacaggagtaccctttagtttgtgttggtgtcagtagaggtagagacttcaaccaagtggttcgatttgagacggtcaatccaaattctacctcttcatggtttacagaatcagataccccacagacaaatgttactcatgtaacccaactggagagagataccatccttgtatgcttggactgttgtataaaaatagtaaatctccaaggaagattaaaatctagcaggaaattgtcatcagaactcacctttgatttccggattgaatcaatagtgtgcctacaagacagtgtgctagctttctggaaacatggaatgcaaggtagaagttttagatctaatgaggtaacacaagaaatttcagatagcacaagaattttcaggctgcttggatctgacagggtcgtggttttggaaagtaggccaactgataaccccacagcaaatagcaatttgtacatcctggcgggtcatgaaaacagttactgagaattgttgtgctttgacagttaactctagaaagaaagaacactaccactgcaacattaatggatgcttgaagctgtacaaaagctgcagtaacctgtcttcagttactttgtaatttattgtggcatgagataagatggggaaaattttgttttaagtggtatggatatatttagcatattgaaccacacaagtgcttaattcattgttatgtaatctttgtacatataggcagtattttttctgtgaaacttcatattgctgaagacatacactaagaatttatgtagataatgtacttttatgagatgtacaagtaagtgtcttatctgtacagatgtaaatgttgatgaaaatgcaattggggttaatattttaagaattctttagtatattcttgggtgtggctatattacaaaatgggatgctggcaatgaaacaatacatttaacactattgtatttttattatatgtaatttagtaatatgaatataaatcttgtaacttttaaaattgtaatggaggctgtaatcattttataatctttttaattttaatgcaagtacactggtgtttatatttgcacagagtattgatatgtgatgtattaagtcacaaaagtaagctgtgacattgtctataagcatttggctccacaaatgtatttggattgttttctatgtgaagcaaaccaattataattaaccacatgttgtagtaactggtctttttatatttaagcagaatcctgtaagattgcttgtctttgcttaaaaacaatacctttgaacatttttgaatcacagaatagcggtaccatgatagaatactgcaattgtggtcagaattacagtatgcacaaagaattaattagcattattaaagagtcctcactaaacatttcatatgatcacactgaagaactgtaacattccatagagtgaagtggktcactttc

SEQ ID NO: 89783 - DNA, 4809 bp, Homo sapiens
tttcgtcgtcagagcatcatcaacgacctaaagtctcctcagactgttgaaggcccagtggggcagctctggggctgcatctgagccagtggtgcttggcgaagagggctgtggattccccagcaccaatgaataccctgatctggaagaggagagagcaacctatccacaggaagaggaccgttttctcactcctggcagggcccagctgctttggtctccctggagccccctggatcaggaggaggcttgtgcctccaggcagctgcactctctggcctcgttcagcactgtcacagccagaaggaacccccttcacaatccctgggggatggagttggcagcgtctgaaaacacagactccccctccccccggcccctcaggccgggggtgaccttgccccctggagccctcaccatgaataccaaggacaccaccgaggttgctgaaaacagccaccacctgaagatctttctccccaagaagctgctggagtgtcttcctcgctgcccgctgctgcctccagagaggctacggtggaatacaaatgaggagattgcatcctacctgatcacctttgagaagcatgatgagtggctgtcttgtgccccaaagacaaggcctcagaatggctccatcatcctctacaatcgcaagaaggtgaaatatcggaaggatggttacctctggaagaagcggaaggatgggaagaccacccgagaggaccacatgaagctgaaggtccagggcatggagtgtctctatggctgctacgttcactcttccatcgtccccacattccatcggcgctgctactggctgctccagaaccctgacatcgtccttgtgcactacctgaacgtcccagccctggaggactgtggaaagggctgcagccccatcttttgttccatcagcagcgaccgtcgagagtggctgaagtggtcccgggaggagttgttgggacagctgaagcccatgtttcatggcatcaagtggagctgcgggaatggaacagaagagttctctgtagaacacctggtgcagcagattttggacacccacccaaccaagcctgctccccgaacccacgcctgtctctgcagtggggggcttggttctgggagccttacccacaaatgcagcagcacgaaacaccgcatcatctctcccaaagtggagccccgagctttaaccctgacctctatcccccaccctcaccccccagagcctcctccactgatagccccacttcccccagagctccccaaggcacacacctccccatcttcttcctcttcttcctcctcatcaggttttgcagagcccctagaaatcagacctagccctcccacttctcgagggggttcttcaagaggaggcactgctatcctcctcctgacaggactggagcagcgggctggaggcttgacgcccaccaggcacttggctccacaggctgatcctaggccttccatgagtttggcagtggttgtaggcactgagccttctgccccaccagctcctcccagtcctgcctttgaccctgatcgttttctcaacagcccccagaggggccagacatatggaggggggcagggagtaagcccagacttccccgaggcagaggccgctcataccccctgttctgccctagagcctgctgctgccctggagccccaggcagctgctcggggtcccccaccacagtcagtagcaggtgggagaagaggaaactgcttcttcatccaagatgatgacagtggggaggagctcaagggtcacggggctgccccacccataccttcaccccctccctcacccccaccctcacctgcccccttggagccgtcaagcagggtaggaagaggagaggccttgtttggaggacctgttggggccagtgaactggagcccttcagtctttcatcattcccagaccttatgggagaactcatcagtgacgaagctccaagcatccctgctccaaccccccagctgtctcctgctcttagcaccatcacagacttctccccagagtggtcctacccagagggtggggtcaaggtgctcatcacaggtccttggaccgaagccgccgagcattactcctgtgtctttgatcacatcgcagtgccagcctcacttgtccagcctggtgtcttacgctgctactgtcccgcccatgaggtagggctggtgtctttgcaggtggcagggcgggaggggcccctttctgcttctgtgctctttgagtatcgagcccgccgattcctgtctctgcctagtactcaacttgactggctgtcactggacgacaaccagttccggatgtccatactagagcgactggagcagatggagaagcggatggcagagatcgcagcagctgggcaggtgccttgccagggtcctgatgctcctccagttcaggatgaaggccaggggcctgggttcgaagcacgggtagtggtcttggtagaaagcatgatcccacgctccacctggaagggtcctgaacgtctggcccatggaagccccttccggggcatgagccttctgcacctggctgctgcccagggctatgcccgcctcatcgagaccctgagccagtggcggagtgtggagactggaagcttggacttagagcaggaggttgacccgctcaacgtggatcatttctcttgcacccctctgatgtgggcttgtgccctgggacacctggaagctgctgtgctccttttccgttggaaccgacaggcactgagcattcccgactctctgggccgtctgccattgtctgtggctcattcccggggtcatgtgcgccttgcccgctgccttgaggaactacagagacaggagccttcggtggagcccccatttgccctatcgccaccctcctccagcccagacactggtctgagcagcgtctcctcgccctcggagctgtcggatggcaccttttccgtcacgtcagcctattctagtgccccagatggcagtcccccccctgcacctctgccagcctctgagatgactatggaggacatggccccaggccagctttcctctggtgtcccagaagcccccctactcctcatggactatgaggctaccaactccaaggggcccctctcctcccttcctgccctcccaccagcttcagatgatggggctgctccggaggacgctgacagcccacaggctgtggatgtgatcccggtggacatgatctcactagccaagcagatcatcgaagccacaccggagcggattaaacgagaggacttcgtggggctgcccgaggctggagcctcaatgcgggagcggacaggggctgtggggctcagtgagaccatgtcctggctggccagctacctgggagaatgtggaccatttccccagctcaacccctcccagcgaacttgccctttgagcggaggtcgcctgggcttgtcccttacagcaccctcctgggcagagtttctctcttgcattccaccagtgggcaagattggaaagttgatttttgccttgttgacattattcagattcaagagcagcgggaactgtatgaggctgcccgagtcatccagacggccttccgaaagtacaagggccggcggctgaaggagcagcaggaggtagcagcagctgtaatccagcgctgttaccggaagtacaagcagctgacctggattgcacttaagtttgcactctataagaagatgacccaggcggccatcctgatccagagcaagttccgaagctactatgaacagaagcgatttcagcagagccgccgagcggctgtgctcatccagcagcactaccgctcctaccgccgcaggcccggccctccccaccggacttcggccaccctgcctgcccgcaacaaaggctcctttctcaccaagaagcaggaccaggcagcccggaagatcatgagattcctgcggcgctgccgacacaggatgagggaactgaagcagaaccaggagctggaagggcttccccagccgggactggccacatgacctggccaccgcctttctcaccaccctgggggcgcctcgtgcagtcttaacagggagagggctttctggggcagggggagcccctgtcggcagctttcctgttcacctttgttggagccctctgtaggcctcctccctcctccccacgccttgctcccacacccctctcctcgtccctcctggtcgtgccccgtctcttttggtcctggctccagaaaacccgcgccccacatacctgcatcttccgctgtgacctccggagccctgcctgcccctgctccccagctcctcctgcctgcacccgactcggccccctcctgacttgccttatttatttgttcgacgcgtctctgaatgtatccgcctcggttcccaccactgccttcgctgcgcacgcccctcgtgtttcagggctgaccgtgtccccacccgactccgcatgtttgcgtctgtttcctccctctctggccctgtcttaccccatcacccgactctggccactgacctcagggccgaaggggaggtggtgtacataggaacgcgttgcggagtccgccccgtcccccgaggggaggggtcttgtacatactgtaacatacagagtatagtgaagaatctatttaaggcgccgcggggagggctgcacggccgggcttgtggttctctagcgcggcgggggcctcctgccggctccacgggcactttctacttgtgcatgggcttggtttatacgaattgccattaaacatcgctgcaccaaaaaaaaaa

SEQ ID NO: 89784 - DNA, 3120 bp, Homo sapiens
ggttgaaaggctgcatgtactcagaagatttgcaagcaacactccaattcttgtcatagagctcgcagacttctcacttatcggcttttttccttccttattttttaagaattattcttattttcccctctctttttctgctctctcctctctcagtctctccttttctatctgcctcttcatttttctcctagtctgttttttttttcccggctctgcacctggattgtatcttcagcaaacaatcgggcactttgagaactaactggagacagtcttgtagggaagatctgtatggaattatctgcttttatggtgaacttggcatttgtgaatgggaatcttgttcacaatattaattgctagcaaaaacaagaaaaagaacacaggagtaaaacgtggatttttctgaatacgcattgtgatgaccagcaattaccttaccgactaatatccagaggagaataatttggaagactgttgtggggaacagcctttaagagctggaagatgaaagctccgattccacacttgattctcttatacgctacttttactcagagtttgaaggttgtgaccaaaagaggctccgccgatggatgcactgactggtctatcgatatcaagaaatatcaagttttggtgggagagcctgttcgaatcaaatgtgcactcttttatggttatatcagaacaaattactcccttgcccaaagtgctggactcagtttgatgtggtacaaaagttctggtcctggagactttgaagagccaatagcctttgacggaagtagaatgagcaaagaagaagactccatttggttccggccaacattgctacaggacagtggtctctacgcctgtgtcatcagaaactccacttactgtatgaaagtatccatctcactgacagtgggtgaaaatgacactggactctgctataattccaagatgaagtattttgaaaaagctgaacttagcaaaagcaaggaaatttcatgccgtgacatagaggattttctactgccaaccagagaacctgaaatcctttggtacaaggaatgcaggacaaaaacatggaggccaagtattgtattcaaaagagatactctgcttataagagaagtcagagaagatgacattggaaattatacctgtgaattaaaatatggaggctttgttgtgagaagaactactgaattaactgttacagcccctctgactgataagccacccaagcttttgtatcctatggaaagtaaactgacaattcaggagacccagctgggtgactctgctaatctaacctgcagagctttctttgggtacagcggagatgtcagtcctttaatttactggatgaaaggagaaaaatttattgaagatctggatgaaaatcgagtttgggaaagtgacattataaattcttaaggagcatcttggggaacaggaagtttccatctcattaattgtggactctgtggaagaaggtgacttgggaaattactcctgttatgttgaaaatggaaatggacgtcgacacgccagcgttctccttcataaacgagagctaatgtacacagtggaacttgctggaggccttggtgctatactcttgctgcttgtatgtttggtgaccatctacaagtgttacaagatagaaatcatgctcttctacaggaatcattttggagctgaagagctcgatggagacaataaagattatgatgcatacttatcatacaccaaagtggatcctgaccagtggaatcaagagactggggaagaagaacgttttgcccttgaaatcctacctgatatgcttgaaaagcattatggatataagttgtttataccagatagagatttaatcccaactggaacatacattgaagatgtggcaagatgtgtagatcaaagcaagcggctgattattgtcatgaccccaaattacgtagttagaaggggctggagcatctttgagctggaaaccagacttcgaaatatgcttgtgactggagaaattaaagtgattctaattgaatgcagtgaactgagaggaattatgaactaccaggaggtggaggccctgaagcacaccatcaagctcctgacggtcattaaatggcatggaccaaaatgcaacaagttgaactccaagttctggaaacgtttacagtatgaaatgccttttaagaggatagaacccattacacatgagcaggctttagatgtcagtgagcaagggccttttggggagctgcagactgtctcggccatttccatggccgcggccacctccacagctctagccactgcccatccagatctccgttctacctttcacaacacgtaccattcacaaatgcgtcagaaacactactaccgaagctatgagtacgacgtacctcctaccggcaccctgcctcttacctccataggcaatcagcatacctactgtaacatccctatgacactcatcaacgggcagcggccacagacaaaatcgagcagggagcagaatccagatgaggcccacacaaacagtgccatcctgccgctgttgccaagggagaccagtatatccagtgtgatatggtgacagaaaagcaagggacatcccgtccctgggaggttgagtggaatctgcagtccagtgcctggaactaaatcctcgactgctgctgttaaaaaacatgcattagaatctctagaacacgaggaaaaacagggtcttgtacatatgttttttggaatttctttgtagcatcagtgtcctcctgttttaccatgtcttttaccattacattttttgactttgttttatatgtcgttggaatttgtaaatttacattttttttaaagaagagactgatgtgtagatagaaaaccctttttttgcttcattagtttagttttagaatgggtttttattttatttccttttttaaaattttactttgcttttaacatttccttggggtgcttggacaaatctatccgatgggacaaggagcaccggattctttctcgggttctgcctagcatcaactgggccacgtcggccttcagagaacagtgcaacaaatgccagcattgccattcgggggaaaaaaaaaa

SEQ ID NO: 89785 - DNA, 5514 bp, Homo sapiens; identical to SEQ ID NO: 60551

SEQ ID NO: 89786 - DNA, 5633 bp, Homo sapiens
tttcgtgcgcctttctccgcgtcggggcggcccggagcgcggtggcgcggcgcgggaggggttttctggtgcgtcctggtccaccatggccaaaccaacaagcaaagattcaggcttgaaggagaagtttaagattctgttgggactgggaacaccgaggccaaatcccaggtctgcagagggtaaacagacggagtttatcatcaccgcggaaatactgagagaactgagcatggaatgtggcctcaacaatcgcatccggatgatagggcagatttgtgaagtcgcaaaaaccaagaaatttgaagagcacgcagtggaagcactctggaaggcggtcgcggatctgttgcagccggagcggccgctggaggcccggcacgcggtgctggctctgctgaaggccatcgtgcaggggcagggcgagcgtttgggggtcctcagagccctcttctttaaggtcatccaaggaattacccttccaacgaaagaccttcacgaaaaggctggaggttttcaaggccctcacagacaatgggagacacatcacctacttggaggaagagctggctgactttgtcctgcagtggatggatgttggcttgtcctcggaattccttctggtgctggtgaactttggtcaaattcaataagcttgttaccctcgacgaagtacaatcgcaaaggaatgggttcaagatgatctgtctgcttgtgcgtccggaccgcgtcctcttgtggacatagaggtctccctggcaggtgctggacgccgtggtctgctacaactgcctgccggctgagagcctcccgctgttcatcgttaccctctgtcgcaccatcaacgtcaaggagctctgcgagccttgctggaagctgatgcggaacctccttggcacccacctgggccacagcgccatctacaacatgtgccacctcatggaggacagagcctacatggaggacgcgcccctgctgagaggagccgtgttttttgtgggcatggctctctggggagcccaccggctctattctctcaggaactcgccgacatctgtgttgccatcattttaccaggccatggcatgtccgaacgaggtggtgtcctatgagatcgtcttgtccatcaccaggctcatcaagaagtataggaaggagctccaggtggtggcgtgggacattctgctgaacatcatcgaacggctccttcagcagctccagaccttggacagcccggagctcaggaccatcgtccatgacctgttgaccacggtggaggagctgtgtgaccagaacgagttccacgggtctcaggagagatactttgaactggtggagagatgtgcggaccagaggcctgagtcctccctcctgaacctgatctcctatagagcgcagtccatccacccggccaaggacggctggattcagaacctgcaggcgctgatggagagattcttcaggagcgagtcccgaggcgccgtgcgcatcaaggtgctggacgtgctgtcctttgtgctgctcatcaacaggcagttctatgaggaggagctgattaactcagtggtcatctcgcagctctcccacatccccgaggataaagaccaccaggtccgaaagctggccacccagttgctggtggacctggcagagggctgccacacacaccacttcaacagtctgctggacatcatcgagaaggtgatggcccgctccctctccccacccccggagctggaagaaagggatgtggccgcatactcggcctccttggaggatgtgaagacagccgtcctggggcttctggtcatccttcagaccaagctgtacaccctgcctgcaagccacgccacgcgtgtgtatgagatgctggtcagccacattcagctccactacaagcacagctacaccctgccaatcgcgagcagcatccggctgcaggcctttgacttcctgttgctgctgcgggccgactcactgcaccgcctgggcctgcccaacaaggatggagtcgtgcggttcagcccctactgcgtctgcgactacatggagccagagagaggctctgagaagaagaccagcggccccctttctcctcccacagggcctcctggcccggcgcctgcaggccccgccgtgcggctggggtccgtgccctactccctgctcttccgcgtcctgctgcagtgcttgaagcaggagtctgactggaaggtgctgaagctggttctgggcaggctgcctgagtccctgcgctataaagtgctcatctttacttccccttgcagtgtggaccagctgtgctctgctctctgctccatgctttcaggcccaaagacactggagcggctccgaggcgccccagaaggcttctccagaactgacttgcacctggccgtggttccagggctgacagcattaatctcttaccataactacctggacaaaaccaaacagcgcgagatggtctactgcctggagcagggcctcatccaccgctgtgccagccagtgcgtcgtggccttgtccatctgcagcgtggagatgcctgacatcatcatcaaggcgctgcctgttctggtggtgaagctcacgcacatctcagccacagccagcatggccgtcccactgctggagttcctgtccactctggccaggctgccgcacctctacaggaactttgccgcggagcagtatgccagtgtgttcgccatctccctgccggacaccaacccctccaagtttaatcagtacatcgtgtgtctggcccatcacgtcatagccatgtggttcatcaggtgccgcctgcccttccggaaggattttgtccctttcatcactaaggcgcctgcggtccaatgtcctcttgtcttttgatgacacccccgagaaggacagcttcagggcccggagtactagtctcaacgagagacccaagagtctgaggatagccagaccccccaaacaaggcttgaataactctccacccgtgaaagaattcaaggagagctctgcagccgaggccttccggtgccgcagcatcagtgtgtctgaacatgtggtccgcagcaggatacagacgtccctcaccagtgccagcttggggtctgcagatgagaactccgtggcccaggctgacgatagcctgaaaaacctccacctggagctcacggaaacctgtctggacatgatggctcgatacgtcttctccaacttcacggctgtcccgaagaggtctcctgtgggcgagttcctcctagcgggtggcaggaccaaaacctggctggttgggaacaagcttgtcactgtgacgacaagcgtgggaaccgggacccggtcgttactaggcctggactcgggggagctgcagtccggcccggagtcgagctccagccccggggtgcatgtgagacagaccaaggaggcgccggccaagctggagtcccaggctgggcagcaggtgtcccgtggggcccgggatcgggtccgttccatgtcggggggccatggtcttcgagttggcgccctggacgtgccggcctcccagttcctgggcagtgccacttctccaggaccacggactgcaccagccgcgaaacctgagaaggcctcagctggcacccgggttcctgtgcaggagaagacgaacctggcggcctatgtgcccctgctgacccagggctgggcggagatcctggtccggaggcccacagggaacaccagctggctgatgagcctggagaacccgctcagccctttctcctcggacatcaacaacatgcccctgcaggagctgtctaacgccctcatggcggctgagcgcttcaaggagcaccgggacacagccctgtacaagtcactgtcggtgccggcagccagcacggccaaaccccctcctctgcctcgctccaacacagtggcctctttctcctccctgtaccagtccagctgccaaggacagctgcacaggagcgtttcctgggcagactccgccgtggtcatggaggagggaagtccgggcgaggttcctgtgctggtggagcccccagggttggaggacgttgaggcagcgctaggcatggacaggcgcacggatgcctacagcaggtcgtcctcagtctccagccaggaggagaagtcgctccacgcggaggagctggttggcaggggcatccccatcgagcgagtcgtctcctcggagggtggccggccctctgtggacctctccttccagccctcgcagcccctgagcaagtccagctcctctcccgagctgcagactctgcaggacatcctcggggaccctggggacaaggccgacgtgggccggctgagccctgaggttaaggcccggtcacagtcagggaccctggacggggaaagtgctgcctggtcggcctcgggcgaagacagtcggggccagcccgagggtcccttgccttccagctccccccgctcgcccagtggcctccggccccgaggttacaccatctccgactcggccccatcacgcaggggcaagagagtagagagggacgccttaaagagcagagccacagcctccaatgcagagaaagtgccaggcatcaaccccagtttcgtgttcctgcagctctaccattcccccttctttggcgacgagtcaaacaagccaatcctgctgcccaatgagtcacagtcctttgagcggtcggtgcagctcctcgaccagatcccatcatacgacacccacaagatcgccgtcctgtatgttggagaaggccagagcaacagcgagctcgccatcctgtccaatgagcatggctcctacaggtacacggagttcctgacgggcctgggccggctcatcgagctgaaggactgccagccggacaaggtgtacctgggaggcctggacgtgtgtggtgaggacggccagttcacctactgctggcacgatgacatcatgcaagccgtcttccacatcgccaccctgatgcccaccaaggacgtggacaagcaccgctgcgacaagaagcgccacctgggcaacgactttgtgtccattgtctacaatgactccggtgaggacttcaagcttggcaccatcaagggccagttcaactttgtccacgtgatcgtcaccccgctggactacgagtgcaacctggtgtccctgcagtgcaggaaagacatggagggccttgtggacaccagcgtggccaagatcgtgtctgaccgcaacctgcccttcgtggcccgccagatggccctgcacgcaaatatggcctcacaggtgcatcatagccgctccaaccccaccgatatctacccctccaagtggattgcccggctccgccacatcaagcggctccgccagcggatctgcgaggaagccgcctactccaaccccagcctacctctggtgcaccctccgtcccatagcaaagcccctgcacagactccagccgagcccacacctggctatgaggtgggccagcggaagcgcctcatctcctcggtggaggacttcaccgagtttgtgtgaggccggggccctccctcctgcactggccttggacggtattgcctgtcagtgaaataaataaagtcctgaccccagtgcacagacatagaggcacagaaaaaaaaaa

SEQ ID NO: 89787 - DNA, 2285 bp, Homo sapiens
actttctgctgtcactagcataacagaaaagacgaatggcttttgttttaaactgagggcacttttacaaaagtcatctttccatttatttttctttcagaaaaaagaatttgggttttgagcttttttaaaaaaaaaaagacaaacactttccttgactttgagaaataatttaagtcaaagaatctgctctatgctaaccaagagatagagcacagcaaagatctgccagccccaggcctttacctaggggcctggaaattcaagtattcttattgggggaggccatttgtttctgattagaagctgtctaaacctcctactcctcaactcaaaggaaaacacagagcataccatggccaagaaagttgcagtgattggagctggtgtgagtggcctctcctccatcaaatgctgtgtggatgaggacctggagcccacctgctttgagagaagtgatgacattgggggattatggaagtttactgaacgtggttcatctctatcagtcatgatctggccattagctttgtctctgctcagacatggtggcttttgttacagtgacttccctttccacgaagattatcctaatttcatgaaccatgaaaaattttgggactatctccaagaatttgctgagcactttgacctcctgaaatacattcagtttaagaccactgtgtgcggcataacgaagcgtccagacttctccgaaactggtcagtgggatgttgtcacagagacagagggcaagcaaaatagagctgtctttgatgctgttatggtttgcactggacatttcctgaatccccatttacctttggaagcctttcctggaattcataagtttaaaggtcagatcctgcatagtcaagagtacaagatcccagaaggctttcagggcaaacgcgtcttggtgattggtcttgggaacactggaggagacattgctgtggaactcagtcgaacggcagctcaggtacttctcagtactagaactggtacctgggttcttgggcgctcttcagattggggctatccttataatatgatggttacaagaagatgctgtagttttattgcacaagttctgccttcacgttttctaaactggattcaagaaaggaagttgaataagagatttaatcatgaggattatggattaagtattaccaaagggaaaaaagcaaaattcattgtgaatgatgagctgccaaactgtatcctctgtggggcaatcactatgaaaaccagcgtgattgaatttacagaaacctctgctgtctttgaagatgggacagtggaagaaaacattgatgttgtgatcttcactacaggatatacattttcttttccattttttgaagaacctcttaaaagcctctgtacaaagaagatatttctatacaagcaagtctttcccttaaacctagagagagcgacattagccatcatcggccttatcggccttaaaggatccatcttatcaggcacagagctccaagcacgatgggtcacaagagtattcaaaggactctgtaagagacctgcatcccaaaaattgatgatggaggctactgaaaaggaacagctcattaaaaggggagtgtttaaagacaccagcaaagacaaatttgactacattgcctacatggatgatatcgctgcctgcataggcacaaagcccagcatcccacttctgttcctcaaggatcccagactagcttgggaagttttctttggaccatgtactccttatcagtaccgccctcatgggccctggaaaatgggatggagccagaaatgccatcctgacccagtgggacagaacattgaaacctttaaaaactcgaattgtccctgattcctccaaggcctggccttccatgttcacattatttaaaagcctggggggcacctgtcctacttgcctctcttctacttatctgtaaaatcttcacttttcttgaaattggtgagagataaactacaggacagaatgtccccttacctagtaagtctttggcgaggatgaacctgattggttacaaggggtacacccaagtcatgctaattctatctcccaagtatcttgtgcatccctcctctgctctccatcataactgctattagccaaattcaggcccagtcatctcctatctgaattattgtattatcttcttctttgttttcagtaccctctttcttgccaccctttccaatgcatcttctaccctgctacctcagtgattattctaaaataaatatatatgatatggttt

SEQ ID NO: 89788 - DNA, 1611 bp, Homo sapiens
aaacccactccaccttactaccagacaaccttagccaaaccatttacccaaataaagtataggcgatagaaattgaaacctggcgcaatagatatagtaccgcaagggaaagatgaaaaattataaccaagcataatatagcaaggactaacccctataccttctgcataatgaattaactagaaataactttgcaaggagagtcaaagctaaggcccccgaaaccaggcgagctacctaagaacagctaaaagagcacacccgtctatgtagcaaaatagtgggaagatttataggtagaggcgacaaacctaccgagcctggtgatagctggttgtccaagatagaatcttagttcaactttaaatttgcccacagaaccctctaaatccccttgtaaatttaactgttagtccaaagaggaacagctctttggacactaggaaaaaaccttgtagagagagtgtcagcccaattccacacttttccacatgttggatggccttggagtggtagccataagcatttttggaattcaactaaaaactgaaggatccttgaggacggcagtacctggcatacctacacagtcagcgttcaacaagtgtttgcaaaggtacattggggcactgggggcacgagtgatctgtgacaatatccctggtttggtgagccggcagcggcagctgtgccagcgttacccagacatcatgcgttcagtgggcgagggtgcccgagaatggatccgagagtgtcagcaccaattccgccaccaccgctggaactgtaccaccctggaccgggaccacaccgtctttggccgtgtcatgctcagaagtagccgagaggcagcttttgtatatgccatctcatcagcaggggtgatccacgctattactcgcgcctgtagccagggtgaactgagtgtgtgcagctgtgacccctacacccgtggccgacaccatgaccagcgtggggacttttgactggggtggctgcagtgacaacatccactacggtgtccgttttgccaaggccttcgtggatgccaaggagaagaggcttaaggatgcccgggccctcatgaacttacataataaccgctgtggtcgcacggctgtgcggcggtttctgaagctggagtgtaagtgccatggcgtgagtggttcctgtactctgcgcacctgctggcgtgcactctcagatttccgccgcacaggtgattacctgcggcgacgctatgatggggctgtgcaggtgatggccacccaagatggtgccaacttcaccgcagcccgccaaggctatcgccgtgccacccggactgatcttgtctactttgacaactctccagattactgtgtcttggacaaggctgcaggttccctaggcactgcaggccgtgtctgcagcaagacatcaaaaggaacagacggttgtgaaatcatgtgctgtggccgagggtacgacacaactcgagtcacccgtgttacccagtgtgagtgcaaattccactggtgctgtgctgtacggtgcaaggaatgcagaaatactgtggacgtccatacttgcaaagcccccaagaaggcagagtggctggaccaaacctga

SEQ ID NO: 89789 - DNA, 7564 bp, Homo sapiens; identical to SEQ ID NO: 60780

SEQ ID NO: 89790 - DNA, 5299 bp, Homo sapiens
gggagggacgaaccgcgcgaccgagccctacaaaacccgccccggccgagtggcgaggcgagctttccagccgggctcccagagcgcgctgcgcaggagacgcggtggcctgagagcctgagggtccccggactcgcccaggctctgagctctctcccaccatgagcgcccggaccgcccccaggccgcaggtgctcctgctgccgctcctgctggtgctcctggcggcggcgcccgcagccagcaagggttgtgtctgtaaagacaaaggccagtgcttctgtgacggggccaaaggggagaagggggagaagggctttcctggaccccccggttctcctggccagaaaggattcacaggtcctgaaggcttgcctggaccgcagggacccaagggctttccaggacttccaggactcacgggttccaaaggtgtaaggggaataagtggattgccaggattttctggttctcctggacttccaggcaccccaggcaataccgggccttacggacttgtcggtgtaccaggatgcagtggttctaagggtgagcaggggtttccaggactcccagggacaccgggctacccagggatcccgggtgctgctggtttgaaaggacaaaagggtgctcctgctaaaggagaagatatagaacttgatgcaaaaggcgaccccgggttgccaggggctccaggaccccagggtttgccaggccctccaggttttcctgggcctgttggcccacctggtcctccgggattctttggctttccaggagccatgggacctagaggacctaagggtcacatgggtgaaagagtgataggacataaaggagagcggggtgtgaaagggttaacaggacccccgggaccaccaggaacagttattgtgaccctaactggcccagataacagaacggacctcaagggggaaaagggagacaagggagcaatgggcgagcctggacctcctggaccctcaggactgcctggagaatcatatggatctgaaaagggtgctcctggagaccctggcctgcagggaaaacccggaaaagatggtgttcctggcttccctggaagtgagggagtcaagggcaacaggggtttccctgggttaatgggtgaagatggcattaagggacagaaaggggacattggccctccaggatttcgtggtccaacagaatattatgacacataccaggaaaagggagatgaaggcactccaggcccaccagggcccagaggagctcgtggcccacaaggtcccagtggtccccccggagttcctggaagtcctggatcatcaaggcctggcctcagaggagcccctggatggccaggcttgaaaggaagtaaaggggaacgaggccgcccaggaaaggatgccatggggactcctgggtccccaggttgtgctggttcaccaggtcttccaggatcaccgggacctccaggaccgccaggtgacatcgtttttcgcaagggtccacctggagatcacggactgccaggctatctagggtctccaggaatcccaggagttgatgggcccaaaggagaaccaggcctcctgtgtacacagtgcccttatatcccagggcctcccggtctcccaggattgccagggttacatggtgtaaaaggaatcccaggaagacaaggcgcagctggcttgaaaggaagcccagggtccccaggaaatacaggtcttccaggatttccaggtttcccaggtgcccagggggacccaggacttaaaggagaaaaaggtgaaacacttcagcctgaggggcaagtgggtgtcccaggtgacccggggctcagaggccaacctgggagaaagggcttggatggaattcctggaactccgggagtgaaaggattaccaggacctaaaggcgaactggctctgagtggtgagaaaggggaccaaggtcctccaggggatcctggctcccctgggtccccaggacctgcaggaccagctggaccacctggctacggaccccaaggagaacctggtctccagggcacgcaaggagttcctggagcccccggaccacccggagaagccggccctaggggagagctcagtgtttcaacaccagttccaggccctccaggacctccagggccccctggccatcctggcccccaaggtccacctggtatccctggatccctggggaaatgtggagatcctggtcttccagggcctgatggtgaaccaggaattccaggaattggatttcctgggccacctggacctaagggagaccaaggttttccaggtacaaaaggatcactgggttgtcctggaaaaatgggagagcctgggttacctggaaagccaggcctcccaggagccaagggagaaccagcagtagccatgcctggaggaccaggaacaccaggttttccaggagaaagaggcaattctggggaacatggagaaattggactccctggacttccaggtctccctggaactccaggaaatgaagggcttgatggaccacgaggagatccagggcagcctggaccacctggagaacaaggacccccaggaaggtgcatagagggtcccaggggagcccaaggacttccaggcttaaatggattgaaagggcaacaaggcagaagaggtaaaacggggccaaagggagacccaggaattccaggcttggatagatcaggatttcctggagaaactggatcaccaggaattccaggtcatcaaggtgaaatgggaccactgggtcaaagaggatatccaggaaatccgggaattttagggccaccaggtgaagatggagtgattgggatgatgggatttcctggagccattggccctccagggccccctgggaacccaggcacaccagggcagagggggagccctggaattccaggagtaaagggccagagaggaaccccaggagccaagggggaacaaggagataaaggaaatcccgggccttcagagatatcccacgtaataggggacaaaggagaaccaggtctcaaaggattcgcaggaaatccaggtgagaaaggaaacagaggcgttccagggatgccaggtttaaagggcctcaaaggactacccggaccagcaggaccaccaggccccagaggagatttgggcagcactgggaatcctggagaaccaggactccgtggtataccaggaagcatggggaacatgggcatgccaggttctaaaggaaaaaggggaactttgggattcccaggtcgagcaggaagaccaggcctcccaggtattcatggtctccagggagataagggagagccaggttattcagaaggtacaaggccaggaccaccgggaccaacgggggatccaggactgccgggtgatatgggaaagaaaggagaaatggggcaacctggcccacctggacatttggggcctgctggacctgagggagcccctggaagtcctggaagtcctggcctcccaggaaagccaggtcctcatggcgatttgggttttaaaggaatcaaaggcctcctgggccctccaggaatcagaggccctccaggtcttccaggatttccaggatctcctggaccaatgggtataagaggtgaccaaggacgtgatggaattcctggtccagccggagaaaagggagaaacgggtttattgagggcccctccaggcccaagagggaaccctggtgctcaaggagccaaaggagacaggggagccccaggttttcctggcctcccgggcagaaaaggggccatgggagatgctggacctcgaggacccacagggcatagaaggattcccagggccaccaggtctgcccggtgcaattatccctggccagacaggaaatcgtggtccaccaggctcaagaggaagcccaggtgcgcctggtccccctggacctccagggagtcatgtaataggcataaaaggagacaaagggtctatgggccaccctgggcccaaaaggtccacctggaactgcaggagacatgggaccaccaggtcgtctgggagcaccaggtactccaggtcttccaggacccagaggtgatcctggattccaggggtttccaggcgtgaaaggagaaaagggtaatcctggatttctaggatccattggacctccaggaccaattgggccaaaaggaccacctggtgtacgtggagaccctggcacacttaagattatctcccttccaggaagcccagggccacctggcacacctggagaaccagggatgcagggagaacctgggccaccagggccacctgaaaacctaggaccctgtgggccaagaggtaagccaggcaaggatggaaaaccaggaactcctggaccagctggagaaaaaggcaacaaaggttctaaaggagagccaggaccagctggatcagatggattgccaggtttgaaaggaaaacgtggagacagtggatcacctgcaacctggacaacgagaggctttgtcttcacccgacacagtcaaaccacagcaattccttcatgtccagaggggacagtgccactctacagtgggttttcttttctttttgtacaaggaaatcaacgagcccacggacaagaccttggaactcttggcagctgcctgcagcgatttaccacaatgccattcttattctgcaatgtcaatgatgtatgtaattttgcatctcgaaatgattattcatactggctgtcaacaccagctctgatgccaatgaacatggctcccattactggcagagcccttgagccttatataagcagatgcactgtttgtgaaggtcctgcgatcgccatagccgttcacagccaaaccactgacattcctccatgtcctcacggctggatttctctctggaaaggattttcattcatcatgttcacaagtgcaggttctgagggcaccgggcaagcactggcctcccctggctcctgcctggaagaattccgagccagcccatttctagaatgtcatggaagaggaacgtgcaactactattcaaattcctacagtttctggctggcttcattaaacccagaaagaatgttcagaaagcctattccatcaactgtgaaagctggggaattagaaaaaataataagtcgctgtcaggtgtgcatgaagaaaagacactgaagctaaaaaagacagcagaactcgtatttttcatcctaaagaacaaagtaatgacagaacatgctgttatttaggtatttttctttaaccaaacaatattgctccatgatgacttagtacaaa

SEQ ID NO: 89791 - DNA, 3184 bp, Homo sapiens
gcttttatatttgagcttgtttttcaagtgataggagagttgatgcagttctaacgtaagtgtaattaaagtaggctttttgaaaaaatagtctgtggaattcttattactgtttttcccccctactttcagcttcatttacctcttaattctcctttgcctggaagtgaattgaccaaggaaccttttcgttgggatcagagactctttgcattagtgttgcggttgcctggcaccatgtcagtagaatcagaacagttgacaggtgtgcctttagatgactctgcaatcacaccaatgtgtgaagtgacaggcggccgttcatattctgtgtgttctccaagaatgcttaatcagtgtctggagtccttggtgcagaaagtacaaagtggggtggtaataaactttgaaaaagcaggaccagatccttcccctgtagaagatgggcagccagatatatcaaggccttttggatctcagccttggcatagctgtcacaaactcatatatgtcagaccaaatcctaaaactggggttcctataggtcattggcctgttccagagtctttttggccagatcaaaattcgccaacactaccacctcgtacatctcatcctgtagtgaagttttcctgtacagactgtgaaccaatggttattgataaacttccttttgacaaatatgagttggaaccttcaccactgactcaatttatcctggaaaggaaatctcctcaaacatgttggcaggtgtacgtgagcaatagtgcaaaatacagtgaacttggtcatccttttggttacttgaaagccagtacagcactgaactgtgtcaacttatttgtgatgccttacaattatccagtccttcttcccctcttagatgacttgtttaaagtgcataaagcaaaaccaacattgaagtggagacagtcatttgaaagttatttgaagacaatgcctccctactatcttgggcccttgaagaaagctgttaggatgatgggagcacctaacctaatagcagacagtatggaatatggacttagttacagtgtcatttcatacctcaaaaaacgtgagtcaacaggccaaaatagaatctgatcgagtcattggatctgtaggcaaaaaagtagtacaggagactggaataaaagtccggagccgatcacatggtttatcaatggcatataggaaagattttcaacaactcctccagggaatttcagaggatgtccctcacagactgctagaccttaatatgaaggaatacactgggttccaagttgctttgctgaataaggatttgaagccacagacatttagaaatgcttatgacataccaagacgaaatcttttggatcacttaacaagaatgagatctaatcttttgaagagcactcgcagatttctgaaaggacaggacgaagatcaagtgcacagtgttcctatagcacaaatggggaactaccaggaatacctcaagcaagtaccttctccactaagagaacttgatcctgatcagccacgaaggttgcatacatttggcaacccctttaagctggataagaagggtatgatgatagatgaagcagatgaatttgtggctggacctcaaaataaacataaacgacccggagaaccaaatatgcaagggatccctaaaagacgtcggtgtatgtctccactactaagaggcagacagcagaatcctgttgtaaacaatcatattgggggaaaaggaccacctgcacctacaactcaagcacagccagatcttattaaacctcttcctcttcataaaatttcagaaaccactaatgattcgataatacatgatgtggttgaaaatcatgttgcagaccaactttcatcagacattacaccaaatgctatggatacggaattttcagcatcttctccagccagtttactggaacggccaaccaatcatatggaggctcttggtcatgaccatttaggaaccaatgacctcactgttggtggatttttagaaaatcatgaggagccaagagataaagaacaatgtgctgaagagaacataccagcatcttcactcaacaaaggaaagaaattgatgcattgcagaagccatgaagaggtcaatactgaactaaaagcacaaataatgaaagagatccgaaagccaggaagaaaatatgaaagaatcttcactttactgaagcatgtgcaaggcagtttacaaacaagactaatatttttacaaaatgtcattaaagaagcatcaaggtttaaaaaacgaatgctaatagaacaactggagaacttcttggatgaaattcatcgaagagccaatcagatcaaccatattaatagcaattaaaagaaaatagaatgtggccacttatttcactatcttcttcaaatacaaagtaaatacaagactgttgtgatcttgcattcattttctgacatgcattgttggctatttgaaatactaaaagcaaatctacagatcctttttccatcattttacagtgaccttttcttcattttggtttatttttgtaatgtgaaaagtatcactctaaaaaacatttttaatttaacaaactaaaaatattcctccaaatctcttgcttgtcattgactcttgcgtgtcaatttccctcaggttctattttcttaaaccaacctttaaaattgtcacctctgttaaggttgaactttgccaaaaaaaaaagaagttactttgtaatttttggggaaaaaagcacatacattaaaactaggtaatgttttgtatatacagttattttggatatattattgtaagttgtacaaatgtattttcgaagaatatttaagtrcaaggcacttttgttattccatcaataaatgctctattttactcttgtgtggtttaggaaataatcacatttaaagctaatcatttaaaaacatcctaagataatggaattttaaaggccttgctttttagcattggaaaaatacaccacttgaagttcatgtttgttaagcctaactgtaattacatgttacataatctgcattgcctttttactatatgttcgtagtttttbttggccatgccaacatactcccatttctgcctagattatgggaatgactttgtatggggcagatagacagatactttaaaagctatttaaaaagc

SEQ ID NO: 89792 - DNA, 1371 bp, Homo sapiens; identical to SEQ ID NO: 60771

SEQ ID NO: 89793 - DNA, 1715 bp, Homo sapiens
cgaattcggcacgaggaggagttggcgtccggggagcaagggccatggccaccgtgcaggagaaggctgctgcgctgaacctctcggctctccacagccccgcgcacaggcctccgggtttcagtgtagctcagaagccatttggagccacgtatgtatggagcagcatcataaacactcttcaaacacaagtggaagtgaaaaaacgaaggcaccgtttaaaacgacataatgactgctttgttggttcagaagctgtggatgtcattttttctcacctaattcagaataagtattttggtgatgtagatattcctcgagccaaagtggtgagagtgtgtcaagcgcttatggactacaaagtatttgaagcagttccaaccaaagtctttggaaaagacaaaaaacctacatttgaagatagtagttgcagcctttatagattcaccacaatacctaaccaagacagtcagttaggcaaagagaacaaactatattcacctgccaggtatgcagatgcattatttaagtcatccgatatcagatcagccagtttagaggacctgtgggaaaatctgagtttaaagcctgccaactcccctcatgtaaatatctctacaaccttgtctccacaagttattaatgaagtgtggcaagaagaaacaattgggcgtctactacaacttgtagaccttccacttcttgactccttactgaaacagcaagaggctgtacctaaaattcctcaacctaagaggcagtccaccatggtcaacagcagtaactatctggatcgagggattctcaaggcttatagtgactctcaggaagatgagtggctctcggcagcaattgactgtttagaataccttccagaccaaatggtggtggaaataagcagaagctttcctgagcaaccagaccgaacagacttagtgaaagaacttctgtttgatgccattggcagatattacagtagtagggaacctctgttaaatcacttatctgatgttcataatggaattgcagaactcttagtgaatgggaagacggaaatagctttagaagctacccagctccttctaaagcttttagatttccaaaatagagaagaatttagaagactactgtatttcatggctgttgcagcaaatccttctgagtttaaattacagaaagaaagtgacaaccgaatggttgtgaaaaggatattctcaaaagctattgttgacaataaaaatttatccaaaggcaaaacagatcttctggtactctttttaaatggatcatcagaaagatgtttttaagattcctggaactctcacataaaattgtaagtggttaagccttatggccatacagaacggaagagatccaaatagagatgcaggatatatctattgccagagaattgatcaacgtgactattccaacattacagagaagacaaccatagatgagctgttgtatctactaaaaactcttgatgaggattcaaaactttctgccaaagagaagaaaaaatttgctaggtcaattctataagtgtcacccagacatctttattgagcattttggagactgagtttttaatatctgtatataagttgtgtattttaagaataaattatgtatcctaaatatccaatcacatttgtaagcgtggaagctctaaatttgaaactgtactcccataaaaatttttttgtataaaa

SEQ ID NO: 89794 - DNA, 4428 bp, Homo sapiens
ttttttttttttctccaaaattagtttttaatacattcaggtaggttatacaaagagttggtcccgaggcctgggctgaggcctgggccctgggaagtgacagcagccctgtgtagtgttttcaaagatcaggcgtggggacccacaccttggcctccaggcctaaggaggagtgttacgtgcagtagcacccgtgggtgtgatcccaaccaggactgggtctgcctgggtgctccacacaccaccagggcctagccctggctctgcccattgactctcccttaacttcctctgggccttggtgttctcctctgtaaaatggggtggagagagtggcattttcactttctcgcacattactgagcccacatcatgagccagactgtgggccaagcacaggtaagatgatgaagacagcaaaacaaggtcttgagttggtcccagcacgtccattcttcccagacagctcatgactccatggtatgagggatgggggtcatctgggtgaggctttttacctgtttttgtaagagggaaaaaagatccttgcatgatgaggcacagaaaggaagtttggagccagcattatcttgtgatgtgatagctgagagaggacatcactctggtccaacccccaatctcaccccacaaataagggctcttttttcccccagaggctctgtataagctctccacaagtttcattctcttcctaagcctcagtttccccatctgtgcaatggggaggttggattccatagtctcaaactccaggctctgctcaatagaggaaaagggaatgagagaatgcaagagcacagagagaacaggagaacccacaccagggtggaaaggaagggaggagggaaacaggcagagaaggaggagagcgcctgcagctgcctgcctgggagagaggagagagcaggtgtgcacagcacaggatgcttccagaccctgctcgggctatgtggggccacttcctgtccacttaacggcctgcagcccctgcagtggtaaagatcaggccctggagacagaaggatgaaggtttgaatctcacctatggcattagttagctggggccctggaaggagattttcagaacttcagtttcctcttttataaaacggggataaaatatagagatgtcacataggggcagacacaaggcttggattcaaatccacatctgccaagctgggtgcaaaacagaaccagatatctaaggttttagctcctggctcagcagccaaggtggggctgcgatggagaagtggggctgggcagggacggtgcttaaagcagcactggggtcagggtatgcaacatgagagtgccaggaagggagaaggcaagtccagagcaggagacggaatggtccagtgctgggctggaccccttaaccagaccctgctggagccgccgtggcccacctaacaacaccagatccgagacacactcgtacagctccaattctctcttccggtcctaagcttttcattttcagagagactgaaagtcattctcagaagacgtgacaaacagtctgcttggaaatgtctcagacaaatcctcctgggcttggccctccctcaccctggcacagccggggcaggactcaccgcaccaaaccagcggggcctgccgagctctggagccctgggctttcacacctcaggccctaagcacactgcgtggcggccacgtggctctgcagcactctctcctaccagactgggagattcttgagggcgggaatgtatctcatttcccagcattcccagtgcccagagcagggtgtggcacaaaatacatgctcagtgaagatttgttgatctgacaggtcaacattattctcggctgtcccctgaaaccgcccaaacttctggcttccacagctggacccaaagtgcagcccgggaagggggtcacccactgatgcagcaggcggcagagaaaggtgtcctgggctgtaatttggagaccagagttctgggatcccggatcactgtgtgaccttgagtcagtcctcactcttctctgtacctcaggctcccccactgacctagagtgtctcccggcttctttaggctttatactgttggttaaacttctgccggcggacgcagcagcaggcggccagcgtggtgaggaggatggcagagaccagtatgaaggtgaggatgatgatgaggttgatgttcttcagtccccccttctcacagtcctcgggacgcacgtggctcagggacacctcctcctgggagctgaagcggcagatcaggtcctgggtggcgtccacgtccacacggccctggtgcagctgggctgccagccagccattgccgcagcagctgagtggattcccctgcaggtagaggcgccggaggctggtctccaggccacccatggcactgcctggcaggaggctgaagctgttgtttcgcaggtccagcacctccagtgacacagcctgtgtccaggcgggaaggtggctcaggcggttctcggcaagattgagccgcttgaggcagatgaagcagggcaggtccacctgcaggaccatcagcccgttgccctgcagtgccaggacctccaaggaggcctccaggcctcccaaggcccccgtggccacctccagcccaggattggaagaaaggtccagctcagtcagtggggtgtggaggaaggcccctgccctgagcagctctatctcattatccaccaggctcaggctgcggagggaggtgatgccggagaaggcccacacagccggaagggcccaggctcatctgggcccccacaggggctgactcggttcccctgcaggttgagccgctgcaggctggccagattggcaaaggtgtatgggggcaggtcccgcagggcattgccctgtaggagcagcgtccgcagagacccccagggctctggcgcccagttccagtgtctccagggcattgtggcttaagtcaaggagcatcaggcagggcagggagcctaagcgccgggcctcaaaggtccgcaagcagtttctgctgaggttcaggaagcacagggaggtcaggtgctcaagaaagctgtcggggatgagctcaatctcattgtagctcaaatccagattcaagagctgggaaagggggcggccgctggcattcccgctgggggctggagaggggcagggctgaccagccctcggaaggtgcgtggatgcccttgctgtcctggggtggccctgtggggagccggatgaggttgttggacaagttcaggtagatgagtctcgggagcgcggccaggtcggggaaatggagcagtttgttctcccgcaggtcaagccaggtgagctggaactcagcctggggctggcgaggccgtctgaaaggcctcgatgctgttgcagctcaggtctagcacccgcagctgctggaggctgaagtcggagatgcaggtgagggaattcctggagaggttgagatgggtcaggcggggcaggccctcgaaggcgccatcctcgatgtccatcagcacgttgctatgcaggtcaagctgctccagcgcaggcatgtcccggaaggtgtggcgggtgaggcgagtcagactgttctccgccagtgagagggtatgcaggctgggtgcctcccccagcagccgctccagcaggccgctgtacaggctgttcccagacaggtccagggaggtcacgcgtggcagggggcccaggccaccagcactcagcgcagtggccatcgccagccggttgtgagccaggctgaggtgctccaggtgggtcagggcctggaaggctcctggctggaggaagctgatctcattggtgctcaggtccaggtgacgaagtgccgtgtagaagcccaggggtgaggccaggatactccgcagctggttcccagatagatcaagggtctcagtgtctggcgggagcaccgaggggacctggagcaggcccagaacctggcacgagaccttcttgtccaccctgtctgggcagagcatcttaccatcttacagggcactttgtcttggtgttgtgcagccaggcctagggtcagcagggccaggagcagcaggatctggggtctcatggctccaaagtcacacaaggagaaaatagcagggtcacgatcagaatccagttcatctgtctccaaagcaaatgttcccactataccaaatcaaggtctccttccctaagccctgccaacgacccctcacacgcaggagcagggcagactagctcacagtctggcctctgaggtcctctctccctcctctcggcctcagctgacttactggcagagtggggtcctgggagagctgctgcggacgttcctgtcaagcagtgaatcactaagggcaagcctcgatctggagacatgtgcatcccacgggggaattagaccttaa

SEQ ID NO: 89795 - DNA, 1558 bp, Homo sapiens; identical to SEQ ID NO: 61221

SEQ ID NO: 89796 - DNA, 2373 bp, Homo sapiens; identical to SEQ ID NO: 60548

SEQ ID NO: 89797 - DNA, 450 bp, Homo sapiens
ccggccacaggttgtcttaagtagctttctggtgggtctcagcagctcaggcggcgggaggagcggcagcggccaggcagcccagcttcgcgaaggctctcggtacgatgaggcctgcaggcacctggcacgcaccctcctcgtcaccaggatgcccaagaagaaggtcatgaagggaccatcaaggaagagcccaagaggagattggcgcagttgtcagctaaacctgctcctgcaaaagtggaagcgaagctgaaaaaggcagcagcgaaggataaatcttcaggcaaaaatgtgcaaacaaaagggaaaaggagagcaaagggaaaacaggccaaagtggcaaaccaagaaactaaagaagatttacctgcagaaaacggggaaatgaaaactgaggagagtccagcctctgatgaagcaggagagaaagaaaccaagtctgattaa

SEQ ID NO: 89798 - DNA, 3735 bp, Homo sapiens
ttttttttttttagcaacacttttcttgtttgtaaacgcgagtgaaccagaaagtgtgaatgcggagtaggaatatttttcgtgttctcttttatctgcttgccttttttagagagtagcagtggttcctatttcggaaaaggacgttctaattcaaagctctctcccaatatatttacacgaatacgcatttagaaagggaggcagcttttgaggttgcaatcctactgagaaggatggaagaaggagccaggcaccgaaacaacaccgaaaagaaacacccaggtgggggcgagtcggacgccagccccgaggctggttccggagggggcggagtagccctgaagaaagagatcggattggtcagtgcctgtggtatcatcgtagggaacatcatcggctctggaatctttgtctcgccaaagggagtgctggagaatgctggttctgtgggccttgctctcatcgtctggattgtgacgggcttcatcacagttgtgggagccctctgctatgctgaactcggggtcaacatccccaaatctggaggtgactacttttatgttaaggacatcttcggaggactggctgggttcctgaggctgtggattgctgtgctggtgatctaccccaccaaccaggctgtcatcgccctcaccttctccaactacgtgctgcagccgctcttccccacctgcttccccccagagtctggccttcggctcctggctgccatctgcttattgctcctcacatgggtcaactgttccagtgtgcggtgggccacccgggttcaagacatcttcacagctgggaagctcctggccttggccctgattatcatcatggggattgtacagatatgcaaaggagagtacttctggctggagccaaagaatgcatttgagaatttccaggaacctgacatcggcctcgtcgcactggctttccttcagggctcctttgcctatggaggctggaactttctgaattactgtgactgaggagcttgttgatcccttacaagaacctttcccagagccatcttcatctccatcccaactggtcacatttgtgtatgtctttgccaatgtcggctttatgtcactgcaatgtccccccaggagcttgctggcatcagaacgccgtcgctgtgacttttggagagaagctcctaggagtcatggcctggatcatgcccatttctgttgccctgtccacatttggaggagttaatgggtctctcttcacctcctctcggctgttcttcgctggagcccgagagggccaccttcccagtgtgttggccatgatccacgtgaagcgctgcaccccaatcccagccctgctcttcacatgcatctccaccctgctgatgctggtcaccagcgacatgtacacactcatcaactacgtgggcttcatcaactacctcttctatggggtcacggttgctggacagatagtccttcgctggaagaagcctgatatcccccgccccatcaagatcaacctgctgttccccatcatctacttgctgttctgggccttcctgctggtcttcagcctgtggtcagagccggtggtgtgtggcattggcctggccatcatgctgacaggagtgcctgtctatttcctgggtgtttactggcaacacaagcccaagtgtttcagtgacttcattgagctgctaaccctggtgagccagaagatgtgtgtggtcgtgtaccccgaggtggagcggggctcagggacagaggaggctaatgaggacatggaggagcagcagcagcccatgtaccaacccactcccacgaaggacaaggacgtggcggggcagccccagccctgaggaccaccattccctggctactctctccttcctcccccttttatcctacctccctgccttggtcccgccaacacatgcgagtacacacacacccctctctctgcttttgtcaggcagtggtaggactttggtgtgggtggtgtgagaaattgtaaacaaaaactgacattcatacccaaagaaccagcctctcaccccagggtccatgtcccaggccccactccagtgctgcccacactcccagctgctggaggagaggggagatgccaaggtgccctgcaggacctccctccgggccacaccctcagctgcctcttcaggaaccggagctcattactgccttccctcccagggaggccccttcagagaggagaggccacaggagctgcattgtggggggacaggctcaagcaattctgtccccatcaaggggtcagctggagagacccaagaccctatctgttcaccagggacccaaaatccaaggggatgcttccctctgccctctttcctgcccctccccatcatacctgcacccaccccagccagggctccctgtccagaattcggttctcctcaggacgccaactcccagagctaaggaccaaggagaagaacagcctctccacccccaagccaggcggttgaggaacatattgagaaaggttcagattgcagaaacccagccctgcccctgcctcctgcatccagcccccaacatggtgccaaagcttccagaagccaaaaagcttctgatttttaaggtagtgggcatctctctcctaatgacgaagctgctcagcaactccacctgcccgccgcaggaaggagcagtcccctgctatccctgcagccactcccagcacacccgcacacagccagcaccaccgcccccaccgtgcacttctcctctctgggccttggcttgggaccaggtacgaaggatccccaagcccttcaggcctgagatcagagccagatcagccttaagtcacctcccatccaagaacttggcctaaaaatactcccctatttctaaccctcaggacggatctgatattaaatgccttccctgggaggaagggtgctttccccctccctagaggtgcccattccataccctgggagactgaggagagcattggctgaagcccagttcctttcccatccatccccaactccaataatcccccactcctcgcaggtctcagtgtcatgctgtcttggggcagggtgaaagggtagtggcagcagggcgcccactctggagatcctcaaaaaaggccctcctctgtggctggcagcctctgacctttccctgggcttcaaaggaaggctatggagtttgctgtgggccctgcaaccttcccagccactcctgctgcactaaggacttaggatccttttatcacaaatcgggattctctcccccaccccgaattctgtctgcttaaactggaatacacaggagcccttcctggcctggatggtgtctcccagcttccccgcccagcttgcccaccccatagttggtgagatgccaagtttggtctgagttgtgaccccttcagagtagatgcccggcaggctggggttggcccctggagggtcaggggaccatcttcttattccctcttttctcattcctccaacttcctcccctccttcaattatttttttgtaaagttgatgccttactttttggataaatatttttgaagctggtatttctatttcttttggattttttttaatgtaaggttgttttgggggatggagttagaaccttaatgataatttctttcgtttggtgtaggttttagagatttgttttgtggagaggttttttttcttttgatgtaataaaatttaaaatggaaatg

SEQ ID NO: 89799 - DNA, 655 bp, Homo sapiens
  misc_feature (1)...(655): n = a,t,c or g
atagtagagactggccgctagtcctggaagcactttatttttagttgagttgacatttcccaggaagatgcagttatccccgtaagtggataaagggttctcagtaattcagactctcacatggcttctgccgtatgcctgaggtgacggcgacggcggtaacagtgtgtcagagccaggtggagatataagatggtcaggcccagaggagcggggagcccaggctggaatgtggccttgggaaggaggaagagacggggtctgggagggcatttcagaggactgaacaacaccagaggcgtgaagcttggtgcacggccagccgggggctttcttagtcccggaggaattggggatggggacgtgaagagaaaggtgggagccagactgtcaatgctcccggacgccaggcagaggacttcatcccaggcttcagtgctcctggacgccaggcagaggacttcatcctttccacgtgcagagtgatggaccacagatgtggatgaatgtgacgggcctggaacaaggcacatagagagtcttacactttctggcacgtcctcatggtctctgcttggactggntttatctccctttctgttttgtttgtgaccaggcataaagcagtcaccttcaacagttacagaatgtctga

SEQ ID NO: 89800 - DNA, 1165 bp, Homo sapiens; identical to SEQ ID NO: 61308

SEQ ID NO: 89801 - DNA, 2425 bp, Homo sapiens
  misc_feature (1)...(2425): n = a,t,c or g
tttgccttcgccggctgcatgaattcggcacgaggccgccgccgacgccgccgctgccgtcgtcgccggaaagggagaggcaggagagcccgagacttggaaaccccaaagtgtccgcgaccctgcacggcaggctcccttccagcttcatgggcaaagtgtggaaacagcagatgtaccctcagtacgccacctactattacccccagtatctgcaagccaagcagtctctggtcccagcccaccccatggcccctcccagtcccagcaccaccagcagtaataacaacagtagcagcagtagcaactcaggatgggatcagctcagcaaaacgaacctctatatccgaggactgcctccccacaccaccgaccaggacctggtgaagctctgtcaaccatatgggaaaatagtctccacaaaggcaattttggataagacaacaaacaaatgcaaaggttatggttttgtcgactttgacagccctgcagcagctcaaaaagctgtgtctgccctgaaggccagtggggttcaagctcaaatggcaaagcaacaggaacaagatcctaccaacctctacatttctaatttgccactctccatggatgagcaagaactagaaaatatgctcaaaccatttggacaagttatttctacaaggatactacgtgattccagtggtacaagtcgtggtgttggctttgctaggatggaatcaacagaaaaatgtgaagctgttattggtcattttaatggaaaatttattaagacaccaccaggagtttctgcccccacagaacctttattgtgtaagtttgctgatggaggacagaaaaagagacagaacccaaacaaatacatccctaatggaagaccatggcatagagaaggagaggtgagacttgctggaatgacacttacttacgacccaactacagctgctatacagaacggattttatccttcaccatacagtattgctacaaaccgaatgatcactcaaacttctattacaccctatattgcatctcctgtatctgcctaccaggtggcaaaggaaaccagagaaaacaagtatcggggctctgctatcaaggtgcaaagtccttcgtggatgcaacctcaaccatatattctacagcaccctggtgccgtgttaactccctcaatgggngcacaccaatgtcactaccagcccgcatcaatgatcagcccttctggccccagcagatggagtcatctgtccactagggccagcacccggaaccataccatgccctgcaaccgtccagcctatgcaagggagccctacttggcccacagtatggcacatattgcagactgacagcggttccctgttgagggaggcaagtgggtcaaccagcaggttggctgttcgaggacgtcttaatgacccattctccatataccgtttcaacctaaataagtaacctgtgagatgtaccagaaaggtgttccttacatgaagaagggtgtgaagctgttattggtcattttaattggaaaattttattaagacaccaccaggagtttctggcccccacagaacctttattggtgtaagtttgctgatggaggacagaaaaagagacagaacccaaacaaatacatccctaatggaagaccatggcatagagaaggagaggtgagacttgctggaatgacacttacttacgacccaactacagctgctatacagaacggattttatccttcaccatacagtattgctacaaaccgaatgatcactcaaacttctattacaccctatattgcatctcctgtatctgcctaccaggtgcaaagtccttcgtggatgcaacctcaaccatatattctacagcaccctggtgccgtgttaactccctcaatggagcacaccatgtcactacagcccgcatcaatgatcagccctctggcccagcagatgagtcatctgtcactaggcagcaccggaacatacatgcctgcaacgtcagctatgcaaggagcctacttgccacagtatgcacatatgcagacgacagcggttcctgttgaggaggcaagtggtcaacagcaggtggctgtcgagacgtctaatgaccattctccatatacctttcaacctaataagtaactgtgagatgtacagaaaggtgttcttacatgaagaagggtgtgaaggctgaacaatcatggatttttctgatcaattgtgctttaggaaattattgacagttttgcacaggttcttgaaaacgttatttataatgaaatcaactaaaactatttttgctataagttctataaggtgcataaaacccttaaattcatctagtagctgttcccccgaacaggtttattttagtaggaaaaggtaaacatgaaacaaagacaaaagatttttatcaaatgttatga

SEQ ID NO: 89802 - DNA, 1103 bp, Homo sapiens
ctgagcagtgggctgcttaggaagagaaggtcagagttcgcgggggcagaggcattcttgccgctggcccagtcactatgtagtggaggggcagacaccctcccgcaaattctggaaggttcttagtctcgactagggcagtagccccaggactcctagtcgccggcttcaggtcactgccggctgaacggagctgccgtcgccatgtttggctgcttggtggcggggaggctggtgcaaacagctgcacagcaagtggcagaggataaatttgtttttgacttacctgattatgaaagtatcaaccatgttgtggtttttatgctgggaacaatcccatttcctgagggaatgggaggatctgtctacttttcttatcctgattcaaatggaatgccagtatggcaactcctaggatttgtcacgaatgggaagccaagtgccatcttcaaaatttcaggtcttaaatctggagaaggaagccaacatccttttggagccatgaatattgtccgaactccatctgttgctcagattggaatttcagtggaattattagacagtatggctcagcagactcctgtaggtaatgctgctgtatcctcagttgactcattcactcagttcacacaaaagatgttggacaatttctacaattttgcttcatcatttgctgtctctcaggcccagatgacacccaagcccatctgaaatgttcattccggcaaatgtggttctgaaatggtatgaaaactttcaaagacggactagcacagaaccctctcttttggaaaacataatttggattaaaataaatttttaatggattctgaaatttgtcatgttttgaagataactgactccatctaaaagtatgaggtcaaaggatcacgaaacctaagtttaaaaactgcttagagactgaagcttaattaaaaatctttattaaaaattaaaaacattgaaaaatgaaaatatgttcatcattaaagacttttttccccttaagcttaaaataccattcaaaggcaagacattttgttttggctatgattcattttttttacttaaaaataaaacctataccaaacagtaaaaaaaat

SEQ ID NO: 89803 - DNA, 642 bp, Homo sapiens
ctcctccctgtagctggctgatgtagctcgttgatatctgtgtggatagggagctgtgacgagagcaagaggtcagaacacatccaggctccttaagggaaagcctctttctgtttctgaaacttttcaaagccagggacttgtccaatccaacctcctcacagttcctagctcctgaggctcagcgcccttggcttctgtccgcccagctcaaggtcctgcagcattgccactgctcagccatgctcctgctgctcgtcccagcgttccaggtgatttttaccctgggaggaaccagagcccagtctgtgacccagcttgacagccaagtccctgtctttgaagaagcccctgtggagctgaggtgcaactactcatcgtctgtttcagtgtatctcttctggtatgtgcaataccccaaccaaggactccagcttctcctgaagtatttatcaggatccaccctggttaaaggcatcaacggttttgaggctgaatttaacaagagtcaaaacttccttccacttgaggaaaccctcagtccatataagcgacacggctgagtacttctgtgctgtgagtgttgcgtacagcagtgcttccaagataatctttggatcagggaccagactcagcatccgg

SEQ ID NO: 89804 - DNA, 393 bp, Homo sapiens
ttgtgttgatcataaggcttttcttcttcagtgtgttaatacggtaaattacagtgattgactttttaaaagttaagctgaccattgcattcctggaataaaccccactgattgtgatgtattgtttggattgcatgtgctaaaattttgttaaaattatttgtatctgtgttcataaggaataatcgcctatagttttctgatattgccttggtctgggtttggtattaggatggtgatggtcacataggatgtgttggagagttcccgcttctatttcatgaaacaatttgtgtaaatttggtaagattttgcctgtaaatgtttgcacctgcagttttctttgtggaaaaagtgttaaactacaaatttagtttctttaatagacatatg

SEQ ID NO: 89805 - DNA, 3389 bp, Homo sapiens
  misc_feature (1)...(3389): n = a,t,c or g
gcgtctcgtcttcgttcttctgtgtcctctgctgctagaggtccagcctctgtggctctgtgacctgcgggtattgggggatccacagctaagacgccaggaccccccggaagcctagaaatgggaccattgacatttatggatgtggccatagaattctgtctggaggagtggcaatgcctggacattgcacagcagaatttatataggaatgtgatgttagagaactacagaaacctggtcttcctgggtattgctgtctctaagccagacctgatcacctgtctggagcaagaaaaagagccttgggagcctatgaggagacatgaaatggtagccaaacccccagttatgtgttctcattttacccaagacttttggccagagcagcatataaaagatcctttccaaaaagcgacactgagaagatataaaaactgtgaacataaaaatgtacatttaaaaaaagaccataaaagtgtggatgagtgtaaggtgcacagaggaggttataatggatttaaccaatgtttgccagctacccagagcaaaatatttctatttgataaatgtgtgaaagcctttcataaattttcaaattcaaacagacataagataagccatactgaaaaaaaacttttcaaatgcaaagaatgtggcaaatcgttttgcatgctttcccatctagctcaacataaaataattcataccagagtgaatttctgcaaatgtgaaaaatgtggaaaagcttttaactgcccttcaatcatcactaaacataagagaattaatactggagagaaaccctacacatgtgaagaatgtggcaaagtctttaattggtcctcacgccttactacacataaaaaaaattatactagatacaaactctacaaatgtgaagaatgtggcaaagcttttaacaagtcctcaatccttactacccataagataattcgcactggagagaaattctacaaatgtaaagaatgtgccaaagcttttaaccaatcctcaaaccttactgaacataagaaaattcatcctggagagaaaccttacaaatgtgaagaatgtggcaaagcctttaactggccctcaactcttactaaacataagagaattcatactggagagaaaccctacacatgtgaagaatgtggcaaagcttttaaccagttctcaaaccttactacacataagagaatccatactgcaggagaaattctataaatgtacagaatgtggtgaagcttttagccggtccctcaaaccttactaaacataaggaaattcatactgaaaagaaaccctacaaatgtgaagaatgtggcaaagcttttaagtggtcctcaaagcttactgaacataagttaactcatactggagagaaaccctacaaatgtgaaaaatgtggaaaagcctttaactgcccttcaatcatcactaaacataacagaattaatactggagagaaaccctacacatgtgaagaatgtggcaaagtctttaattggtcctcacgccttactacacataaaaaaaattatactagatacaaactctacaaatgtgaagaatgtggcaaagcttttaacaagtcctcaatccttactacccataagaaaattcacattgaaaagaaattctacaaatgtgaagaatgtggcaaagcttttaagtggtcctcaaagcttactgaacataagataactcatactggagagaaaccctacaaatgtgaagaatgtggcaaagcttttaaccatttctcaatccttaccaaacataagaggattcatactggagagaaaccctacaagtgtgaagaatgtggcaaagcttttacccaatcctcaaaccttactacacataagaaaattcatactggagagaaattctacaaatgtgaagaatgtggcaaagcttttacccaatcttcaaaccttactacacataaaaaaattcatactggaggaaaaccctacaaatgtgaagaatgtggcaaagcttttaaccagttctcaactcttactaaacataagataattcacactgaggagaaaccctacaaatgtgaagaatgtggcaaagcctttaagtggtcctcaacccttactaaacataagataattcatactggagagaaaccctacaaatgtgaagaatgtgggcaaagcttttaaactgtcctcaaccctttctacacataagattattcatactggagagaaaccctacaaatgtgaaaaatgtggcaaagcttttaaccgaccctcaaaccttattgaacataagaaaattcatactggagagcaaccctacaaatgtgaagaatgtggcaaagcatttaactattcctcacaccttaatacacataagagaattcatactaaagagcaaccctacaaatgtaaagaatgtggcaaagctttcaaccaatattcaaaccttactacacataacaaaattcatactggagagaaactctacaaacctgaagatgtgacagtgattttgacaacacctcaaactttttcaaacataaaataaattatactggtgagaaattctagaaatgtaaagaatgtgataaaggctttacatggttgtcacacttgattgtaggtaagataatttacattggagtaaacttctacaagtgtgaagaatgtggcaaaacttttaattaatgctcataccttattgcacaggaaagaatttttacttggaaaaaggtatatacacaaagaatgtggaaaagccattaatatgtgctcatatcttactcaacatcagagagtctgtacttaataaaaccattatagatgcaactagtgtcaaaagatctttcagaaaataaaagcctttaaagtgaagaagataattcattctgaagacaaacattacaaatattaagagggttgtagtaccattacttgcatcacagatcttattgtacacattttgtactaaagaaaaccctgaagcagttgctcaaatactgttcaacatcagaaaatttatattggaaaaaacccctggaaaatgtaataaatttgtaaaaacagttttgaaaaactacagcttataaaacatgagggtctataatgcttggttgatagtacaaagtttattcaacatcagggaatttatattggagaaaaaccctacaaatgtaatcagtttggaaaaacatttttaaaaaaaccacagcatagaaaacaccacagggttcatactaaaatatgtttttgcagatgcagtaaaaatgaaaaaaatttaatccgaaattaagtttatgtaaatatctgagaattcacagtagaaatatctnaggcgcggacacttcagacattacactaaatcagtgctaagtacagtaacca

SEQ ID NO: 89806 - DNA, 3367 bp, Homo sapiens; identical to SEQ ID NO: 61281

SEQ ID NO: 89807 - DNA, 2083 bp, Homo sapiens; identical to SEQ ID NO: 60592

SEQ ID NO: 89808 - DNA, 1493 bp, Homo sapiens; identical to SEQ ID NO: 61151

SEQ ID NO: 89809 - DNA, 2296 bp, Homo sapiens
cccacgcgtccgggcggcagccatcaggtaggctgcgttgaggatctttgctcttccatccgcctttgatcgtcttcctcttcagccatccaggtccggggaccctgcgtcctcggagataggtctccctcctgtgcggccagagtttggtcaggatgcgggacagcaaaggggtggagaggcggcccccggggcgggttgagcgaagatgtgatggcggcgcgaattcgagctgggcccggatcctggaggaggcgtggggctgacgaatggggcgcccgggacaaggcagcctaaagtgaggctgctggttgggtggggtagatgcattttcctcgagagttaatcctcggtggccgcagcagtaccttgtcctgtgatgtcagcggcatctcctttcaggtcctccttggggacgccgcctgccgcagccacccgcccccttggtgctcagttctggttctgttaattcgccccaccaaaacgtgccgagcaccgctctgtgctggggttgcggaagtgactgaacgcggctccgtgggcgcagtggtgggggttgggctagctgtccccggcagttggtgcagagccattttcattcccggcggtttccttgtttttgttggggaactaagatggacggatacagtcgtcttattgtacttaaagcggatgatatttaatacacagtttgatttcacaggtaagccaagatgggtgcatacaagtacatccaggagctatggagaaagaagcagtctgatgtcatgcgctttcttctgagggtccgctgctggcagtaccgccagctctctgctctccacagggctccccgccccacccggcctgataaagcgcgccgactgggctacaaggccaagcaaggttacgatatatatatataggattcgtgttcgccgttatatataggattcgtgttcgccgtggtggccgaaaacgcccagttcctaagggtgcaacttacggcaagcctgtccatcatggtgttaaccagctaaagtttgctcgaagccttcagtccgttgcagaggagcgagctggacgccactgtggggctctgagagtcctgaattcttactgggttggtgaagattccacatacaaattttttgaggttatcctcattgatccattccataaagctatcagaagaaatcctgacacccagtggatcaccaaaccagtccacaagcacagggagatgcgtgggctgacatctgcaggccgaaagagccgtggccttggaaagggccacaagttccaccacactattggtggctctcgccgggcagcttggagaaggcgcaatactctccagctccaccgttaccgctaatataagtaaagtttgtaaaattcatacttaataaacaatttaggacagtcatgtctgcttacaggtgttatttgtctgttaaaactagtctgcagatgtttcttgaatgctttgtcaaattaagaaagttaaagtgcaataatgtttgaagacaataagtggtggtgtatcttgtttctaataagataaacttttttgtctttgctttatcttattagggagttgtatgtcagtgtataaaacatactgtgtggtataacaggcttaataaattctttaaaaggagagaactgaaactagccctgtagatttgtctggtgcatgtgatgaaacctgcagctttatcggagtgatggcaatgctctgctggtttattttcaagtggctgcgttttttttagtttggcaggtgtagactttttaagttgggctttagaaaatctgggttagcctgaagaaaattgcctcagcctccacagtaccattttaaattcacataaaaggtgaaagctcctggttcagtgccatggcttcatggcattcagtgattagtggtaatggtaaacactggtgtgttttgaagttgaatgtgcgataaaattattagccttaagattggtaagctagcaatgaatgctagggtgggaagctggtgagccagtggccattagataaatacctttcaagtgtgagcttagacgtcaaccctaaaatacttaaccgtaatgctaattgtgatcattatgaatcccttcagtcacattaggggggaagtagttggctataagtacgtcattcttagtccagtcagtcttaaaaacatcttgggttacccactctgtccactcccataggctacagaaaaagtcacaagcgcatggtttccaaccatatgtgttttctgcagttatttctcttgttaagaccgacgtattcgaaa

SEQ ID NO: 89810 - DNA, 2148 bp, Homo sapiens; identical to SEQ ID NO: 60930

SEQ ID NO: 89811 - DNA, 7816 bp, Homo sapiens
gtattgttaggccccttatgggacaagctctcaactgctgatcacccagtgattgtcaccatggccagcaagaggaaatccaccacaccatgcatgatcccagtgaagactgtggtgttgcaagatgccagcatggaggcccagcccgctgagaccttgcctgaaggaccccagcaggatctgcccccagaagcatctgctgccagcagtgaggcagcacagaaccccagcagtactgatggctctacactggccaatgggcatcggagcactttagatggctatttatattcctgtaaatactgcgatttcagatcccatgacatgacccaatttgtgggacatatgaactcagagcacacagactttaataaagacccaacctttgtatgcagtgggtgcagttttctggcaaaaacccctgaggggctttccttgcacaatgccacatgtcactccggggaagccagctttgtgtggaacgtggccaagccagacaatcatgtggttgtggagcagagcatccctgagagcaccagcactcctgacctagcgggtgagcccagtgctgaaggggctgatggacaggcagaaatcatcattaccaaaactccaatcatgaagataatgaaaggcaaagctgaagccaaaaaaattcatacactcaaggagaatgtccctagccagcctgtgggtgaggccttaccaaagctgtcgactggagaaatggaggtgagagagggggaccattccttcatcaatggggcagttccagtcagacaggcatctgccagctctgcaaaaaacccccatgccgccaacgggcccctgataggaacagtgccagttttgccagctggcatagcacagttcctctccctccagcagcagcccccagtgcatgcccaacaccatgtccaccagccactgcccacggccaaggcccttcccaaagtgatgatccccctgagcagcattccaacgtacagtgcagccatggactctaacagcttcctgaagaactccttccacaagttcccctaccccaccaaagccgagctctgctatttgactgtggtgaccaagtatccagaagaacagctcaagatctggttcacagcccaaaggctgaagcaggggatcagctggtcccctgaggagattgaggatgcccggaaaaagatgttcaatacagtcatccagtctgtgcctcagcccacaattacggttctaaataccccactcgtcgccagtgctggcaatgtccagcatctcatccaggccgctcttccaggtcacgttgtggggcagccagagggtacaggagggggacttctggtcactcagccattgatggccaatgggttgcaagcaacaagttcccctctccccctcacggtgacatccgtccccaagcagccaggtgtggcacccattaacactgtgtgttcaaatacaacgtcagctgtgaaggtggtcaatgcggcccagtcgctcctcacggcctgccccagcataacctcccaagccttccttgatgctagcatctacaaaaataagaaatctcatgaacagctgtcagctctgaaagggagcttctgtcggaaccagttcccagggcagagcgaagttgaacatctcacaaaagtgacgggcctcagtaccagagaggtgcggaaatggttcagtgatcgtagataccactgccggaacttgaagggctccagagcgatgatacctggagatcacaggtccatcatcattgactctgtgccagaggtgtccttctccccatcgtccaaggtccctgaggtaacctgcattccgacaacagccacactagcaacccacccttctgccaaacgacaatcttggcaccagactcctgacttcacaccaaccaaatacaaggagagagcccctgagcagctcagagccctggagagcagttttgcacaaaaccctcttcctcttgatgaggaactggaccgcctgagaagtgaaaccaaaatgacccgacgagaaattgatagctggttttcagagagacggaaaaaagtgaatgctgaggagaccaagaaggctgaggagaatgcctctcaggaggaagaggaggctgctgaggatgagggtggagaagaggatttggccagtgagctaagggtctctggtgaaaatggctctctggaaatgcccagcagccatatcttggcagagcgcaaagtcagccccattaaaatcaacctgaagaacctgagggtcactgaagccaatggcaggaacgagattccagggctgggtgcctgtgaccctgaggatgatgagtcaaacaaactggcagagcagctcccaggcaaagtgagctgcaaaaagactgcccagcagcggcacttgctgcggcagctctttgtccagacacagtggccaagcaaccaggactatgactccatcatggcccagacgggtctgccacggccagaggtggtgcgctggtttggagatagcaggtacgcactgaagaacggccaactcaaatggtacgaagactataagcgaggcaacttcccaccagggctactggtcattgcccctggcaaccgggagctcctgcaggactattacatgacacacaagatgctgtatgaagaggacctgcagaacctctgtgacaagacccagatgagctcccagcaggtcaagcagtggtttgctgagaaaatgggggaggagaccagagccgtggcagacacaggcagtgaggaccagggccctggtactggtgagctcacagcagttcacaaagggatgggtgacacctattcagaggtgtctgagaacagtgagtcgtgggagccccgtgtccctgaggccagctcagagccctttgaccacatcgagtccccaggctggacgtcagctcgaaacagactgaatttgatctgattaatgtgaaggactggccagtctgggaaaccgcctgccacgtggaagagccaaacccgactctctgctgccacatgccgttcccatgcccggctgctgggcacctgggagagcttccagaatcctcgcagacagcccagagcctgccgctaccctcggcctgcccaccaccaagcaagcagcaagcaagatggggttctcatcagttcttcctcccacaatgtaggacctttcctttaccttccaatggataaaatagttcagagttcatagtcatattcatagacacagaatcaagcttttaacatatacatccacctctatatgttaaataaaacatcagattatcaacactgtcattacgtagaaactttggttagccaagcagtgcattgtcagttacgtcatctctaaaaatgacctgtgtctgttctctggggattgctgggtcacaggtgcccctcaccttccacagtcaggcagggaagttataggcacaaagctacgtctggaacccctttgtgccccctttgtgttcctcaaggaagcagtacctttgaagagatctctgctgcattaagtgatgaccggctacgtttcatgtcaggcttgctttgccttgtgggctactcagtgcagaacctgctgtaaccctcagttcaaaaaatggactggcaatgtgattagcgttggatgctttaccattctctttagttgttaccgtaattctgctttttcatgggagtttgaatcatggaccataacttttcagttatcagatcaactaaagaaacatttgttgttaagcctaatgtgctgacctatgtgcctgcattttttttttaatctagacatgtttggagtgagagaaagatggaaaaaagacatggggtagggacgtaagtggaaatctatagccacagcctgaagctttgaccactgcggttttcagagccctttctccacactcatttcagagcctcctatggtttgggaaggaataacacactggcccattagtaagggtgaaggctggagggatttgttgacttcttggaattatcagaggtagggtggtctttagcacaaagacttgcatgcagagatccctggcagaacacccagagtgcccgtggctcccaccccagggtctggccggtgtgctggatgcatgcccaagggtgctgggcatcactggtccttgtgaggatgcttttaaagttttatatttatgtccccaaacttggaaacaagaactctactttagcctaaccctcatgtccttttttgaattgagaaaattacaggaaatggtgcctttgaaaattagaaaacttgcttacagagctgttctaaatggtaaatcctcaatttccccaagaccggttgctctgagagtagctggtaaagaggggcgaactaaagacctgtccacctgtagctccgctcatttcttagaaaccacctgcttcccagagtgccaagccacaagtaccaggcttcgtgggcacagacacctcctgggctgggcagagtgacagtgctagaagaccccagagagagggcaagggctttgggcaagaagcactggtggtgttttagggaccgtccttctcccctacccagggaactggacctggcagggcaccgtgctcatgtggctccaaggacaagcatggcggtggccccttctgccttccaggagaggtcttgcttttgaaaccaaaatcatgttcttctaaagtgtcatcttctgccctccctgtcccaatagggaccacatcttatttgtctcaaacagggacttgtgagtacttggcaagttttgcagcctatttttgtattcttaatttggggagtaaagatgtttggtctcaaaaacctttgaggaattgccaagaatggcgagtgattgctttccttcagagaacagacacttggaatttctccttttagtgtttatatacgtgcagattaatttatatatatatatatacacacacacatatacagtataaatactcatttgattctcgtaaaacgcgcatctggcgtgtgcagttgagaaacttggtggcacatgggtgttgggggagtagcctgtgttggagggacaccagtgcactaggcagctggggcggcccaggctgaagccatctccgggtgtctgagaaaccacccagtgcctcacctccagatcctgctggcatcacctccagagccctgcatgcactggctgaagagttggtctgtggagaggattttcttggttacttgtattcacggttaatttacaacccaaacagcaaaacacagttggtggacaagttcatgcaggacctacagtgacccagccatgggcactagctcatctttcaggtggaaaagtacagtgctgcctgccctggtatgtttttcttatagatgttagccctgcccaacagccagggctacactacaaaaggcaagaatgcccatgtaaggagcccagcagtctggacagatccttcttcctctgctgttggatgagagtgagtgagtatggtctggaccttatccttgaaagatgatcaaaagcgatgatgagggaggcagtcatcacgcaggtgcttaaagggacattgtaggaggtactcaagggtttgggggcaaaaccctgaatccagccagtcgtgcacagagacacacccacactagcccagtggcagtgggggatgtgggatggcagcagccaggtatgtagccctgtcacaggacagctcactgtggttttgcacactgcctaagggttaaattgtgttgttgccttcagtagaaggcatttgtgggctgcagagttgagagttgggtgaggttagtctctcctgaagaaaaagcctataaaaagtggctaatcttatcccttttctctgtatgcagttggactcgtcagagatagtaaaatcatcttttagtgtttttttgttgctgatgtcttgtacccatttgttttttacatggggttgtagatcgagttctcaaaggtgaaaccagatgatcattctgataaaggaaatttaaatttgatacatatgctttgtatattttgattacttgttttcgtttttgactataaaggagctttttttcttgctcagagtttacctgggagatttcaccagtttgactcaccatttgcagatgtgcttttgtattaaatttaaattttcacatatcacatccattctcaaggtagttatatgctggagaagaaaaatcctctagacacatgaaggcccacatagtcaagtcttccagggcaaagccagcagcccacccaggtcaggtagccagcagggctcagttcccctcactccagacacggaccctcctcttcagggtctcttgacccagcttccttctctccttttacctgagagcacagacctctctcagccagcctgcccagaccacggggggctactcccatgtagtttggggagcacttgatctcagaaaagctccattgtctgagcaaatgggcagttgtggagctcaagcctttctcctgtgctcaagtcccttccccaagcaaggcttcaacctcatctacccaccatgtagttttctctggccatttaagtggggcggcagggacatggttgggccatgccacaccagggctggtgaggcaaccagttttgattttgacagagtggctggaggaaaagtggcaatcaaggtgctgcttggtttgctctgagtgcaaatggaaccaacaggtttctgctgcaatctgtgtgttcccagtgccaggtcacaccaggaggggtggggcagggctaaccaagtggtctctgaactcaccgagcgtctgcacttggttgtgaagttaatgggagtacagagagcgtctggccttggagaggggttgagagcctcctttttggttcttcattcctgagctcttgcctgcccacaaatctgacctctttgaatggggacgcagtccttcaacagagaagtttctatggcaaagaagtttctatttagctctagatccagcagagtcatccattctaactgccctgaagtctagagcaggggagggaacccagaggctggggatgagactaggcagaccctggttaccatatggacaaggacaggggaaagcacccccttcctcaatttctgaaagttctatctttgggttcgcaggactttgaggatgataaagaacatataggtactagcttgttgttgctggtccaaagcttccacagccctgagaatttggctttcgtggctgctctggcagctgagcgaagggaggaaggcagccgctctggtggggactctaggcaccttccctgctgtccacttggataggcggtgagccccagggtactgagaggagcctgagcatttacctgccattagtgcctcttccttcaggagactggcttgaaacgtgtgttcatgtgcgcgtgcacacacacacatgagcacctgtatgtgttaatgaatagtttttcttggttaatgctttttaacttctgttcctttccgtaagtggatgattcaaaattaacgtgacttggctgggcgcagtggctcacacctgtaatcccagcactttgggaggccaagggaggcggatcacctgaggtcaggagttcgagacccacctgatcggcatggtgaaaccccgtttctactaaaaatacaaaaattagccgggcgtggtggtgcgcgcctgtaatcccagctactcaggaggctgaggaaggagaatcacttgaacccgggaggtggaggttgcagtgagctgagatcgtgcccctgcactccagcctgggcgacagagcgaaactccgtctcaaaaaaaaaa

SEQ ID NO: 89812 - DNA, 4593 bp, Homo sapiens
  misc_feature (1)...(4593): n = a,t,c or g
tttcgtggccagggccgagaagggcttcaggacgcgggaggcgcacttgcttcaagtcgcgggcgtgggaacggggttgcaaaacggggcctctttatccgggcttgcttccggcgtcatggctcaaagggccttcccgaatccttatgctgattataacaaatccctggccgaaggctactttgatgctgccgggaggctgactcctgagttctcacaacgcttgaccaataagattcgggagcttcttcagcaaatggagagaggcctgaaatcagcagaccctcgggatggcaccggttacactggctgggcaggtattgctgtgctttacttacatctttatgatgtatttggggaccctgcctacctacagttagcacatggctatgtaaagcaaagtctgaactgcttaaccaagcgctccatcaccttcctttgtggggatgcaggccccctggcagtggccgctgtgctatatcacaagatgaacaatgagaagcaggcagaagattgcatcacacggctaattcacctaaataagattgatcctcatgctccaaatgaaatgctctatgggcgaataggctacatctatgctcttctttttgtcaataagaactttggagtggaaaagattcctcaaagccatattcagcagatttgtgaaacaattttaacctctggagaaaacctagctaggaagagaaacttcacggcaaagtctccactgatgtatgaatggtaccaggaatattatgtaggggctgctcatggcctggctggaatttattactacctgatgcagcccagccttcaagtgagccaagggaagttacatagtttggtcaagcccagtgtagactacgtctgccagctgaaattcccttctggcaattaccctccatgtataggtgataatcgagatctgcttgtccattggtgccatggcgcccctggggtaatctacatgctcatccaggcctataaggtattcagaagagggaaaagtatctctgtggatgcctatcagtgtgctgatgtgatctggcaatatgggttgctgaagaagggatatgggctgtgccanaggttctgcagggaatgcctatgccttcctgacactctacaacctcacacaggacatgaagtacctgtatagggcctgtaagtttgctgaatggtgcttagagtatggagaacatggatgcagaacaccagacacccctttctctctctttgaaggaatggctggaacaatatatttcctgggctgacctgctattccccacaaaagccagggttccctgcatttgaactctgaaaggataacatgcccacctgcaaactcactgccatgaccctttctgtatattcaaaccccaagcctaagtgccttccgttgctttcccaaggaaacaaagagtcaaactgtggacttgattttgttagcttttttcagaatttatctttcattcagttcccttccattatcatttacttttacttagaagtatccaaggaagtcttttaactttaatttccatttcttcctaaagggagagtgagtgatatgtacagtgttttgagattgtatacatatattccagaacttggaggaaatcttatttaagtttatgaatataaccatctgttactgttctaaaaatgtttaaaagaaactcaatacagataaagataaatatgtgactattattgggtattacacttcacttctctttaatatttttcctccaactggagggcagacaatttttctgacttgcttttctctaggtggttcattttgaaaggggacagaaatataactaaatgcttccaggagaaaaattccaagagttacaatctggacttggtacctaaatatcattttttaaattcttgatgcctatttggactagaggtaaacatactttcagattggcctgtttttgtcggtaaggcatacagccttcagaagccaacatttttaatcaaaaacttataaaacatgatgatcattgtgaaaattctgagttgaaggatagtttaagataagctaacaataacagtctgtgttttctataaaataatctgagttttttggaactctttatttaaatatgtgtgtttttcagtattcaaataagatcaggaagccaattttctatgtatgaatatgctttaacctaggatttcagtccactctgactgactttctaaactttaacttgggtttttacagtgactatgcattagtgctgactctttggtataagccccataaaaaatttccctccctatcaatttatctgaactttggtcttttcacttaaattgtacagtattcctacttcctgtttaaaacggggagatgaggaaagggaatactatcctaaccaataacttgaacaaaaacactaaaactaaggcatttaattaggaaatgctttttattgaggaggtattatccagagttcatgcttagaacaaatgcatctttgcgtatcctagacttaacaattcatcagtttctgagaccacagaatcaggttttccgtagtagataaagactctctggtgcttcaaattctgttcaagtgttttgactcatcagcttctactctttctattactgcctttgcctggcttgttttgtctctttgcaactgattttgcaaaaaaaaattgtagctttaaaataacagggtctaagtattttaaatgtgcctatttcacagctctcttggtcacaaaaacatgctatttttattggaacttcaaaccaaatccccactgaggtgtgtactgggttcctgcagggtaggcaggtctcctattatctcctgtttagcaccaaaagagctaatattattggaaactgaccttttaaaggccactggcagtcggatttaaaaagcagcccactgctcagtttccaggatcagcttcctccttctgtcacttgtgtaagttggcactaccttgtgcctctcagattgctgaagtgctgctggtaagcatgtgcatgctctgcctttcttgtgaaagttttcaatcagcgatatcagcacttacagtaagaagtaaaagtagtgcacagcaaagctaatttgcctttgcctggggtgttcagcttgaaagaataaagctcatttggtttagttaaatgtcttactctactgtgcctatgcttttagctgcgttactaagcaagggaaaaataacagtttctctgagccagagaagacttgatcacagttctccaagcatcgtgatagcaatgcttaaccccaggaagatttcaaggcagggagaagaacatttcaaataagattcttgttaacccatttatgcctagtgttccattattggaatgctaagcttgtgggagtcatttacatcctactgctcaaagtcattgccaaggtctgatttttcacacaaaaaattgcaacccccagcataaatgggttagctactgtcatcagttagcaaattcatccacacaaacacaattagagtttggtttttttttaagcttttcaaaacttactaaactggcacaattttatatgtatgctatttgttgtatttatgcttaagagcaaaaaagttttgatgggattttaaattcaggcaaagcctacaacgctgagacaatcccctaacaacatggtagtaactaaagaaacttttatactaggcttcttagttttaaaaggaagtggcatcattgtttcagttctagtttgtatttttctctcagatatttttcttctttaaaaatctttcccagaagttggttcctagaaaactcaataccatcatctcttatctctatacagggactaggtaataaaaccttcaaaggttgtcaaaggtcatcaagcagtgttcatttatcctgtcacatgtttctgtttctatagtaatttagaaattgcaaatagttaacttttcatcatgtaaaaagttaacattatcctatttccatagataccatggacggcggtgtggcctgagttgtcagtctttaatcctgagtcatgtggctctcttttcatctttgatgtcagttccaattatttggcatcaaaaaccttcatggtaggtagagttttaggtaaaagtggatctagggttactttctttattaacatttcctaaataactgaattgagagacatactctgctactatgtcctcaggttaatttttgtctgatcttacgatgccctgccttttactagctactttagaaatagaaaatgtgaagagtgactatttacatgtatactcctttggctgctagaactcatctgtagtcctttattatttacactgaattccaatttcatttctgcttccgctaagtaagagcacctcattcctgtgttttctctactattgagctgtagacgaactgtttctctaattataaagcaaactgtttgggatattcagggaaactaccccaatgttatgttgtcatttaatgggaaaggctgggatcatatgtatttctatgttctgtaaagtatttgacttactagttctcaataaaattttattaggactataaaaaaaaaa

SEQ ID NO: 89813 - DNA, 3132 bp, Homo sapiens
ggagccgccatgtaaccggcgccgcccggagcccgagccgcgcgggccccagcgacccgcccgccatgggggacgaggacgacgatgagagctgcgccgtggagctgcggatcacagaagccaacctgaccgggcacgaggagaaggtgagcgtggagaacttcgagctgctcaaggtgctgggcacgggagcctacggcaaggtgttcctggtgcggaaggcgggcgggcacgacgcggggaagctgtacgccatgaaggtgctgcgcaaggcggcgctggtgcagcgcgccaagacgcaggagcacacgcgcaccgagcgctcggtgctggagctggtgcgccaggcgcccttcctggtcacgctgcactacgctttccagacggatgccaagctgcacctcatcctggactatgtgagcggcggggagatgttcacccacctctaccagcgccagtacttcaaggaggctgaggtgcgcgtgtatgggggtgagatcgtgctggccctggaacacctgcacaagctcggcatcatttaccgagacctgaaactggagaatgtgctgctggactccgagggccacattgtcctcacggacttcgggctgagcaaggagttcctgacggaggagaaagagcggaccttctccttctgtggcaccatcgagtacatggcccccgaaatcatccgtagcaagacggggcatggcaaggctgtggactggtggagcctgggcatcttgctcttcgagctgctgacgggggcctcgcccttcaccctggagggcgagaggaacacgcaggctgaggtgtctcgacggatcctgaagtgctcccctcccttcccccctcggatcgggcccgtggcgcaggacctgctgcagcggctgctttgtaaggatcctaagaagcgattgggcgcggggccccagggggcacaagaagtccggaaccatcccttcttccagggcctcgattgggtggctctggctgccaggaagattccagccccattccggccccaaatccgctcagagctggatgtgggcaaactttgcggaggaattcactcggctggagcctgtctactcaccccctggacagacccccacctggggacccccgaatctttcagggatactcctttgtggcaccctccattctctttgaccacaacaacgcggtgatgaccgatgggctggaagcgcctggtgctggagaccggccaggtcgggcagcggtggccaggagcgctatgatgcaggactcgcccttcttccagcagtacgagctggacctgcgggagcctgcgctgggccagggcagcttttctgtgtgtcgccgctgccgccagcgccagagcggccaggagttcgcagtcaagatcctcagtcgcaggctggaggcgaacacgcagcgcgaagtggctgccctgcgcctgtgccagtcacaccccaacgtggtgaatctgcacgaggtgcatcacgaccagctgcacacgtacctggtcctggagctgctgcggggcggggagctgctggagcacatccgcaagaagcggcacttcagcgagtcggaagcaagccagatcctgcgcagcctcgtgtcggccgtgagcttcatgcacgaggaggcgggcgtggtgcaccgcgacctcaagccggagaacatcctgtacgccgacgacacgcccggggccccggtgaaaatcatcgacttcgggtctcgccgcggttgcggccgcagagtcccggggtgcccatgcagacgccctcattcacgctgcagtacgctgcccccgagctgctggcgcagcagggctacgacgagtcctgcgacctctggagcctgggcgtcattctgtaccatgatgctgtcggggcaggctcccttccagggggcctctggccagggcgggcagagccaggcggccgagatcatgtgcaaaatccgcgaggggcgcttctcccttgacggggaggcctggcagggtgtatccgaggaagccaaggagctggtccgagggctcctgaccgtggaccccgccaagcggctgaaactcgagggactgcggggcagctcgtggctgcaggacggcagcgcgcgctcctcgcccccgctccggacgcccgacgtgctcgagtcctctgggcccgcagtgcgctcgggtctcaacgccaccttcatggcattcaaccggggcaagcgggagggcttcttcctgaagagcgtggagaatgcacccctggccaagcggcggaagcagaagctgcggagcgccaccgcctcccgccggggctcccctgcaccagccaacccgggccgagcccccgtcgcctccaaaggggccccccgccgagccaacggccccctgcccccctcctaatccccaccactgtgacccccttccctcataggggctgtgacctgggagcccggctcactcccggaggcctctgcctgcggctgaccagaatccccaagggactgtcctttcctctcctaccccaccccactcccagacagagcagaagtatttttataagcagagaattttttatgtcttaccagatagagttgcagggaagggggggcctgctggggagtggggtttggggggccctctcccaggacactgcctcttctgggcagaaggcccctccagggggactgctccaacaggaaagagcccctcccccacttctaagcactgagttaggagtgctaactcctaaactgggaccccctaccctgttctcccctgaggccccgttcctgggaggggcacccctcaactgtcactttatggactgtctgtgcaattacgtccaccaaagacccgtgttgggggtactgaaggagaggccctgggggaccctctgaagcatttctgcctcactttatgtcatctgcttctcccctgttggggctaaggaaggagataggtggctcctaaaagaggaggccatcttctcacccaccccttcctctttggcacagctactcctggctgggggtggggccttgggggtctgggctgggcatccatggtcactgcctcagcccagccaggctgtgcctttgactttaaaataaaagtccacccagtgctgtgtgtggcaaaaaaaa

SEQ ID NO: 89814 - DNA, 2550 bp, Homo sapiens; identical to SEQ ID NO: 60935

SEQ ID NO: 89815 - DNA, 1822 bp, Homo sapiens; identical to SEQ ID NO: 60788
  misc_feature (1)...(1822): n = a,t,c or g

SEQ ID NO: 89816 - DNA, 4423 bp, Homo sapiens
ccggccgcgtcgactttttttttttgcattaagcacaatacagcaatttatttagatgcttaaaatgaatacaaagggaaaataaagatcacaaaattatacatactacaacagtgtgtcatatattagatggtataaatgaatccaccatgatggtgttgaactaaagataaaactaaatatccaaaatgcagcactcattggtttgctgcttcaacacaacacacttttatacagatctaaaaggtgtcaaaattagtagctgcaaagtcaattcttgcatgtgattttagcttaaaagatttcagaaaacagatctgaaataccagtttttgtttttgacagctgtaatgtcaaggatattcagaacaagaaaaatcctataatacaagagagtccagatatatatcttacgtggctggcctctgttgcaagattgtacaaggttatgtgcaaaaactaagtctgtccaaaaagtccatactagcgcagttttgagcttttgctaggtaaactagatagagcgtttattacacagcaagggcaacactaaaaaaagaaatctatgatgggcacacagtaacaggatcatgagcatcacttgaataggtctaaaagactgtacaaatatacatttcaactattcagaatgaatacatgaaaaaaaatcgcttttcccaaagtctactatacacattagactggtagcttgtatgttggccctacactaccatgtgaattagtttaacacttctcaaagacatctgaccaatcatttcacagagggaaagaaatgttgaaaaggcagataaaataaacctctgcttttcctcgtgtgtattcatgagtcaccagcttattggtttttcacatttagttaccgtgtctgtcagagaaggttctgaagcaagaacagcctgtcctgtcatagacttagaaataaccactggaactgcagcggccacatgccccacagtccaaccagtactcacaaggcagtaccagtgagaagacagctttgcagtcacactggagatcagagttccaggctgcagcatgtcaccaacgccagggaacctggcacttaggcctgttggctgctcagtttaactccggctaagctgccatgcatgggctcagctactccatcagtcatgttgtcaaactgttccccatcctcactgtcaattgtgctattctgccactcaatctgggggttagataagcgctcatcattctcagatgcattcttccactgtgactggtccttagaccaaaacccttcaacttttccataggaactattcttccatttcaactgctctctgtcaccttgcatggtagccttttttttggcagctggcttactgctccttgcatcttcgctttgggaagactcgtcagaccaggttcctggtttcatttcgcaggtattgtcctcaaagtctgacacttgttgggatccaggcccactctcagatggagaagcaccgtctttccactcaacaacatcgtcttggtcaacctcactatcagatgcattgtgcattagtttggttggttcctcagtcaaatgaatagtttcgtattttgaaccatcctctttttggtctagcttctcctcagattctgaagcatcctcaggaattaccttcagtacatgttcctctgggttatcgttagagattttaggttcaacttcaaaaacagggtcaaaagggctaccactttcattggattcttcttccaaattttcaaaactgtctgaggaactgtcatcttccttcccaaggttgagctttttgtcagcagtcttactagcattgactctggaatccttctcatcatgattttcaaatagcccctcagcatcaaaatccatctcatgcttgactttatttaattctttcatgttaaaccccagcaacacgccaggcttgtacttttcacaatcacggacacacttcttccttttgttactaaaatgggaagcgatgtcactctttccaatacccataaactggctgctagcttctcaatttctctcctggtgggatagggctgtttgggtgaaatactttgttagaaagcttttcctggcttcataggaatcatcttcagtgacccttggggtctaaagctaaaacaacaggctcttcaggcttctcttcaaagaagctgggtgaatcactatcatcatctaactttcgttttttcagtaagggaaattccatttgctcgtaagtgcgcttcacaggtgccagacttggagactgattaagccgagagggtgcatttgtcttatcctggccattttgggtctttccaacgcccctgcagtgaactagatgcagagtgatagttgaggcggtcatgttgctggtatacacaccaaggcaatggatacatttgtaggtgagctttttctcaactggatgaaccgtctgaataacttggtgcctctctcgtaagtgatgtgcaagtgcatcagatatgggtccttttaggattgaaaagcaaagaggacaaagggttttcccaacatcttttttatagggcactgcagcttgaggtgaactttttacagggatatctgccttttcctgaacctttggctgtggctttggaggaactggaggattattttgggcatggtaagcaacagattcagctggggcatccctcagattgtatgtagttaccaggagatggatgttagtgtgactaccctgctgcaatgtcaaatcaaaactcaaagtagaatctgttttaggtcccatctcttcatcaatgtgaaccatccgcatgtgtgcggccatcttttccacatcattgaaagttgaacggcaatatggacaagacagaccatgaattaacatatggttgagcagagtatctgtgggtaaatagcgattacagtagaggcatttgctagtaaaattgtgtattttcataatgtagttggctactgctgggactttctcagctttatgttctttttcgaagtgcacactatagacattttcaggaaaaagctcattacagattgtacatattttccacttttgagttgaggaagtgttacctgggggagggcctgtggcagctgcagcaggtttggaactggactgacctaacactctggatgcctgtgactgagagagggaaggagactttaactggcccgatgagagagaagaggcattagcagactgcagggagtatcttgctggtgcctgggacctctgctctgacccaagcccataagaccttccgtttccacttggaagtaactgctttacagactgagattgttgaggaatggaaactggtgcgttgccacctagacccagtctcattgactgaccaacactgtaaccctggcctacagatttgactccatagttgttctgctgcagatgaacactggacatcatgttgactcctgtagaatttaagttaggctttggtattgagagtcgattcaccatctgctgtgatggtaaagaccggacatttccagaagcaagggaaccgatccttggtgggagtcccatgctcttcttgtcttgaggtttgggagcaattagcatcaagggtttggatcggggaaccactacatttgtgtgcccaatcatggcagtgacctgatagcctatacgttcatggtcttcgatgacatgctgtaccaaagcttcataggactttggcatgaaaaggcatcgcttgcagtgaatactactctcttctcgggcattcgagcctaaggggactgccccattgagtgatttttctcctgcctttgctatgtaaggtgctgccacatgctgaaaatgttccctgtaaatgtgcttcctaactatttcataaagaggatctcggtaagtgcacttcttacagtaataaacagcttgctctacactgtcagcctgcttaggtttaaggccatcatttttgtttttatctttgaaagtgctgaggctgctacttggtgcgctggcgttcggagcatgaaatattttaatgtgtgtttccaaagtctttttgtctgcattgaaggtacagtaggggcaattaaggagaatcctattttcaaagtcttcactatggacattgcggaaatgacttttgtaggcagagaagaattttgaggaaaatggacaagcgctgcagcagaaaggttttgtccgatagtcctggtttttcgtaagtgatgggtcccacagtcctacatcctcccatgtagtgtttttcaaataaaagtcattaggttcaaattgtttaaaatcttctatatgttctttacagtattccaacccaatgtcactaagtatttttttcacagttttccgggcttttcttaaactgccaagattgttgacaggaagttggaacatagtttcagttcatcatcattacagtt

SEQ ID NO: 89817 - DNA, 4489 bp, Homo sapiens
tgttgagaagacctctcgggtagggtcaggtaatgaacgtgaccaggagctgcttactaagaacgcactgaatgatctcatcctttcttttctactgactggtcaacagacaccggcgttcggtcgaagagtatctggtgtcatagaaattgccgatgggagtcgccgtcgtaaagctgctgcacttaccgaaagtgattatcgtgttctggttggcgagctggatgatgagcagatggctgcattatccagattgggtaacgattatcgcccaacaagtgcttatgaacgtggtcagcgttatgcaagccgattgcagaatgaatttgctggaaatatttctgcgctggctgatgcggaaaatatttcacgtaagattattacccgctgtatcaacaccgccaaattgcctaaatcagttgttgctcttttttctcaccccggtgaactatctgcccggtcaggtgatgcacttcaaaaagcctttacagataaagaggaattacttaagcagcaggcatctaaccttcatgagcagaaaaaagctgggggattttgccgatttcggaaccaccatcaaaacaggattttcgcctgctggggcaaaaccagcgtgaaccgcttgctgcaactctctcaagggccaggcggtgaagggcaatcagctgttgcccgtctcactggtgaaaagaaaaaccaccctggcgcccaatacgcaaaccgcctctctccgcgcgttggccgattcattaatgcagctggcacgacaggtttcccgactggaaagcgggcattcgccgggttttccccgtcaagctttaattcggggggctcccctttagggttccgatttagtgctttacgggcactccgacccccaaaaaacttgatttgggtgaatggttcacgtaagtgggcccatcgcccttgatagacggttttttcgccccttttgacgttggaggtccacgtttctttaaaaagtgaattcctggttccaaactgggaacaacaactcaaccctattctcggggctattcttttgatttataagggattttgcccgattttcggaacccacccatcaaacaggatttttcgcctgcttggggcaaacccagcgtgggaccggcttgctgcaactctctcaagggccaggccggtgaagggcaatcaacctgttgcccgtctccactggtgaaaagaaaaaccaccctgggcgcccaatacgcaaaccggccctctccccgcgcgttggccgattcattaatgcaggctgggcaccgaccaggtttccccgactggaaaagcgggcagtgagcgcaacgcaattaatacccaagtttggggcgacaccaacaagttatgtttgcccgattttcggaaccacccatcaaacaggattttcgcctgctggggcaaaccacgcgtggaccgcttgctgcaactctctcagggccaggcggtgaagggcaatcagctgttgcccgtctcactggtgaaaagaaaaaccaccctggcgccacaatacgcaaaccgcctctctccggcgcgttggccgattcattaatgccagctgggcacgacagcgtttcccgactggaaaagcgggcagtgagcggcaacgcaattaataccaaaggtagataaaaccacaaagatagggaaaaaacagagcagaaaaactggaaactctaaaaatcagagtgcctctcctcctccaaaggaaagcagctcctcacacgcaacagaacaaaactggacggagaatgactttgacgagctgagagaagaaggcttcaaacgatcaaactgctccgagctacaggaagaagttcaaacccatggcaaagaggttaaaaaccttgaaaaaaaattagacgaatggctaactagaatcaccaatgaagaaaagcccttaaaggacctgatggagctgaaaaccaaggcacaagaactacgtgacaaatgcacaagcctcagtagccgattcaatcaactggaagaaagggtatcagtgatggaagatcaaatgaatgaaatgaagcgagaagagaagtttagagaaaaaagaataaaaagaaacgaacaaagcctccaagaaatatgggactatgtgaaaagaccaaatctacgtctgattggtgtacctgaaagtgatggggagaatggaaccaagttggaaaacactctgcaggataggatccaggagaacttccccaatctagcaaggcaggccaacggattttgccgatttcggaaccaccatcaaacaggattttcgcctgctggggcaaaccagcgtggaccgcttgctgcaactctctcagggccaggcggtgaagggcaatcagctgttgcccgtctcactggtgaaaagaaaaaccaccctggcgcccaatacgcaaaccgcctctccccgcgcgttggccgattcattaatcgcagctggcacgacaggtttcccgactggaaagcgggcagtgagcgcaacgcaattaatggtaaaggacgatgtcacttatgcaataaagctctcttgctggccggggcttgacattattccttcctgtctggctctgcaccgcattgaaactgagttaatgggcaaatttgataaaggtagactgcccacccatccacacttgatgctccgactggccattgaaactgttgctcatgactatgatgtcatagttattgacagcgcgcctaacttgggtatcggcacgattaatgtcgtatgtgctgcagatgtgctgattgttcccacgcctgctgagttgcttgactacacctccgcactgcagtttttcgatatggcttcgtgatctgctcaagaacgttgatctctccagggttcgagcctgatgtacgtattttgcttaccaaatacagcaatagtaatggctctcagtccccgtggatggaggagcaaattcgggatgcctggggaagcatggttctaaaaaatgttgtacgtgaaacggatgaagttggtaaaggtcagatccggatgagaactgtttttcaacaggccattgatcaacgctcttcaactggtgcctggagacatccttgtaaccacagtctagaacaagaaatagaagttagtcacttcagaagtccctatagggattttgccgatttccgaaaccacccatcaaacaggattttcgcttgctggggcaaaccagcagtggaccgcttgctgcaactctctcagggccaggcggtgaagggcaatcagctgttgcccgtctcactggtgaaaagaaaaaccaccctggcgcccaatacgcaaaccgcctctccccgcgcgttggccgattcattaatgcagctggcacgacaggtttcccgactggaaagcggccaagtgagcgcaacgcaattaattgttgagaagccttctcgggtatggtcaggtaatgaacgtgaccagaagctgtttactaaggacgcactggatgatctcatccttttttttctactgactggtcaacagacacgggcggtcggtcgaagagtatctggtgtcatagaaattgccgatgggagtcgccgtcgtaaagctgctgcacttaccgaaagtgattatcgtgttctggttggcgagctggatgatgagcagatggctgcattatccagattgggtaacgattatcgcccaacaagtgcttatgaacgtggtcagcgttatgcaagccgattgcagaatgaatttgctggaaatatttctgcgctggctgatgcggaaaatatttcacgtaagattattacccgctgtatcaacaccgccaaattgcctaaatcagttgttgctctcccctctcaccccggtgaactatctgcccggtcaggtgatgcacttcaaaaagcctttacagataaagaggaattacttaagcagcaggcatctaaccttcatgagcagaaaaaagctgggacggtttttcgccttttgacgttggagtccacgtctttaatagtggactcttgtcccaaactgaaacaacactcaaccttatctcgggttattcttttgatttataagggattttgccgatttcggaaccaccatcaaacaggattttcgcctgctggggcaaaccagcgtggaccgcttgctgcaactctctcagggccaggcggtgaagggcaatcagctgttgcccgtctcactggtgaaaagaaaaaccaccctggcgcccaatacgcaaaccgcctctccccgcgcgttggccgattcattaatgcagctggcacgacaggtttcccgactggaaagcgggcagtgagcgcaacgcaattaataccccagaatgatagattcacctacagcttgcactgtgcagttggaaaatctgcagacactcaatgccaactcatgaaagcagctgagagagagtctgtaacctgcaaagccacagggatgaggctgcccaagactatgggaacccacctcttgcatcagcatggcctggaa

SEQ ID NO: 89818 - DNA, 6346 bp, Homo sapiens; identical to SEQ ID NO: 60833

SEQ ID NO: 89819 - DNA, 1745 bp, Homo sapiens
aaagaaggtaagggcagtgagaatgatgcatcttgcattccttgtgctgttgtgtctgccagtctgctctgcctatcctctgagtggggcagcaaaagaggaggactccaacaaggatcttgcccagcaatacctagaaaagtactacaacctcgaaaaggatgtgaaacagtttagaagaaaggacagtaatctcattgttaaaaaaatccaaggaatgcagaagttccttgggttggaggtgacagggaagctagacactgacactctggaggtgatgcgcaagcccaggtgtggagttcctgacgttggtcacttcagctcctttcctggcatgccgaagtggaggaaaacccaccttacatacaggattgtgaattatacaccagatttgccaagagatgctgttgattctgccattgagaaagctctgaaagtctgggaagaggtgactccactcacattctccaggctgtatgaaggagaggctgatataatgatctctttcgcagttaaagaacatggagacttttactcttttgatggcccaggacacagtttggctcatgcctacccacctggacctgggctttatggagatattcactttgatgatgatgaaaaatggacagaagatgcatcaggcaccaatttattcctcgttgctgctcatgaacttggccactccctggggctctttcactcagccaacactgaagctttgatgtacccactctacaactcattcacagagctcgcccagttccgcctttcgcaagatgatgtgaatggcattcagtctctctacggacctccccctgcctctactgaggaacccctggtgcccacaaaatctgttccttcgggatctgagatgccagccaagtgtgatcctgctttgtccttcgatgccatcagcactctgaggggagaatatctgttctttaaagacagatatttttggcgaagatcccactggaaccctgaacctgaatttcatttgatttctgcattttggccctctcttccatcatatttggatgctgcatatgaagttaacagcagggacaccgtttttatttttaaaggaaatgagttctgggccatcagaggaaatgaggtacaagcaggttatccaagaggcatccataccctgggttttcctccaaccataaggaaaattgatgcagctgtttctgacaaggaaaagaagaaaacatacttctttgcagcggacaaatactggagatttgatgaaaatagccagtccatggagcaaggcttcccctagactaataggtgatgactttccaggagttgagcctaaggttgatgctgtattacaggcatttggatttttctacttcttcagtggatcatcacagtttgagtttgaccccaatgccaggatggtgacacacatattaaagagtaacagctggttacattgctaggcgagatagggggaagacagatatgggtgtttttaataaatctaataattattcatctaatgtattctgaggcaaacatggttaatttttcctgcatgttctgtgactgaagaagatgagccttgcagatatctgcatgtgttatgaagaatgtttctggaattcttcacttgcttttgaattgcactgaacagaattaagaaatactcatgtgcaataggtgagagaatgtattttcatagatgtgttattacttcctcaataaaaagttttattttgggcctgttcctt

SEQ ID NO: 89820 - DNA, 695 bp, Homo sapiens
ttttttttttttggaactgaatataaattaactttattacaaaaagctaaatgtatagtttctcattgtgagtgacccacccacaacaacggtaacagccctggcaggagctgggaccaggataccaattatgccaggttgaggggtacaaaggcccaggttccaggagccgggctgacaggcactgaattcacaacctccaagaggtggggtgttcttccaagggcagttgcccaccccgcttccttaatctgcaagttgcttgttcactgcatgctctgaggcatgggtccccggagtaatgtgcacgtccatcttgaaacgctgaggaagggagcgcagaagcttgaccttgatggacagaccaataagggtggccatgctgcagtgcggaatggttggtgtgaaagccacagccactgtactctcggggtcgctaacctgaacccgcacctgctctactacgttcaactcctctagcgtcagtggatgctccgggtcattgatggagcgaatcagatcgaagatctcgcgtgcgtcgatgctgtcgggaacctgctcgtcctcctcgcctgccgtcacaggccgctccccagagcgctggtagatgagggggttggcattctccaggaggccgccgccgaccccgccgccgcctaccatcgcggaaccaccaccgctgatcctagcaggcg

SEQ ID NO: 89821 - DNA, 1462 bp, Homo sapiens
tttcgtgtcggatgctgagaatgactgacgatgtgatgaggggcggattgaacgagtcacaggccagctggccaggagcaaaatcggcatagctgtctgactcgatggctgtacgtggttacggactgtctgccctgatagaatctcagcttcaacgtatcagaggagactgacttgaccaatggtggggatgagtcgcctgagaaatgacagactggctgacccactgacaggtggctgcagcgtgtgttgcaagtcttcttggaatcagctgcaggacctgtgccgcctggccaagctctcctgccctgccctcggtatctctaagaggaacctctatgactttgaagtcgagtacctgtgcgattacaagaagatccgcgaacaggaatattacctggtgaaatggcgtggatatccagactcagagagcacctgggagccacggcagaatctcaagtgtgtgcgtatcctcaagcagttccacaaggacttagaaagggagctgctccggcggcaccaccggtcaaagaccccccggcacctggacccaagcttggccaactacctggtgcagaaggccaagcagaggcggggcgctccgtcgctgggagcagggagcttcaattgccaagcgcagcattcttggggacgcatcactgtagagaatgaggtggacctggacggccctccgcgggccttcgtgtacatcaatgagtaccgtgttggtgagggcatcaccctcaaccaggtggctgtgggctgcgagtgccaggactgtctgtgggcacccactggaggctgctgcccgggggcgtcactgcacaagtttgcctacaatgaccagggccaggtgcggcttcgagccgggctgcccatctacgagtgcaactcccgctgccgctgcggctatgactgcccaaatcgtgtggtacagaagggtatccgatatgacctctgcatcttccgcacggatgatgggcgtggctggggcgtccgcaccctggagaagattcgcaagaacagcttcgtcatggagtacgtgggagagatcattacctcagaggaggcagagcggcggggccagatctacgaccgtcagggcgccacctacctctttgacctggactacgtggaggacgtgtacaccgtggatgccgcctactatggcaacatctcccactttgtcaaccacagttgtgaccccaacctgcaggtgtacaacgtcttcatagacaaccttgacgagcggctgccccgcatcgctttctttgccacaagaaccatccgggcaggcgaggagctcacctttgattacaacatgcaagtggaccccgtggacatggagagcacccgcatggactccaactttggcctggctgggctccctggctcccctaagaagcgggtccgtattgaatgcaagtgtgggactgagtcctgccgcaaatacctcttctag

SEQ ID NO: 89822 - DNA, 3439 bp, Homo sapiens; identical to SEQ ID NO: 60889

SEQ ID NO: 89823 - DNA, 4351 bp, Homo sapiens
atggggcagaagtctgttggtgcctcctatgtccagattccgttggtgcctcctttgtccaggcaccccaaaggactgggccatgaagacagatggagctcctattgtctatcatcactggctgcccagaatatttgtacaagtaaactgcactgccctgctgcccctgagcacacggacccgtccgaaccgcggggcagtgtgtcctgctgctccctgctgcggggactgtcctcagggtggtcctcacctctgcttccggcccctgtgtgcaaccctaacaaggccatcttcacggtggatgccaagaccacagagatcctggttgctaacgacaaagcttgcgggctcctggggtacagcagccaggacctgattggccagaagctcacgcagttctttctgaggtcagattctgatgtggtggaggccctcagcgaggagcacatggaggccgacggccacgctgcggtggtgtttggcacggtggtggacatcatcagccgtagtggggagaagattccagtgtctgtgtggatgaagaggatgcggcaggagcgccgcctatgctgcgtggtggtcctggagcccgtggagagggtctcgacctgggtcgctttccagagcgatggcaccgtcacgtcatgtgacagtctctttgctcatcttcacgggtacgtgtctggggaggacgtggctgggcagcatatcacagacctgatcccttctgtgcagctccctccttctggccagcacatcccaaagaatctcaagattcagaggtctgttggaagagccagggacggtaccaccttccctctgagcttaaagctgaaatcccaacccagcagcgaggaggcgaccaccggtgaggcggcccctgtgagcggctaccgggcatctgtctgggtgttctgcaccatcagtggcctcatcaccctcctgccggatgggaccatccacggcatcaaccacagcttcgcgctgacactgtttggttacggaaagacggagctcctgggcaagaatatcactttcctgattcctggtttctacagctacatggaccttgcgtacaacagctcattacagctcccagacctggccagctgcctggacgtcggcaatgagagtgggtgtggggagagaaccttggacccgtggcagggccaggacccagctgaggggggccaggatccaaggattaatgtcgtgcttgctggtggccacgttgtgccccgagatgagatccggaagctgatggaaagccaagacatcttcaccgggactcagactgagctgattgctggaggccagctcctttcctgcctctcacctcagcctgctccaggggtggacaatgtcccagaaggaagcctgccagtgcacggtgaacaggcgctgcccaaggaccagcaaatcactgccttggggagagaggaacctgtggcaatagagagccccggacaggatcttctgggagaaagcaggtctgaaccagtggatgtgaagccatttgcttcctgcgaagattctgaagctccagtcccagctgaggatgggggcagtgatgctggcatgtgtggcctgtgtcagaaggcccagctagagcggatgggagtcagtggtcccagcgggtcagacctttgggctggggctgccgtggccaagccccaggccaagggtcagctggcggggggcagcctcctgatgcactgcccttgctatgggagtgaatggggcttgtggtggcgaagccaggacttggcccccagcccctctgggatggcaggcctctcgtttgggacacctactctagatgagccgtggctgggagtggaaaacgaccgagaagagctgcagacctgcttgattaaggagcagctgtcccagttgagccttgcaggagccctggatgtcccccacgccgaactcgttccgacagagtgccaggctgtcaccgctcctgtgtcgtcctgcgatctgggaggcagagacctgtgcggtggctgcacgggcagctcctcagcctgctatgccttggccacggacctccctgggggcctggaagcagtggaggcccaggaggttgatgtgaattcgttttcctggaacctcaaggaactctttttcagtgaccagacagaccaaacgtcatcaaattgttcctgtgctacgtctgaactcagagagacaccctcttccttggcagtgggctccgatccagatgtaggcagtctccaggaacaggggtcgtgtgtcctggatgacagggagctgttactactgaccggcacctgtgttgaccttggccaaggccgacggttccgggagagctgtgtgggacatgatccaacagaaccgcttgaggtttgtttggtgtcctctgagcattatgcagcaagcgacagagaaagcccaggacacgttccttccacgttggatgctggccctgaggacacgtgcccatcagcagaggagccaaggctgaacgtccaggtcacctccacgcccgtgatcgtgatgcgcggggctgctggcctgcagcgggagatccaggagggtgcctactccgggagctgctaccatcgagatggcttacggctgagtatacagtttgaggtgaggcgggtggagctccagggccccacacctctgttctgctgctggctggtgaaagacctcctccacagccaacgcgactcagccgccaggacccgcctgttccttgccagcctgcccggctccacccactctaccgctgctgagctcaccggacccagcctggtggaagtgctcagagccagaccctggtttgaggagccccccaaggctgtggaactggaggggttggcggcctgtgagggcgagtactcccaaaagtacagtaccatgagcccgctgggcagtggggccttcggcttcgtgtggactgctgtggacaaggaaaaaaacaaggaggtggtggtgaagtttattaagaaggagaaggtcttggaggattgttggattgaggatcccaaacttgggaaagttactttagagatcgcaattctatccagggtggagcacgccaatatcatcaaggtattggatatatttgaaaaccaagggttcttccagcttgtgatggagaagcacggctccggcctagacctcttcgctttcatcgaccgccaccccaggctggatgagcccctggcgagctacatcttccgacaagtgagagcagggccagagccgtctagtgtcagcagtgggatacctgcgcttgaaggacatcatccaccgtgacatcaaggatgagaacatcgtgatcgccgaggacttcacaatcaagctgatagactttggctcggccgcctacttggaaaggggaaaattattttatactttttgtgggaccatcgagtactgtgcaccggaagttctcatggggaatccctacagagggccggagctggagatgtggtctctgggagtcactctgtacacgctggtctttgaggagaaccccttctgtgagctggaggagaccgtggaggctgccatacacccgccatacctggtgtccaaagaactcatgagccttgtgtctgggctgctgcagccagtccctgagagacgcaccaccttggagaagctggtgacagacccgtgggtaacacagcctgtgaatcttgctgactatacatgggaagaggtgtttcgagtaaacaagccagaaagtggagttctgtccgctgcgagcctggagatggggaacaggagcctgagtgatgtggcccaggctcaggagctttgtgggggccccgttccaggcgaggctcctaatggccaaggctgtttgcatcccggggatccccgtctgctgaccagctaaacaccaatttcttcctgcttttctccacttggtttggaaaatcacacagttttcaggctccatctgtttggagaaaatacattctgaagcatccccaattcaccttctaaaaactcatgtgcaggtttgataaacaccagaacagaagacagtgatgctgtattattttagatttattacatagatttggaattcacttttttcatgacctagaaaaaaacattccagtgttcaactgttttatattattaaagggcttttaatttgtgaacttctgaaggcatgagtgttttctctttctacttttgtatatgtgcatgttttgtttcctctgacttggtatatgctcatctgagtgacggatatgtgaaatttgtagaactggttagtcaaatggccagactatttcattaatttatttcctcaaatgcttttcaaattaaagcacctttgttagtaaacagttaa

SEQ ID NO: 89824 - DNA, 4142 bp, Homo sapiens; identical to SEQ ID NO: 75675

SEQ ID NO: 89825 - DNA, 4380 bp, Homo sapiens; identical to SEQ ID NO: 60926

SEQ ID NO: 89826 - DNA, 1047 bp, Homo sapiens
ccaggccaggagctggtggatgcgtggggctattttaagcacagcctcttggcctgcacactcccctggcccccagcccccagcagctcagctactggtcacctgccaccgcctggaatgctgattggcagttggctggggtgggtgggggctgggaagacactattataaagctgggagtgttgggaagcagccgtccccgtccagagtcctctgtggtccctgctgccaccatggccactcaccgcctcgtgatggtccggcacggcgagagcacatggaaccaggagaaccgtttctgtggctggttcgatgcagagctgagtgaaaaggggaccgaggaggccaagcggggagccaaggccatcaaggatgccaagatggagtttgacatctgctacacgtcagtgctgaagcgggccatccgcaccctctgggccatcctggacggcacggaccagatgtggctgcctgtggtgcgcacttggcgcctcaatgagcggcattacgggggcctcacaggcctcaacaaggcagaaacggccgccaagcacggggaggagcaggtgaagatctggaggcgctccttcgacatcccgccgcccccgatggacgagaagcacccctactacaactccattagcaaggagcgtcggtacgcaggcctgggagcccggggaactccccacctgcgagagcctcaaggacaccattgcccgggccctgcccttctggaacgagggagattgttccccagatcaaggccggcaagcgagtgctcattgcagcccacgggaacgagcctgcgggggcattttcaagcacctggaagtgatgtcagaccaggcgtattatggagctgaacctgccagcggggatccccattgtgtatgagctgaacaaggatctgaaccccaccaagcccatgaagttcctgggtgatgaggaaacggtgcggaaggccatggaggctgtggctgcccagggcaaggccaagtgaggggtgggctttgggcaataaaggcacctcccccaacaaaaaaaaaa

SEQ ID NO: 89827 - DNA, 448 bp, Homo sapiens
  misc_feature (1)...(448): n = a,t,c or g
nttgcgtgcactagtcagtgtggtggaattcccagagtagatgggttcaggagacatttcagaggcagaattgcttggactcgggggtggatcgaatgcatggagtgagggaaagggaacacttggaggactcctggtttcctggtttgagaaactaggtggatagttagtaccatttagggggttaggaggcctgcgggggagcaggttctatgggatggtgtcaaaggatgctgagaaggtgcctgtggtacccctttgggaggctgggaaggtgctcaaggcctaagggcctgtctggataactgtcttgtgtattgctagtatagtctggtttggaagtcttatttgactttgtttttcccttgtaacctgtttatctttctttgtcccatgttgttgttggtgcctttgctcaatgcttcgtttttgtcagttcgttcgtttg

SEQ ID NO: 89828 - DNA, 1976 bp, Homo sapiens
tacggctgcgagaagacgacagaagggggtgtgcaaaatcagagaggggtgcaagatcctgatttttcaggagttcaagcgacaatggcagcccaatacggcagtatgagcttcaaccccagcacaccaggggccagttatgggcctggaaggcaagagcccagaaattcccaattgagaattgtgttagtgggtaaaaccggagcaggaaaaagtgcaacaggaaacagcatccttggccggaaagtgtttcattctggcactgcagcaaaatccattaccaagaagtgtgagaaacgcagcagctcatggaaggaaacagaacttgtcgtagttgacacaccaggcattttcgacacagaggtgcccaatgctgaaacgtccaaggagattattcgctgcattcttctgacctccccagggcctcatgctctgcttctggtggttccactgggccgttacactgaggaagagcacaaagccacagagaagatcctgaaaatgtttggagagagggctagaagtttcatgattctcatattcacccggaaagatgacttaggtgacaccaatttgcatgactacttaagggaagctccagaagacattcaagacttgatggacattttcggtgaccgctactgtgcgttaaacaacaaggcaacaggcgctgagcaggaggcccagagggcacagttgctgggcctgatccagcgcgtggtgagggagaacaaggaaggctgctacactaataggatgtaccaaagggcggaggaggagatccagaagcaaacacaagcaatgcaagaactccacagagtggagctggagagagagaaagcgcggataagagaggagtatgaagagaaaatcagaaagctggaagataaagtggagcaggaaaagagaaagaagcaaatggagaagaaactagcagaacaggaggctcactatgctgtaaggcagcaaagggcaagaacggaagtggagagtaaggatgggatacttgaattaatcatgacagcgttacagattgcttcctttattttgttacgtctgttcgcggaagattaaacttaatgaaaatctgtttgtattttctgcatattctctggcaaccttgccccatacttacttatttagcatagtcgagtgctctagtttctgtctctcaggcactcgtaactaaggaccaccattggccattggtagatgtttgattgacttaacaagagagggacaaattttcaatttgtgaaactccaaagcagaaagtattggtgcttgctaccttgtgaattcttccttagacatgcagagaaaatgtatgcaagagaccaaaaagatggctccaagctatgtcatgttacctgtaataaaatcttttcttctagattctttctatgttggcagataatctccccttgtagcttccactcacttattcttgcattcagagtcacaatgatcatcttacccatgtggtttttgagaaagaaagatcaattctttgtttgcagtaggtaatcttagagatggagatgattgtagaattattcctagatgagtgtcaatttatttaattccattgtcatataaggagtcaaattgtttcttatcatttgttcattgaagaacagagacctgtctggaaaatcgatctctacaaattcaattaaataatgatccccaaatgctgaaaaagtgaaatacagcaattcaacagataatagagcaatgtttagtatattcagctgtatctgtagaaactctttgacgaacctcaatttaaccaatttgatgaatacccagttctcttcttttctagagaaagatagttgcaacctcacctccctcactcaacactttgaatacttattgtttggcaggtcatccacacacttctgcccccactgcattgaattttttgcttatgttgtttataataaaacttttcaattatctcaaaaaaaaaa

SEQ ID NO: 89829 - DNA, 2078 bp, Homo sapiens
  misc_feature (1)...(2078): n = a,t,c or g
ggattaaggattctttcataaaagggagagggaaatgtccagagaccatgtgaacccagagcatctccattcttataataagaaagctgggtaaaatgagggctgaaagttactgggctgcattccccagacggataaagcaatctaagtcattgaatgtcagcacaaaataccagggtcattaatggacccctttgctgataaaacaggttggcagtaaaaggagcnccagccaaaacctaaaatggtgaccaagactgatcctctggtcgtcctcactgctacactcccatcagcaccatgacagtttacaaatgccatggcaacgtcaggaggttaccctatatggtctaaaaaggagaggcattaattaatccaccccttgtttagtatatcatcaagaaataaccataaaaataggcaaccagcagcccttggggctgctctgtctatggagtagccattcttttattcctttactttcttaatattaactactttcactttgtggacttgcccgaattcttttcttgagcaaggtccaagaactctctcttggggactggatcacgaccgctttctggtaacaggagcaatacaaatgggctattagtaaacggacgctttaagtaactctagtacatctatgatgaaataccaggccacagtttttttaaaaatgaggatgttctctatatactgacgcacagtcaccaagacatgcactttataggaaattataagctcctccttgcctaaatctccttaattttgcttaataaataacaagtgaagccagaagctgtaaactcataattttaatgaagaaatgggatccagaagatggagatgtttttcattctactttattagatgaggaaaaggagagtaaatacttgtatgccagctaccacaccttttaaagttaatgttaaccctgctaagaacagcaaggagattttatatcagccaggttttagttgccagaaaccacaccagttattttagcaaagaccttataaagaagtgtactatatttaagtagctaaaaaggcaagaagaaaatgccaaggtgtcttggaggtagcaactgctaagcagctgccaccccaggactgggggagctagaatagagtctccccatgtttgacgtttgtctgctaatagcattcaagctctccccctcagtttgcctggatctggacaagctgataagaaagcccagccacttcctctttgcgtcagaggggaagttcaaactgtgcaaaccctgactgtcaaatgcactgagctctcataaccacaacaaaaaccagagccacttgttcgtcctttcactgaagcccaacagactggcgtgggtgcccgctttgctttccctagaaggcctcatgtatgtctagaggtcagtttggacagggacaggaacctctagacatgtttttctgggtgaacgagataagcggagaaatcacctaccccccgcagaaggcagatgcacctgctgtttctcctgagagcccacaaaagaagcccccatttcagcccaggagtgtgcaggaggctccttgcagtccccagggcccgcctgcacagaggcctgcccttgcacctccatctaagccttctctgaaagactcaggctcaagaaacccctgcccatctgcacccacctgggccaggccaaagccggaggagtgaggagcccccaccgttctcagcaatccctgtcaccatctcatcaccaggagtgactctgcccatactcggacccctgggaccagcccttcagccaccggtctcgacctctcctctcagcccttctgcaccctgggccttcacctgcaagctgaacaatgtccttactgggaataactggttttccttttgaatcttaagaaaatttgtctggctacactctttaagcaccttcctgagccacccgtggccaggctctgctggccgcatctgcctggccccatctaccttccctggaagcacaggactcaccccaggggtctcacaggaacatgcccagtgctttcaaacccagtaaaattttacttagattttgaaaa

SEQ ID NO: 89830 - DNA, 2829 bp, Homo sapiens; identical to SEQ ID NO: 60846
  misc_feature (1)...(2829): n = a,t,c or g

SEQ ID NO: 89831 - DNA, 4837 bp, Homo sapiens
  misc_feature (1)...(4837): n = a,t,c or g
aatcctgcctctccgtctgctagggatatgatttagggcaagttgcttgagctctttgggcctctgttttcacgtctgtatgatagaggtggtattgtttgacttgtatttgtgaagtttcaatgagattgataattgtcgattttatgttaatccctagtacatggcctgctgtcaacacccaggacacccaggatatggtctttgctgtttgattttcctcatccccagtctcaaggggaagccaggacaatgagaacagccacttcccatcatgagtcactgcaaggcccccagggtgggatggtggggagataagaaccgtgagagaagttggcacaaaggagttatgggacaaagggtccaagataggcagaaaagaaaatgttgccagttgatggggaagaaaggaagtcggagggctcagacactgagggggacagaacatctccatgtgcagtctcatctcttatagtcagcaacaggtatccacggggagggccctacatcatctgctaccctgaaggatctggaggtaggaggctctgggcggaggtgcagtgaccccgcaggccagccctccaacctcctcccgcagcggggactgggtgcccctctgccagctgagacagcccacacacaacccagccctaatgatcgttctctctacctctcccccaagtcctcctccgcctcctcctctctgcatgcgcgtcagagcccgtgccaagaacaagcagcagtcctgaactcgaggtccataaaaatcagtcgactgaatgacaccatcaaatctttgaaacaacagaagaaacaagtggaacatcagctggaagaagaaaagaaagcaaacaatgagaaacagaaagctgaaagggagctagagggtcaaatccagagattgaacatagagaaaaagaaactaaatacggacctgtatcacatgaaacattctctcagatactttgaagaagagtccaaggatctggccggccgcctgcaacgttcatcgcagcgtataggagagttagagtggtctctctgtgctgtcgccgccacacagaagaagaagccggatgggttctcgagccgcagtaaagcacttctcaagcggcagttagagcagtccatacgggagcagatactgctgaaaggacacgtgacacagttgaaggagtcgcttaaagaagtccagctggagagagatcaatatgctgaacaaataaaaggagagagggcccagtggcagcagaggatgaggaaaatgtcgcaggaggtttgcacattgaaggaggagaagaagcatgatacgcatcgggtagaggagctggagaggagcttgtccagactcaaaaaccagatggctgagccactgcccccggatgccccagcagtgtcctctgaggtggagctgcaagacctgaggaaggagctggagagagtggcaggagagctccaggctcaggtggaaaacaatcagtgcatcagtctcctgaaccgtgggcaaaagggagaggcttctcgagcaggaggagaggcttcaggagcagcaggagaggcttcgggaacaggagaagaggcttcagcagctggccgagccacagagcgacttggaggagctgaagcacgagaacaagagcgcactgcagttggagcagcaagtaaaggagctgcaggagaagctgggccaggtgatggagacgctcacctcggccgagaaggagccagaggcagcagtcccagcctcagggactgggggcgagtctagcggccttatggacctcctggaggagaaggcggacctgagggagcatgtggagaaactggaacttggattcatccagtaccggagagagagatgccatcagaacgtacatcgccttctaacagagccaggggacagtgccaaagatgcgtcaccgggaggaggccatcatcaggctggcccaggacaaggaggagaggaaggtgaagctgctggagctgcaggagatggtgttgcggcttgtggcagctacagcgaggggcacggcaaattcctggccgctgcccagaaccctgctgctgaacccagtccaggagccccagccccccaggagctcggggctgccgacaagcatggtgatctttgtgaggcgagcctcaccaacagcgtggagcctgcacaaggagaagccagggagggttcttcccaggacaaccctactgcaacagccaatcgtgcagctccttggtgagatgcaggaccaccaggagcacccaggcttgggcagcaactgctgtgtgccatgcttttgctgggcttggctgccgagaagaaggagataaacaccaccatcatcaaagagctgctcaagaaatttttaaaaacgaaacaaagttatggggttaatctcctacacaattcatttacttcatttgaatgttagagctactcatgattatttgtgtttctaatttatagtttaagtttatttgtaaaaagttaaaagagagtgggtctctgtggctctcactgatgttcactctggcatccttcagcatttttcttttttcatttcataattgtaggtcattagcatgcatatcgagtttgcccttacgtggtgggagttcaaacacacaaagacccactctttgcacaaaactgttctcgctggtttggaataggctcccgtgcttttctaatgttattgcagcatggatgtccattacagaattcagataaaatttgctaatgttctgctatgatgtttgatctcatcttaatcacagtgagctcttctatagctcaatatgcggtttgccctcaagtgtggcactgtttattactttgtaatatgccactgtggagtactgacatttagagctgttaaagggccgagaaccgggaacagcctttcccccattttctgtgtattggtgatgggagtgataaccttttgggggagctttctaaatctcacagaagaggaaagtggcctgctctggcaggtatgtgcaggatacagtgtgtttcatctgttccggtgccaagaatgagcagtgtactgtggcagttccctttggatttgtatgtgctctgggctcatgaagatattgcatcgtgagctgcagcagttgcactcttttttcaatgacctcaaaaagggcttatttccgaggaatgaaaggctgccatcattggctgtgggtgtgaaaaacctttcctagcttagagcatttgtatctacaatacattttaaagtcagagttcgtgttccctgttttaatcacatgactacctgtcccagtacacgaaagggcgctggttggcattcttcttaatgtatttagtgaagatcataagaaatcctttaagagtttaaatgtctctgaaacaggcatacaggctctagtcaagaatgaattagagtgaaggaaagctgtgtgacacctggcattcctctctgttcatggagcttctttgaggcttgaagtttgattttactatctagacctctctggctaatacctattcttcaaccacctcggttactctgacataggaatttacttcttttccttgagtggaaaacactttagaaagtaataacaaacattattataaactaatatatgtgagagtacttagttgaaacaaaaaggaattttagtagacagtattatattatctttgaaaatcaaggagaagtttatgcaacttaaaatgtttacacactgtggtgcaatctactgtttgtgaatgtctgtattatcaggaaacatgtctatacgatcgcagagttgtatttcctcacaaacttctttacgaagagtgaaatacgtttttgtacctctcattttcagtcagggacatactttgtgcaatatttctgtgattgtgcctatgcatgatgaatgaatgcatttcaatcatacattgcctaaatcataacttgatgatgcttgggaaagaatcaacagttaaaacttcatgaagttctaatgtctgtgttccaaaacacatcacattattaggttgtagggagatatgtaggtgtgctccctggggtggggagttttctagttactagaccatctccatttttagcacttggcagcctcatgatccttttataaatgtgagattaacaggagagcagcaatacgattttgccaatggaataacagatttgccggcattcactgaaagagggcagatattgggtccttgtaacttcaactgactcttccaaattgtatgaatttatcaatgtattacacaaatccagtttcagaatgataaaaaatgttagaccaaataatgcggctaattaacagtcgtatgatttctagcccatgggtttaaaactgtatcttaaagagtcattttaaaataatataaatattaaaaaatgtaactgctatcttaatgttctgaaataaaacattttaaaatataaatcctgtagtttaaaaggaagaaatggtgggaaggaaaagtagagaaagaaatgccaattacaggccaaagcgttatttgccaagttttcttagaatgaattttaccaatgtatgagttcttgttaacagaatgtgtaacggaaatactgaaagacttttgcttaaagtggcattattgactgctgatgtgatgctactgtaatgcaataaatttttaaattgttgcnnnnnnnnnnnnnngggggggccctttttaaagaacccttggggggcccaaatttaacgggggatggaaagtaaaaatttttttccttatggggggcttaataaaacccacttgggaatttttggaaaaaaaccttttttttgggggggaaaaaaaaggaaaaaa

SEQ ID NO: 89832 - DNA, 2863 bp, Homo sapiens; identical to SEQ ID NO: 61259

SEQ ID NO: 89833 - DNA, 5244 bp, Homo sapiens
gaattcccgggtcgacgatttcgtgccgctcctcctttgaagaggttttgcgtctctttccgccggtggcgtcggcgctcacgcaggggcgggtcccggtagcgccaggcggtgcagggcgggaaggggattcgtggcgacggcggcggcagggacagcaggagcagtggtgctgtcagcgcggccgtcggagacatgggagacccggggtcggagataatagaatctgtccctccagctggccctgaggcatctgagtcaacaacggatgaaaatgaagacgacattcagtttgtcagtgaaggaccattacgacctgttcttgaatacattgatctggtcagcagtgatgatgaagagcctagcacctcttatactgatgagaatattaaacgtaaagaccatattgattatcagaaggataaagttgctttaactctggctcgtctagcccgccatgttgaagtggagaaacagcagaaagaagagaagaatagagcattcagagaaaaaattgattttcagcatgctcatgggttacaagaattggaatttattcgaggacattctgatacagaagcagcaagactgtgtgtggaccagtggctaaaaatgccaggactcaaaacaggcacaattaattgtggaacaaaaagttcattccgaagaggaggccacacgtgggtgtctgggaaaccaattttatgtcctataatgcactgtaacaaggagtttgacaatgggcaccttctcttaggacatttgaaaaggttcgatcactctccatgtgatccaacaattacactacatggacctttcttcagctcctttgcttgtgtagtatgttataaaaaatttgttactcaacaacaatatagagatcacctttttgataaggaagccacagatgatggacataacaacaaccttcttcctcagattattcagtgttttgcatgtccaaattgcttccttctttttagcagaaaggaggagtgttcaaagcatatgtctggaaagaatcatttccatcagagtttcaaactgggtgataacaaaggaattgcacatccaatatctttcccatcttttgcaaagaaacttttgatctctctgtgcaaagatgttccctttcaagttaagtgtgtggcctgccacaagacactgcgttcccacatggagctcactgcccatttcagagttcattgtcgaaatgctggacctgtagctgtagctgagaagagcattacccaggttgcagagaaattcatattaagaggttattgtccagattgcaatcaagtctttgtggatgaaaccagcacccaaaatcataagcagaattcaggacacaaagtccgagtcattaactcagtggaagaatcagtcttactctattgccacagcagcgaagggaacaaggatccttcttctgacttgcatttattgttggatcaatcaaaattttcatcacttaaaagaaccatgtctattaaagaatctagctcactggagtgcattgccattccaaaaaaagaagatgaatttaaaagataaaagccatgaaggtgttgcttgtgtccagaaagaaaaatcagtagttaaaacctggttctgtgaatgcaatcagcgattcccaagtgaagatgcagtagaaaagcatgttttctcagcaaacacaatgggttataaatgtgtggtctgtggaaaggtatgtgatgattcaggggtcattcgtttacacatgagccggattcacggaggggcacatttaaataactttcttttctggtgtcggacatgcaaaaaggagttaacaaggaaagatactatcatggcacatgtgactgaatttcataatggacacagatatttttatgagatggatgaggtagaaggtgaaactttgccatcatcctctacaacattggataatttgactgctaacaagccttcatcagctattactgttattgatcattccccggcaaatagttctccgaggggtaaatggcaatgccggatttgtgaagatatgtttgattcccaggaatatgtaaaacagcactgcatgtctttggcaagccacaagtttcatagatacagctgtgctcactgcagaaagccttttcataagatagaaacattgtaccgacattgccaagatgagcatgacaatgagataaagattaaatacttctgtgggctttgtgatcttatctttaatgtggaagaagcatttctgagtcattatgaggagcaccacagcatagattatgtatttgtgtcagaaaaaactgaaacttcaattaaaaccgaagatgattttccagtaatagagaccagtaaccagttaacttgtggttgccgtgagagttacatctgtaaagtcaacagaaaagaagattatagcagatgtctccaaatcatgctggataaaggaaaactgtggtttcgctgcagtttatgttcggcaacagcacagaatttaaccgacatgaacactcatatccatcaagtgcacaaagaaaagagtgatgaggaggagcagcagtatgtaatcaagtgtggcacctgcaccaaagcatttcatgatcctgagagtgcacagcagcatttccatagaaaacattgcttcttacagaaacccagtgtggctcattttggatctgaaaaatccaaacctgttacaagttttactgctagtgcctcacatacagagagaaaactgaaacaggcaataaactattccaaaaagtttagaacatggagaaaggatttgagaatgaacctaagctatccgaatatagaagaagaaattgttgagcttccagatttggattacctgcgaaccatgactcatatagtctttgtagattttgataactggtcaaacttttttggtcatctaccagggcatctaaaccaaggaacatttatttggggctttcaaggaggaaacaccaattggaagcctccgctcaactgtaagatttataactacctgaacaggattggatgcttcttccttcatcctcgctgtagtaaaagaaaagatgctgctgattttgccatatgtatgcatgcgtggccgtctagatgaacaactacccaagcaaattcctttcaccatcctctcaggagatcaaggttttctggagctagagaatcaatttaagaagactcagaggccagcttcatatacttaaaccctcaccacttaggagggagattatgatgtgtgccttgttaaatagcatatctgataccaccaaagaatgtgacagtgatgataacatgggtgccaaaaatacttcaataggagaagaatttatatccacagaagatgtggaattagaagaagctattagaagaagtcttgaggaaatgtaattaaagatattaccacacaacatcaagtggccttgaagagactgagataacgaattcttgagtttgttttctaaaggagaccagaaatccactattacaaatgtatttgaaaacatgtttttgctttcatatgttcaaaatctgatctttgttttgtatttttgtgctaatgtgcaaacatgtacagaagaaatagaatacatgttcatgcaaatataaattatgtattctaatataggtgtaacagtttcccagttaactttgaatttatatatttagatttaaaggattaaaaaaaaaggaaagctcttgacagttgtttcccaaatagcattagttctttaattttatttgtactgtacaaatgatgctagtttatttttttagcagtgaaaatgaatataaaaaaggtgacataggtcaagttttccataaattctacttctcatgtggcactattatataatacctttgagatctttggtttacgtttattaagaagagggtaatggaaactgatcatggaaacatttaaaattttatcagcaatgttctttgtgggtgccatgcatatgtaaattattgctttaattagagcagcacattgctaaaataaaaaatacaccttaatttttaagaaataatttaaatgaaacaatttcccattcccttttacctgcttagactttttatgtgacttgtatggtctcctggttaaagggaatggtgtcagaatatttgcataaaattatttttcataacagtccttttttatatattggtgtaaacataatattcttcaagaaataatgttgaaagcctactcaggaataatcttccttaactctttaaatttttatttcatgtgaagtgttttcagtttagttattcactgaattgtcagtttccttcatttggtattacatatttaattcttaaatattgaggccccattgtgagtaataaaaaatacgacataagtagaagactaagaagggcttgtcatattatctttgtgtatatgcttcatgttatttaaccagaaatgtcttatctctaaaaatttttagtagtaattatttaccaaacttaaaaacatttctataaatataaagcttttctttatatttaagacaaaatataaaggctagaatttggttccttctctgtaacactaaatattttagtgtgaaattgaatttttttattactatagtcttttcaatctataatttgtgtttttaatttcttgatatgtcacttctgttcctccctgcttgcattttttaaaaactagacattgtggcttgagaatttatcaatcatctttccgaaatgaccacattgtgcttttagtttgtatgtttaagtggtcaagcaaggctctaggaggtagtcactgagctggaccttaaacacatctgcaggagctcacaaaatgggagcaaaagaggcattccagaaagaagagtagttaagcagatgtgggggcagggcaagaggagacagcaccttgttgccagagattctacacaaaggtgtgatggacactgatgctctattaagaagcttttgtggtgtgtgtggtagagaataattaaggcttctgataagacaggaaagggatatttcatcatgactgttaagaaaaggtaactgggttgtttaatgttttaattgataattgtcactgatcgtatttctacttgttaaataattaaaaatcatcttaaaattcatactttgactttaatttagacacaaggagatgtaatcgctgtgtaacatcagagaaagctatatggattatcgtcagaagtaaatgtttcctaaccattgacaaaaaaaaaa

SEQ ID NO: 89834 - DNA, 1973 bp, Homo sapiens
ttttttttttttttaagacaagccaaattttctttatttatttcccacctggaaaatccagaatcaaactttatttagatgttaggcttgctctgatacagaccttcaaaaaaacaaatcactggagcttctcatgtcagcagaatctggtttaaagaattccttgaacctatcagcagcaggatgtaaacattcacaagaatgctgtcacttctggctgctgtgggcagacatattctttttcaaagacatagttgaagagctagccttaaaatttgtgagaggttgcaagcctgcaaacaactttttttctagttcttcttggatcttaagaagaattctctcctgttctaaggcttctatatactttgagtagcaccaggttggctgtcggccatatggttggaggcctaggaaggaatcactgagtaaagcagttttgatagcaggcactgaagtatttgcatattgtttgattccatcctttccagatttttcgtcgttcgtaggactgccaatttttttttctgcttattatattcttgtcttctctctaaaacactcataatattttcatctgttaaattcttcctaaactcacagaactgaggccagaatttaaacataacccccaaaaatgtcatctgtgcctctctaaatacatatggtcctaactccttccggtgttcaataatcttctgggcttgctctactggaatgtcaatttgtaaagctggtggaatactggaattaataaagcagttgataatagttgtaatcttcttctggatgacagactcatcacaatgagaatggcacaagtccttatatttttgtacttcttgccaaaagagtaaaccattttccaataaatctccttttagagccacaaaacgttgaaattgtcttgaagtaactggattcaataatgctttgcgaaaagcaatgattttacaagatgaagagatccacttactctccacaggcttccagaccccgattttcttttcagccttctgtagtaagagctcttctgctatgtctttcatctgtacctttatcttctgacgtgctgcaaactgttcacttgcaagaaacaatggcagccatacattttctagcctattttgcacatgcttctggatttcaactagaacaggtgcatcaagctgctcatgaagaatcttcccccagccaccacttaaatgcattacctggttctgctgatacagagaagctggactgttgggtccaaagaaatattttttattaaggtatttgtttttaatgtatatagattttgccttcctttgatttcgatctctgtaagttattctccggaactgctcaatgtctgtccagcacataagatccatgcttgaagaatgagtctcaagaaactgacggaaatgttcaaactccagtttgttgttaagcagatcactaaacttaaaatgcttgtattctgcaggaacattatcccaatattctgttcgtttagagacgttagagagtgataaaatgccagttccaatttcacaagtggtgtcctcagctttcttggaaaatgtctctttatgcaaagcctgtagctttctgaagtatgtggagtctaactgtcgagtttcttccaccagctccacctttttataagcaatttggtccgattttaccatctttgtccatggctcaagaaggaggagaaggatatattcctctgctgtgtcaaaaaggtcttcaaatggtggctgtattttcatataaatttcttttttcttttcctgttggagtccaatgtcaagagtggcagaaggagcaacgtatgtggcaaaaagatacctttctcaatcacatcatccttagaagaacctggatacaaaagctcccgcttccaaggcttatgagttaatgtttttacttcaggtgatttatgggagatttaggaggttggataagctaattctatagtgcac

SEQ ID NO: 89835 - DNA, 3323 bp, Homo sapiens
ccgccctaagccagaggcaggagaatcacttgaatccagcaggcagaggagagcccactgccctgaagggttaacctcaggcctgtcagcattcactgcaagctgactgaggagacctttggccataggtgaacattggtggtagcctggcagtactacctgtgggaatgtagtggtggtagccacagagtgaggctcctttgcgcagcattcaatacaagcatcattcgctgaatgaaatagaccttctgctaatcgtatcaagctttccaacagccgaatggtggtccgggcagcgttccggcaatcactctgcctttggatctggtagtaccggagaagaacctgattgcccacatcagacagtgtgggctgcagattccttatgaggcagaaataggttttcatcttttccatgctccagagcttctctgatttgcttgggtaacctttattttctaagataaaggaggaaatgatacgatcccagtcttcattcttggtatcaagcaaaaccaggatcaggtcaaatcgacttaagagtgggctgccgagggcaatgttcacagacacggactcctgggggtcgtactggcctttggggttcgttgctgccaggatggtggtccttgtgttcagcttgcacacgaggtttgttctccgcctttgtcctaatccacaccagcaggtggagccgcagttaaagtttccgagtccattccgggagcgggagcccatcttgctggctgccgaggccctcgctggaggaggagggtcagaactcgggtgcagccaatcgagggcaacgctgctacttatcagagcagaatgggctgtagtttagtgaaataggaaagctgcaaaacactgtggagtgctcccgtgtaaataaaaagaggaaaaaagtttctcaagtcgccgctgcacgacgtctggccggcgctggagcgggggtctgcgctctcccgagcggccgcgcgctggactttattgtgccgcaaccagccccagttcccattgtttgtgtttttttcaaaatatggcaaaggttcaggtgaacaatgtagtggtgctggataacccttctcctttctacaacccgttccagttcgagatcaccttcgagtgcatcgaggacctgtctgaagacttggaatggaaaattatctatgtgggctctgcagaaagtgaagaatacgatcaagttttagactctgttttagtgggtcctgttcccgcaggaaggcatatgtttgtatttcaggctgatgcacctaatccaggactcattccagatgcagatgcagtaggcgtaactgttgtgctaaatacttgtacctatcgaggacaagaatttattagagatggctattatgtaaataatgaatatactgagacagaattaaggggaaaatccaccagtaaaaccagacttttctaagcttcaaaggaatattttggcatctaatcccaggggtcacaagattccacattaattgggaagataacacagaaaaactggaagatgcagagagcagtaatccaaatctacagtcacttctttcaacagatgcattaccttcagcatcaaagggatggtccacatcagaaaactcactaaatgtcatgttagaatcccacatggactgcatgtgaccacctaccatccctttagtacaaattaagctattaaaaatacacagaactatttccctgaaattccgtaagtacatagtcaaaacacaatgtgaagaatttgtttaaaaacatcctgtagaaagtttataagaaaaccagtatttgaacaaattgtggaatataaatacaactattttaaggtaatttttttctctaatgtgttattttatttgttctgaaactaatctgattaaagcatatatattattttcttctcctttatatgtaatgaaagcacttataaagaaacaggaatcattagaccaggttgtaaagatgtcttggcctcccagacagtctttggaccactattttactggcctttgaaagaacaaagtttacttcaactaaaatgtttcttcctgtgaagacatatggtatcattttaatttaaggggcagatttccattcttttttggcatgtccttaaaaagaggatttgaaatcaactatatgctaccaagaactttaggatccaattttccaagccaccgtgaagcctcttatggctactattatagttcatgagatgttggacagcatttggtttgtttggtaagagaagaacaaatatggctaattgttaataaggtcccctggctatggtttttgttcttataacagagtttagaatatcagagcatttcttgaatcatacatcattattgtccagtgaattcaagaccaaatacaatatcgggagaaaatacaaactccctgtgtttaagaataggggattataatggctcaaattggttcatttgatttctaaaaataccatgacctttaaaaattcttttaatagatcatgttattggcagtatttatataaaaaccatggatttagaaaggtatatttagctttattataatagatacgttactattttggaaatatatatattttcacacctgtagtactcttccccatttcctctgacactcatgcagaatgagatcaggcatatttgtggttgacatactctagatagcttttccaacaaatctttgaaaagcaatcttggaaaggaattcattaactaaatggggtaaaaggtttctttttctttgagagttaagtccttcctcaaaaaattttcttatgctccataaaattgaggtagaatattttcattattcttgcagctaagcaagacagccatatgatgcaggttatgcagtgccttcatatctaaaacttttatactgcactttttaaagcttttatgttgaggaaaggaaaagggcatttgtctaaacatggattctgagttgtatatattccccatccattcctaaaaaagtgaatttgtgaagcaaagttttgcccagatgttaaactttgaatttaatataccagattattaaaatattgtccattaactagttcatagattttaaaagtaaaatacttctgactgttaaaactatataaagaaaatctcatttgtctaattgcaattaaaagaaaaatgttaaaatattaaaatgaaaataaaagcattactttccaacaaagagctcagtggttaatataataggaacaacatatgtgcttattagaaataaagcatatacagccaaatcaccaaataaagccatttactgctgagtttttatcggaa

SEQ ID NO: 89836 - DNA, 2810 bp, Homo sapiens
ggccaggtgggtggcagagcaaaagaggaatggactgtgggccacctgctaccctccagccccacctgactgggccacctggcactgcccaccaccctgtagcagtgtgccagcaggagagtctgtcctttgcagagctgcccgccctgaagcccccgagcccagtgtgtctggaccttttccctgttgccccagaggagcttcgggctcctggcagccgctggtccctggggacccctgcccctctccaagggttgctatggccattatccccaggaggctcagatacagagatcaccagcggggggatgcggcccagcagggctggcagctggccacactgtcctggtgcccagcccccagctctggagggaccctggagtccccgacacacacagccacagcgccgggccagccacggctcggagaagaagtctgcctggcgcaagatgcgggtgtaccagcgtgaagaggtccccggctgccccgaggcccacgctgtcttcctagagcctggccaggtagtgcaagagcaggccctgagcacagaggagcccagggtggagttgtctgggtccacccgagtgagcctcgaaggtcctgagcggaggcgcttctcggcatcggagctgatgacccggctgcactcttctctgcgcctggggcggaattcagcagcccgggcactcatctctgggtcaggcaccggagcagcccgggaagggaaagcatctggaatggaggctcgaagtgtagagatgagcggggaccgggtgtcgcggccagcccctggtgactcacgagagggcgattggtccgagcccaggctagacacacaggaagagccgcctttggggtccaggagcaccaacgagcggcgccagtctcgattcctccttaactccgtcctctatcaggaatacagcgacgtggccagcgcccgcgaactgcggcggcagcagcgcgaggaggagggcccgggggacgaggccgagggcgcagaggaggggccggggccgccgcgggccaacctctcccccagcagctccttccgggcgcagcgctcggcgcgaggctccaccttctcgctgtggcaggatatccccgacgtacgcggcagcggcgtccgtggccacgctgagcctgcgggactgcaagctgcaggaggccaagtttgagctgatcacctccgaggcctcctacatccacagcctgtcggtggctgtgggccacttcttaggctctgccgagctgagcgagtgtctgggggcgcaggacaagcagtggctgttttccaaactgcccgaggtcaagagcaccagcgagaggttcctgcaggacctggagcagcggctggaggcagatgtgctgcgcttcagcgtgtgcgacgtggtgctggaccactgcccggccttccgcagagtctacctgccctatgtcaccaaccaggcctaccaggagcgcacctaccagcgcctgctcctggagaaccccaggttccctggcatcctggctcgcctggaggagtctcctgtgtgccagcgtctgccccttacctccttccttatcctgcccttccagaggatcacccgcctcaagatgttggtggagaacatcctgaagcggacagcacagggctctgaagacgaagacatggccaccaaggccttcaatgcgctcaaggagctggtgcaggagtgcaatgctagtgtacagtccatgaagaggacagaggaactcatccacctgagcaagaagatccactttgagggcaagattttcccgctgatctctcaggcccgctggctggttcggcatggagagttggtagagctggcaccactgcctgcagcaccccctgccaagctgaagctgtccagcaaggcagtctacctccacctcttcaatgactgcttgctgctctctcggcggaaggagctagggaagtttgccgttttcgtccatgccaagatggctgagctgcaggtgcgggacctgagcctgaagctgcagggcatccccggccacgtgttcctcctccagctcctccacgggcagcacatgaagcaccagttcctgctgcgggcccggacggaaagtgagaagcagcgatggatctcagccttgtgcccctccagcccccaggaggacaaggaggtcatcagtgagggggaagattgcccccaggttcagtgtgttaggacatacaaggcactgcacccagatgagctgaccttggagaagactgacatcctgtcagtgaggacctggaccagtgacggctggctggaaggggtccgcctggcagatggtgagaaggggtgggtgccccaggcctatgtggaagagatcagcagcctcagcgcccgcctccgaaacctccgggagaataagcgagtcacaagtgccaccagcaaactgggggaggctcctgtgtgatgggcagccatggcctaggaccccacctccatgcctggctcctggatggtcctggaggggcctgcagtgtctccattccccaagctgctcctgctggcacttcgcttctgtggccttggcattgagggcacaggctggacacaggaatgggggcgcctccagagggtctctccgtcctcatgctcctcagtgtccacacttcaaggccaaggatagtttcttcctctgacatggggaccataacaggtgatcactgatacctggcaaagactggggccctctcctttctatgtcctcaatcctgcctgactcttggtccttctggcaaggaccccgggtggggaatcgttcaggtgcctgaggagcacggg

SEQ ID NO: 89837 - DNA, 4037 bp, Homo sapiens
agcgagtggggatttttctggatatgggcatgcagaacgtttccttttttgatgctgaaggtggttcccatgtctatacattcaggagtgtctctgctgaggagccactgcacttgttttttgctcctccaagtccacctaatggtgataagagtgtcttgagtatctgtcctgtgataaacccgggcactactgatgctccagtccatcctggggaggccaaataagcccccactgctcaggccatgatgagcttcggcggcgcggacgcgctgctgggcgccccgttcgcgccgctgcatggcggcggcagcctccactacgcgctagcccgaaagggtggcgcaggcgggacgcgctccgccgctggctcctccagcggcttccactcgtggacacggacgtccgtgagctccgtgtccgcctcgcccagccgcttccgtggcgcaggcgccgcctcaagcaccgactcgctggacacgctgagcaacgggccggagggctgcatggtggcggtggccacctcacgcagtgagaaggagcagctgcaggcgctgaacgaccgcttcgccgggtacatcgacaaggtgcggcagctggaggcgcacaaccgcagcctggagggcgaggctgcggcgctgcggcagcagcaggcgggccgctccgctatgggcgagctgtacgagcgcgaggtccgcgagatgcgcggcgcggtgctgcgcctgggcgcggcgcgcggtcagctacgcctggagcaggagcacctgctcgaggacatcgcgcacgtgcgccagcgcctagacgacgaggcccggcagcgagaggaggccgaggcggcggcccgcgcgctggcgcgcttcgcgcaggaggccgaggcggcgcgcgtggacctgcagaagaaggcgcaggcgctgcaggaggagtgcggctacctgcggcgccaccaccaggaagaggtgggcgagctgctcggccagatccagggctccggcgccgcgcaggcgcagatgcaggccgagacgcgcgacgccctgaagtgcgacgtgacgtcggcgctgcgcgagattcgcgcgcagcttgaaggccacgcggtgcagagcacgctgcagtccgaggagtggttccgagtgaggctggaccgactgtcggaggcagccaaggtgaacacagacgctatgcgctcagcgcaggaggagataactgagtaccggcgtcagctgcaggccaggaccacagagctggaggcactgaaaagcaccaaggactcactggagaggcagcgctctgagctggaggaccgtcatcaggccgacattgcctcctaccaggaagccattcagcagctggacgctgagctgaggaacaccaagtgggagatggccgcccagctgcgagaataccaggacctgctcaatgtcaagatggctctggatatagagatagccgcttacagaaaactcctggaaggtgaagagtgtcggattggctttggcccaattcctttctcgcttccagaaggactccccaaaattccctctgtgtccactcacataaaggtgaaaagcgaagagaagatcaaagtggtggagaagtctgagaaagaaactgtgattgtggaggaacagacagaggagacccaagtgactgaagaagtgactgaagaagaggataaagaggccaaagaggaggagggcaaggaggaagaagggggtgaagaagaggaggcagaagggggagaagaagaaacaaagtctcccccagcagaagaggctgcatccccagagaaggaagccaagtcaccagtaaaggaagaggcaaagtcaccggctgaggccaagtccccagagaaggaggaagcaaaatccccagccgaagtcaagtcccctgagaaggccaagtctccagcaaaggaagaggcaaagtcaccgcctgagggccaagtccccagagaaggatggaaagcaaaatttccaagctgaggtcaagtcccccgagaaggccaagtccccagcaaaggaagaggcaaagtcaccggctgaggccaagtctccagagaaggccaagtccccagtgaaggaagaagcaaagtcaccggctgaggccaagtccccagtgaaggaagaagcaaaatctccagctgaggtcaagtccccggaaaaggccaagtctccaacgaaggaggaaagcaaagtcccctgagaaggccaagtcccctgagaaggccaagtccccagagaaggaagaggccaagtcccctgagaaggccaagtccccagtgaaggcagaagcaaagtcccctgagaaggccaagtccccagtgaaggcagaagcaaagtcccctgagaaggccaagtccccagtgaaggaagaagcaaagtcccctgagaaggccaagtccccagtgaaggaagaagcaaagtcccctgagaaggccaagtccccagtgaaggaagaagcaaagacccccgagaaggccaagtccccagtgaaggaagaagccaagtccccagagaaggccaagtccccagagaaggccaagactcttgatgtgaagtctccagaagccaagactccagcgaaggaggaagcaaggtcccctgcagacaaattccctgaaaaggccaaaagccctgtcaaggaggaggtcaagtccccagagaaggcgaaatctcccctgaaggaggatgccaaggcccctgagaaggagatcccaaaaaaggaagaggtgaagtccccagtgaaggaggaggagaagccccaggaggtgaaagtcaaagagcccccaaagaaggcagaggaagagaaagcccctgccacaccaaaaacagaggagaagaaggacagcaagaaagaggaggcacccaagaaggaggctccaaagcccaaggtggaggagaagaaggaacctgctgtcgaaaagcccaaagaatccaaagttgaagccaagaaggaagaggctgaagataagaaaaaagtccccaccccagagaaggaggctcctgccaaggtggaggtgaaggaagacgctaaacccaaagaaaagacagaggtggccaagaaggaaccagatgatgccaaggccaaggaacccagcaaaccagcagagaagaaggaggcagcaccggagaaaaaagacaccaaggaggagaaggccaagaagcctgaggagaaacccaagacagaggccaaagccaaggaagatgacaagaccctctcaaaagagcctagcaagcctaaggcagaaaaggctgaaaaatcctccagcacagaccaaaaagacagcaagcctccagagaaggccacagaagacaaggccgccaaggggaagtaaggcagggagaaaggaacatccggaacagccaaagaaactcagaagagtcccggagctcaaggatcagagtaacacaattttcactttttctgtctttatgtaagaagaaactgcttagatgacggggcctccttcttcaaacaggaatttctgttagcaatatgttagcaagagagggcactcccaggcccctgcccccatgccctccccaggcgatggacaattatgatagcttatgtagctgaatgtgatacatgccgaatgccacacgtaaacacttgactataaaaactgcccccctcctttccaaataagtgcatttattgcctctatgtgcaactgacagatgaccgcaataatgaatgagcagttagaaatacattatgcttgagatgtcttaacctattcccaaatgccttctgttttccaaaggagtggtcaagcccttgcccagagctctctattctggaagagcggtccaggtggggccggggactggccactgaattatgccagggcgcactttccactggagttcactttcaattgcttctgtgcaataaaaccaagtgcttataaaatgaaaaaaaaaaaaaagggggcggccgttttaaaggatccaattttacgtccgcgggctggcaaggtaatattttttttatggggccccctaaattcatttccctggccggggtttaacaacggg

SEQ ID NO: 89838 - DNA, 3790 bp, Homo sapiens; identical to SEQ ID NO: 60999

SEQ ID NO: 89839 - DNA, 2095 bp, Homo sapiens
gcgtggaattctggtggtacaacgcgaaggtgtgggaaggccgcgataaaccggaactgcagcccgccggacacctccggcttcacttccgtaagaggagaggagtgtacggcaaggggcgggaactggaacttggcccgcctcgttgtgagctgagctcagcggcacgcttttgtggcgtcactgcactgttaccccgccctacgtgtctctgacgctgacaccttctcactgtgaaacgtcgcgacctgtgacgtctggggggcgcctcaaatcttccactccagcatcggatcccggaaaggcagcgtcggagactggacccaaaactcttcctgttctgcctgcagagttgagccccgtccgggtcctggacccgcgtagtactgaccctggatccctgttcactgcgttctcgctccccgcgctccctgctggaccccgggatgccgggcatctccgcccgaggcctctctcatgaggggaggaagcagctagctgttaacctcacccgtgtcctggcactctaccgttccatcttggatgcctacatcatcgaattttttcacagacaacctatgggacacactcccttgctcatggcaggaagcattggatggactgaaaccaccacagctggccacaatgctgctggggatgcctggggaaggggaggtcgtcaggtacaggtcagtgtggccactcaccctgctggccctgaagtccacggcgtgtgccctggcctttacccggatgcctggctttcagaccccctcagaattcctggagaaccccagccagagctcccgactaacagctccattccggaaacatgtcaggcccaagaagcagcatgagatccggaggctgggagagttggtgaagaagctgagtgatttcacaggctgcacccaggttgtagacgtgggctcaggccagggccatctctcccgcttcatggctcttggcctggggttgatggtgaagagcatcgaaggggatcagagactggtggagagagcccagcgcctggaccaggagcttctgcaggctctggagaaagaggagaagaggaacccgcaggtggtccaaaccagccctcgtcactccccacaccacgtggttaggtgggtagaccccacagccctgtgtgaggagcttctgcttccactggagaacccgtgtcagggcagggcccgcttgctgctcacaggcctccacgcctgtgggcgatctgagtgttgccttgctgagacacttctcctgctgtcctgaggtggtggccctggcctcagtgggctgctgctacatgaagctgagtgaccctggcggctacccactgagtcagtgggtggctgggctgcctggctatgaactgccctaccggcttcgggagggggcctgccatgccctggaggaatatgctgagcggctacagaaagctggccctggccttcgaactcactgctaccgtgcagcactggagacagtcatccgacgggcccggcccgagctccgtcggccaggcgtgcagggtatccccagggtccacgagctcaagattgaagaatatgtgcagcgggggctacagcgagtggggctagatccccagctgccactgaatctggctgcccttcaggcccacctggcccaggagaaccgtgtggtggccttcttcagcctggctctactgcttgccccactggtggagacgcttattctactggaccggctgctgtaccttcaggaacaggccctttctcccaggtttccatgctgagctcctgcccatcttcagtcctgaactctctcccagaaacctggttctggtggccaccaagatgcccctgggtcaggctctttctgttctggagactgaagacagctgatgcagcctgaggagacatctcagaccccatcatctgaaagtgcccagagagcacagtggcagagtacatctcatccagagaaacagcatcctgcatcctccagagtcctggttccttcagtttcatcccctttctctccttccatggattatgtaatacattgtaaagttttaattaattaaaaattggatatctgaaaaaaaaaa

SEQ ID NO: 89840 - DNA, 5194 bp, Homo sapiens
gacgtgggccccgagtgcaatcgcgggaagccagggtttccagctaggacacagcaggtcgtgatccgggtcgggacactgcctggcagaggctgcgagcatggggccctggggctggaaattgcgctggaccgtcgccttgctcctcgccgcggcggggactgcagtgggcgacagatgcgaaagaaacgagttccagtgccaagacgggaaatgcatctcctacaagtgggtctgcgatggcagcgctgagtgccaggatggctctgatgagtcccaggagacgtgcttgtctgtcacctgcaaatccggggacttcagctgtgggggccgtgtcaaccgctgcattcctcagttctggaggtgcgatggccaagtggactgcgacaacggctcagacgagcaaggctgtccccccaagacgtgctcccaggacgagtttcgctgccacgatgggaagtgcatctctcggcagttcgtctgtgactcagaccgggactgcttggacggctcagacgaggcctcctgcccggtgctcacctgtggtcccgccagcttccagtgcaacagctccacctgcatcccccagctgtgggcctgcgacaacgaccccgactgcgaagatggctcggatgagtggccgcagcgctgtaggggtctttacgtgttccaaggggacagtagcccctgctcggccttcgagttccactgcctaagtggcgagtgcatccactccagctggcgctgtgatggtggccccgactgcaaggacaaatctgacgaggaaaactgcgctgtggccacctgtcgccctgacgaattccagtgctctgatggaaactgcatccatggcagccggcagtgtgaccgggaatatgactgcaaggacatgagcgatgaagttggctgcgttaatgtgacactctgcgagggacccaacaagttcaagtgtcacagcggcgaatgcatcaccctggacaaagtctgcaacatggctagagactgccgggactggtcagatgaacccatcaaagagtgcgggaccaacgaatgcttggacaacaacggcggctgttcccacgtctgcaatgaccttaagatcggctacgagtgcctgtgccccgacggcttccagctggtggcccagcgaagatgcgaagatatcgatgagtgtcaggatcccgacacctgcagccagctctgcgtgaacctggagggtggctacaagtgccagtgtgaggaaggcttccagctggacccccacacgaaggcctgcaaggctgtgggctccatcgcctacctcttcttcaccaaccggcacgaggtcaggaagatgacgctggaccggagcgagtacaccagcctcatccccaacctgaggaacgtggtcgctctggacacggaggtggccagcaatagaatctactggtctgacctgtcccagagaatgatctgcagcacccagcttgacagagcccacggcgtctcttcctatgacaccgtcatcagcagagacatccaggcccccgacgggctggctgtggactggatccacagcaacatctactggaccgactctgtcctgggcactgtctctgttgcggataccaagggcgtgaagaggaaaacgttattcagggagaacggctccaagccaagggccatcgtggtggatcctgttcatggcttcatgtactggactgactggggaactcccgccaagatcaagaaagggggcctgaatggtgtggacatctactcgctggtgactgaaaacattcagtggcccaatggcatcaccctagatctcctcagtggccgcctctactgggttgactccaaacttcactccatctcaagcatcgatgtcaatgggggcaaccggaagaccatcttggaggatgaaaagaggctggcccaccccttctccttggccgtctttgaggacaaagtattttggacagatatcatcaacgaagccattttcagtgccaaccgcctcacaggttccgatgtcaacttgttggctgaaaacctactgtccccagaggatatggtcctcttccacaacctcacccagccaagaggagtgaactggtgtgagaggaccaccctgagcaatggcggctgccagtatctgtgcctccctgccccgcagatcaacccccactcgcccaagtttacctgcgcctgcccggacggcatgctgctggccaggggacatgaggagctgcctcacagagggttgaggctgcagtggccacccaggagacatccaccgtcaggctaaaggtcagctccacagccgtaaggacacagcacacaaccacccgacctgttcccgacacctcccggctgcctggggccacccctgggctcaccacggtggagatagtgacaatgtctcaccaagctctgggcgacgttgctggcaagaggaaattgagaagaagcccagtagcgtgagggctctgtccattgtcctccccatcgttgctcctcgtcttcctttgcctgggggtcttccttctatggaagaactggcggcttaagaacatcaacagcatcaactttgacaaccccgtctatcagaagaccacagaggatgaggtgcacatttgccacaaccaggacggctacagctacccctcgagacagatggtcagtctggaggatgacgtggcgtgaacatctgcctggagtcccgtccctgcccagaacccttcctgagacctcgccggccttgttttattcaaagacagagaagaccaaagcattgcctgccagagctttgttttatatatttattcatctgggaggcagaacaggcttcggacagtgcccatgcaatggcttgggttgggattttggtttcttcctttcctcgtgaaggataagagaaacaggcccggggggaccaggatgacacctccatttctctccaggaagttttgagtttctctccaccgtgacacaatcctcaaacatggaagatgaaagggcaggggatgtcaggcccagagaagcaagtggctttcaacacacaacagcagatggcaccaacgggaccccctggccctgcctcatccaccaatctctaagccaaacccctaaactcaggagtcaacgtgtttacctcttctatgcaagccttgctagacagccaggttagcctttgccctgtcacccccgaatcatgacccacccagtgtctttcgaggtgggtttgtaccttccttaagccaggaaagggattcatggcgtcggaaatgatctggctgaatccgtggtggcaccgagaccaaactcattcaccaaatgatgccacttcccagaggcagagcctgagtcactggtcacccttaatatttattaagtgcctgagacacccggttaccttggccgtgaggacacgtggcctgcacccaggtgtggctgtcaggacaccagcctggtgcccatcctcccgacccctacccacttccattcccgtggtctccttgcactttctcagttcagagttgtacactgtgtacatttggcatttgtgttattattttgcactgttttctgtcgtgtgtgttgggatgggatcccaggccagggaaagcccgtgtcaatgaatgccggggacagagaggggcaggttgaccgggacttcaaagccgtgatcgtgaatatcgagaactgccattgtcgtctttatgtccgcccacctagtgcttccacttctatgcaaatgcctccaagccattcacttccccaatcttgtcgttgatgggtatgtgtttaaaacatgcacggtgaaggcccgggcggcaaggtgtcacgcctgtaatcccaagcacttttgggaggccgaggcgggtggatcatgaggtcaggagatcgagaccatcctggctaacaaggtgaaaccccgtctctactaaaaaatacaaaaaattagccgggcgcggtggcgggcacctgtagtcccagctactcgggaggctgaggcaggagaatggtgtgaacccgggaagcggagcttgcagtgagccgagattgcgccgactgcagtccgcagtctggcctgggcgacagagcgagactccgtctcaaaaaaaacaaaacaaaaaaaaaccatgcatggtgcatcagcagcccatggcctctggccaggcatggcgaggctgaggtgggaggatggtttgagctcaggcatttgaggctgtcgtgagctatgattatgccactgctttccagcctgggcaacatagtaagaccccatctcttaaaaaatgaatttggccagacacaggtgcctcacgcctgtaatcccagcactttgggaggctgagctggatcacttgagttcaggagttggagaccaggcctgagcaacaaagcgagatcccatctctacaaaaaccaaaaagttaaaaatcagctgggtatggtggcacgtgcctgtgatcccagctacttgggaggctgaggcaggaggatcgcctgagcccaggaggtggaggttgcagtgagccatgatcgagccactgcactccagcctgggcaacagatgaagaccctatttcagaaatacaactataaaaaaaataaataaatcctccagtctggatcgtttgacgggacttcaggttctttctgaaatcgccgtgttactgttgcactgatgtccggagagacagtgacagcctccgtcagactcccgcgtgaagatgtcacaagggattggcaattgtccccagggacaaaacactgtgtcccccccagtgcagggaaccgtgataagcctttctggtttcggagcacgtaaatgcgtccctgtacagatagtggggattttttgttatgtttgcactttgtatattggttgaaactgttatcacttatatatatatatacacacatatatataaaatctatttatttttgcaaaccctggttgctgtatttgttcagtgactattctcggggccctgtgtagggggttattgcctctgaaatgcctcttctttatgtacaaagattatttgcacgaactggactgtgtgcaacgctttttgggagaatgatgtccccgttgtatgtatgagtggcttctgggagatgggtgtcactttttaaaccactgtatagaaggtttttgtagcctgaatgtcttactgtgatcaattaaatttcttaaatg

SEQ ID NO: 89841 - DNA, 980 bp, Homo sapiens
ttacaggcacgagccgtgcaccagccagagtcctctcacttaggcatttaaggcagtgagtccaggttcctcagtggcggctgcacacagtgtgttttctcccgatttggatgtgggtctacagcctgccccacccaggggtcgtaccccactccgcctggtctccaggtctatgtgacccaggtggagctgctgtccccagggaatgcttcctgaacgtcccctcctcatgctcccagctctccttacctctgtgcaagctcttgagcgttctcataggtgaagaagctcaggccagcgtagggaatgaacccccagcacggtgggcataaatccatggtagagagtcttcagcccctcttctctcgagatgcggatgaagacatgaaagatgttgctgtacatttccttcggggttacggccatccgcgcctctgaccaggtccagggggtaggtcagtgaagcggctgtcgttccagccagtgcgccggcgaagaggcgatggccaatgggggcagggcttctccacggaagccatagtaagctgcccatggatgcgcttgtactcctcgtgtgcgctgaactgggatggcggcgtagggcaccacgcgcaccatggtggccgagttcccgcgccacaagctgagaaatcccttcgttgaggtaggtgtagtagaggacccggaaggcctccttggcagaaaatctttttgaagacacttggaagatgattttggttcggtccaggggagctaccgctgttttggcaagggcaccagccagggccccagacagcagggagccgagcacttgcctgtggtcacgctttgatgagacggacgaggacaggacagcctcagcatcctcatgcaatcgcaccgggccttccttcacaccattacccataccaggcctgctcggaatggcaggagactcggtccggcccggacgcgtcgccgccgccgctacctccagccgc

SEQ ID NO: 89842 - DNA, 2797 bp, Homo sapiens; identical to SEQ ID NO: 61133

SEQ ID NO: 89843 - DNA, 4242 bp, Homo sapiens; identical to SEQ ID NO: 75729

SEQ ID NO: 89844 - DNA, 2026 bp, Homo sapiens; identical to SEQ ID NO: 75844

SEQ ID NO: 89845 - DNA, 6564 bp, Homo sapiens
ttttttttttttttgagaaaggggaatttcatcccaaataaaaggaatgaagtctggctccggaggagggtccccgacctcgctgtgggggctcctgtttctctccgccgcgctctcgctctggccgacgagtggagaaatctgcgggccaggcatcgacatccgcaacgactatcagcagctgaagcgcctggagaactgcacggtgatcgagggctacctccacatcctgctcatctccaaggccgaggactaccgcagctaccgcttccccaagctcacggtcattaccgagtacttgctgctgttccgagtggctggcctcgagagcctcggagacctcttccccaacctcacggtcatccgcggctggaaactcttctacaactacgccctggtcatcttcgagatgaccaatctcaaggatattgggctttacaacctgaggaacattactcgggggggccatcaggattgagaaaaatgctgacctctgttacctctccactgtggactggtccctgatcctggatgcggtgtccaataactacattgtggggaataagcccccaaaggaatgtggggacctgtgtccagggaccatggaggagaagccgatgtgtgagaagaccaccatcaacaatgagtacaactaccgctgctggaccacaaaccgctgccagaaaatgtgcccaagcacgtgtgggaagcgggcgtgcaccgagaacaatgagtgctgccaccccgagtgcctgggcagctgcagcgcgcctgacaacgacacggcctgtgtagcttgccgccactactactatgccggtgtctgtgtgcctgcctgcccgcccaacacctacaggtttgagggctggcgctgtgtggaccgtgacttctgcgccaacatcctcagcgccgagagcagcgactccgaggggtttgtgatccacgacggcgagtgcatgcaggagtgcccctcgggcttcatccgcaacggcagccagagcatgtactgcatcccttgtgaaggtccttgcccgaaggtctgtgaggaagaaaagaaaacaaagaccattgattctgttacttctgctcagatgctccaaggatgcaccatcttcaagggcaatttgctcattaacatccgacgggggaataacattgcttcagagctggagaacttcatggggctcatcgaggtggtgacgggctacgtgaagatccgccattctcatgccttggtctccttgtccttcctaaaaaaccttcgcctcatcctaggagaggagcagctagaagggaattactccttctacgtcctcgacaaccagaacttgcagcaactgtgggactgggaccaccgcaacctgaccatcaaagcagggaaaatgtactttgctttcaatcccaaattatgtgtttccgaaatttaccgcatggaggaagtgacggggactaaagggcgccaaagcaaaggggacataaacaccaggaacaacggggagagagcctcctgtgaaagtgacgtcctgcatttcacctccaccaccacgtcgaagaatcgcatcatcataacctggcaccggtaccggccccctgactacagggatctcatcagcttcaccgtttactacaaggaagcaccctttaagaatgtcacagagtatgatgggcaggatgcctgcggctccaacagctggaacatggtggacgtggacctcccgcccaacaaggacgtggagcccggcatcttactacatgggctgaagccctggactcagtacgccgtttacgtcaaggctgtgaccctcaccatggtggagaacgaccatatccgtggggccaagagtgagatcttgtacattcgcaccaatgcttcagttccttccattcccttggacgttctttcagcatcgaactcctcttctcagttaatcgtgaagtggaaccctccctctctgcccaacggcaacctgagttactacattgtgcgctggcagcggcagcctcaggacggctacctttaccggcacaattactgctccaaagacaaaatccccatcaggaagtatgccgacggcaccatcgacattgaggaggtcacagagaaccccaagactgaggtgtgtggtggggagaaagggccttgctgcgcctgccccaaaactgaagccgagaagcaggccgagaaggaggaggctgaataccgcaaagtctttgagaatttcctgcacaactccatcttcgtgcccagacctgaaaggaagcggagagatgtcatgcaagtggccaacaccaccatgtccagccgaagcaggaacaccacggccgcagacacctacaacatcaccgacccggaagagctggagacagagtaccctttctttgagagcagagtggataacaaggagagaactgtcatttctaaccttcggcctttcacattgtaccgcatcgatatccacagctgcaaccacgaggctgagaagctgggctgcagcgcctccaacttcgtctttgcaaggactatgcccgcagaaggagcagatgacattcctgggccagtgacctgggagccaaggcctgaaaactccatctttttaaagtggccggaacctgagaatcccaatggattgattctaatgtatgaaataaaatacggatcacaagttgaggatcagcgagaatgtgtgtccagacaggaatacaggaagtatggaggggccaagctaaaccggctaaacccggggaactacacagcccggattcaggccacatctctctctgggaatgggtcgtggacagatcctgtgttcttctatgtccaggccaaaagatatgaaaacttcatccatctgatcatcgctctgcccgtcgctgtcctgttgatcgtgggggggttggtgattatgctgtacgtcttccatagaaagagaaataacagcaggctggggaatggagtgctgtatgcctctgtgaacccggagtacttcagcgctgctgatgtgtacgttcctgatgagtgggaggtggctcgggagaagatcaccatgagccgggaacttgggcaggggtcgtttgggatggtctatgaaggagttgccaagggtgtggtgaaagatgaacctgaaaccagagtggccattaaaacagtgaacgaggccgcaagcatgcgtgagaggattgagtttctcaacgaagcttctgtgatgaaggagttcaattgtcaccatgtggtgcgattgctgggtgtggtgtcccaaggccagccaacactggtcatcatggaactgatgacacggggcgatctcaaaagttatctccggtctctgaggccagaaatggagaataatccagtcctagcacctccaagcctgagcaagatgattcagatggccggagagattgcagacggcatggcatacctcaacgccaataagttcgtccacagagaccttgctgcccggaattgcatggtagccgaagatttcacagtcaaaatcggagattttggtatgacgcgagatatttatgagacagactattaccggaaaggagggaaagggctgctgcccgtgcgctggatgtctcctgagtccctcaaggatggagtcttcaccacttactcggacgtctggtccttcggggtcgtcctctgggagatcgccacactggccgagcagccctaccagggcttgtccaacgagcaagtccttcgcttcgtcattggagggcggccttctggacaagccagacaactgtcctgacatgctgtttgaactgatgcgcatgtgctggcagtataaccccaagatgaggccttccttcctggagatcatcagcagcatcaaagaggagatggagcctggcttccgggaggtctccttctactacagcgaggagaacaagctgcccgagccggaggagctggacctggagccagagaacatggagagcgtccccctggacccctcggcctcctcgtcctccctgccactgcccgacagacactcaggacacaaggccgagaacggccccggccctggggtgctggtcctccgcgccagcttcgacgagagacagccttacgcccacatgaacgggggccgcaagaacgagcgggccttgccgctgccccagtcttcgacctgctgatccttggatcctgaatctgtgcaaacagtaacgtgtgcgcacgcgcagcggggtggggggggagagagagttttaacaatccattcacaagcctcctgtacctcagtggatcttcagaactgcccttgctgcccgcgggagacagcttctctgcagtaaaacacatttgggatgttccttttttcaatatgcaagcagctttttattccctgcccaaacccttaactgacatgggcctttaagaaccttaatgacaacacttaatagcaacagagcacttgagaaccagtctcctcactctgtccctgtccttccctgttctccctttctctctcctctctgcttcataacggaaaaataattgccacaagtccagctgggaagccctttttatcagtttgaggaagtggctgtccctgtggccccatccaaccactgtacacacccgcctgacaccgtgggtcattacaaaaaaacacgtggagatggaaatttttacctttatctttcacctttctagggacatgaaatttacaaagggccatcgttcatccaaggctgttaccattttaacgctgcctaattttgccaaaatcctgaactttctccctcatcggcccggcgctgattcctcgtgtccggaggcatgggtgagcatggcagctggttgctccatttgagagacacgctggcgacacactccgtccatccgactgcccctgctgtgctgctcaaggccacaggcacacaggtctcattgcttctgactagattattatttgggggaactggacacaataggtctttctctcagtgaaggtggggagaagctgaaccggcttccctgccctgcctccccagccccctgcccaacccccaagaatctggtggccatgggccccgaagcagcctggcggacaggcttggagtcaaggggccccatgcctgcttctctcccagccccagctcccccgccccgcccccaaggacacagatgggaaggggtttccagggactcagccccactgttgatgcaggtttgcaaggaaagaaattcaaacaccacaacagcagtaagaagaaaagcagtcaatggattcaagcattctaagctttgttgacattttctctgttcctaggacttcttcatgggtcttacagttctatgttagaccatgaaacatttgcatacacatcgtctttaatgtcacttttataacttttttacggttcagatattcatctatacgtctgtacagaaaaaaaaaaagctgctattttttttgttcttgatctttggggatttaatctatgaaaaccttcaggtccaccctctcccctttttgctcactccaagaaacttcttatgctttgtactaaagggcgtgactttcttcctcttttcccggtaatggatacttctatcacataatttgccatgaactgttggatgcctttttataaatacatcccccatccctgctcccacctgcccctttagttgttttctaacccgtaggctctctgggcacgaggcagaaagcaggccgggcacccatcctgagagggccgcgctcctctccccagcctgccctcacagcattggagcctgttacagtgcaagacatgatacaaactcaggtcagaaaaacaaaggttaaatatttcacacgtctttgttcagtgtttccactcaccgtggttgagaagcctcaccctctctttcccttgcctttgcttaggttgtgacacacatatatatatattttttttaattcttgggtacaacagcagtgttaaccgcagacactaggcatttggattactatttttcttaatggctatttaatccttccatcccacgaaaaacagctgctgagtccaagggagcagcagagcgtggtccggcagggcctgttgtggccctcgccacccccctcaccggaccgactgacctgtctttggaaccagaacatcccaagggaactccttcgcactggcgttgagtgggaccccgggatccaggctggcccagggcggcaccctcagggctgtgcccgctggagtgctaggtggaggcagcacagacgccacggtggcccaagagcccctttgcttcttgctgggggaccagggctgtggtgctggcccactttccctcggccaggaatccaggtccttggggcccaggggtcttgtcttgtttcatttttagcacttctcaccagagagatgacagcacaagagttgcttctgggatagaaatgtttaggagtaagaacaaagctgggatacggtgattgctagttgtgactgaagattcaacacagaaaagaaagtttatacggcttttttgctggtcagcagtttgtcccactgctttctctagtctctatcccatagcgtgttcccttt

SEQ ID NO: 89846 - DNA, 2959 bp, Homo sapiens
cacaaaacttgcctgtgatgtgtgggtgtgcgctgtgcacatgtccaagggagatagaggagatagtttgttctttgaaccacaccatgtgcgttaagaatcttctgctctctaattacacctgtggtggttgcatgggtgttctcggggtgacagcagtcaagtgtttcactcaggaagaaagctgtggaagcataggtagctggggtgctctctccctcacacaggtggagagaggattgttgatcttttattaatatctctcgttcattccagggcatgcttccaaatctgctccgatgaatggccactgctttgcagaaaatggtccatctcaaaagtccagcttgccccctcttcttattcccccaagtgaaaacttgggaccacatgaagaggatcaagttgtatgtggttttaagaaactcacagtgaatggggtttgtgcttccacccctccactgacacccataaaaaactccccttcccttttcccctgtgcccctctttgtgaacggggttctaggcctcttccaccgttgccaatctctgaagccctctctctggatgacacagactgtgaggtggaattcctaactagctcagatacagacttccttttagaagactctacactttctgatttcaaatatgatgttcctgggcaggcgaagcttccgtgggtgtggacaaatcaactatgcatattttgataccccagctgtttctgcagcagatctcagctatgtgtctgaccaaaatgggaggtgtcccagatccaaatcctcctccacctcagacccaccgaagattaagaaggtctcattcgggaccagctggctcctttaacaagccagccataaggatatccaactgttgtatacacagagcttctcctaactccgatgaagacaaacctgaggttccccccagagttcccatacctcctagaccagtaaagccagattatagaagatggtcagcagaagttacttcgagcacctatagtgatgaagacaggcctcccaaagtaccgccaagagaacctttgtcaccgagtaactcgcgcacaccgagtcccaaaagccttccgtcttacctcaatggggtcatgcccccgacacagagctttgcccctgatcccaagtatgtcagcagcaaagcactgcaaagacagaacagcgaaggatctgccagtaaggttccttgcattctgcccattattgaaaatgggaagaaggttagttcaacacattattacctactacctgaacgaccaccatacctggacaaatatgaaaaattttttagggaagcaaaaaaaaaaaatggaggcgcccaaatccagccattacctgctgactgcggtatatcttcagccacagaaaagccagactcaaaaacaaaaatggatctgggtggccacgtgaagcgtaaacatttatcctatgtggggactccttaaaccttggggtcatggttcagcagaggttacataggagcaaatggttctcaattttccagtttgattgaagtgcagagaaaaatcccttagattgcaaaataaaatagttgaactctctgtcttcatgtggaaggtttagagcagttgtgagatgctgttatgctgagaaaccctgactttgttagtgttggaaaaaagtcttacaagtctataatttaaagatgtgatggtggggaggggaggatggggaagctttttatatatgcatacattacatacctatatataaacttgtggtataaccatagaccatagctgcaggttaaccaattagttactatcgtagagtaatatatattcagaataataaactcaagctggagaaatgagtcctgatagactgaaaattgagcaaatggaagaagatacagtattgtttagatcagaatcattaaaaaatatttttgtttagtaagtttgaagatttctggcttttaggccttttctattttgttccatttatttttgcaggcaatcttttccatggagggcagggtatccattctttaccatgggtgtacctgcttaggttaaaaatcataccaaggcctcatacttccaggtttcatgttgcgtcttgttgagggagggagagcaggttacttggcaaccatattgtcacctgtacctgtcacacatcttgaaaaataaaacgataatagaactagtgactaattttcccttacagttcctgcttggtcccacccactgaagtagctcatcgtagtgcgggccgtattagaggcagtggggtacgttagactcagatggaaaagtattctaggtgccagtgttaggatgtcagttttacaaaataatgaagcaattagctatgtgattgagagttattgtttggggatgtgtgttgtggttttgcttttttttttagactgtattaataaacatacaacacaagctggccttgtgttgctggttcctattcagtatttcctggggattgtttgctttttaagtaaaacacttctgacccatagctcagtatgtctgaattccagaggtcacatcagcatctttctgctttgaaaactctcacagctgtggctgcttcacttagatgcagtgagacacatagttggtgttccgattttcacatccttccatgtatttatcttgaagagataagcacagaagagaaggtgctcactaacagaggtacattactgcaatgttctcttaacagttaaacaagctgtttacagtttaaactgctgaatattatttgagctatttaaagcttattatattttagtatgaactaaatgaaggttaaaacatgcttaagaaaaatgcactgatttctgcattatgtgtacagtattggacaaaggattttattcattttgttgcattattttggatattgtcttttcattttaataaagttatcatacttatttatgattaaaaaaaaaa

SEQ ID NO: 89847 - DNA, 2058 bp, Homo sapiens
atggaggctgagaagtccaaggtcaagggggccacacctggtgtgagctttcttggggctgcatctggtggaagccttcttgctggtaagaactctgcagagtcccaaggcagcacaaggcctcacatgatggaccacacatccccgacctacatgcttgctaacttaacccacttgcattctgaacaacttctgcagggcttgaatcttcttcgccaacatcacgaactctgtgacatcattcttcgagtaggtgatgttaaaattcatgctcacaaagtggtacttgccagcgtcagcccgtatttcaaagctatgttcactggaaacctttctgaaaaagagaacagtgaggttgagtttcaatgcattgatgaaactgctctccaggccattgtggagtatgcctatacagggactgtttttatttctcaggacacagttgaatctctcctgccagcagcaaacctactccagataaaacttgtcctgaaagaatgttgtgcatttcttgaaagccaacttgatcctggtaattgtattggaatttctcgttttgcagaaacatatggttgccgtgacctttatttggcagccactaaatacatatgccagaattttgaagctgtttgccagactgaagagttttttgagcttacacatgctgacttggatgaaattgtttccaatgactgtttgaatgtagctaccgaagagactgttttttatgcattagagtcttggatcaagtatgatgtacaagaacgccagaaatacttagcacagttactaaacagtgtacgattaccattgttgagtgttaagtttctcactagactatatgaagcaaatcatcttattcgtgatgatcgcacttgtaaacatcttttgaatgaagccctaaagtaccactttatgcctgaacatagactctctcatcagacagtcttgatgacacgacctcgctgtgctcccaaagtactttgtgcagtaggagggaaatctggactctttgcctgtttggatagtgtggagatgtactttcctcagaatgactcttggattggtttggcacccctaaacattcctcgctatgaatttggaatatgcgttttagaccaaaaagtatatgttataggtggtattgcaactaatgtgcgtcctggcgtcactatcagaaaacatgaaaattcagtggaatgctggaatcctgatacaaatacttggacttctctagagagaatgaatgaaagccgaagtactcttggagtagtagtacttgcaggagaactttatgccttaggtggttatgatggacaatcttatttacaatctgtagagaagtacattcccaaaataagaaaatggcaacctgtggcaccaatgacgacaacaagaagttgttttgctgcagcggtattggatggaatgatatatgccattggtgggtatggtcctgcccacatgaacagtgtggagcgttatgatccaagtaaggactcctgggagatggttgcatccatggccagataaaaggattcactttggcgtgggtgtccatgctaggctttatttttgtgggtgggtggacataatggagtctccacatttggcccagcattgaaagatacgatcctcatcaaaatcagtggactgtgtgtagacccaatgaaagaacctagaacaggagttggtgctgctgtaatcgataactacctttatgtcgtcggtggtcactcagggtcttcctatctgaatacagtgcagaaatatgatcctatctcagatacgtggctggattcagctggcatgatatactgtcgctgcaactttgggttaactgcactttgacaaatgtgaactctcggaaatagtatggtggtgaaacttgtactgcatgaacatccggatggcccagttttctgaacccacaagctgcattgctttctttttaacttgaagtagcatgaaggctcaaaagttttgttgggtacttttaattgagaagtagttttggttgctcttgattacacagtaaatcaataatcaaaaaaaaaa

SEQ ID NO: 89848 - DNA, 1902 bp, Homo sapiens
ttttttttttttcttttttttgcacctgcacagtaggaaagcaacatggagtagctcaggcaaaggacccgcctccataataaaaggctgggatgggggctgccagagattcgcactctatgctgatggcacacctggtcttaactgttttttcacaccctatgtaggtaaaatactgcctccccactaggtcacttataaaaactgtcaggcctctgagcccaagccaagccatcgcatcccctgtgacttgcacgtatacgcccagatggcctgaagtaactgaagaatcacaaaagaagtgtaaatggccggtccttgccttaaccgatgacattcccccacaaaagaagtgaaaatggccggtccttgccttaagtgatgacattaccttgtgaaagtccttttcctggctcatcctggctcaaaaaccttccttactgagcacctcgtgacccccactcctacccgccagagaacaaacaccctttgaccgtaattttcctttacctacccaaatcttataaaacagccccacccctatctcccttcactgactctcttttcggactcagcccgcctgcacccaggtgaaataaaagctttattgctcacacaaagcctgtttggtggtctcttcacacggacgcgcatgaaagggacatgcatgaaatttggtgccgtgactcagatcgggggacctcccttaggagatcaatcccctgtcctcctgctctttgctccgtgagaaagatccacctacaacctcaggtcctcagaccgaccagcccaagaaacatctcaccaatttcaaatcgggtttcaaaggtgtcagaccactcagggacgcctgccttggtccttcacccttagcggcaagtcctgcttttctgggggaggggcaatcccaaccccaagtgtcgctgagtctttccagtcttccttttctacagacccatctgacctttcccctcctccccagcctgctcatcgccaggccgagctaagtcccaattcttcctcagcctccactcctccaccctataatcctcctaccacctcccctcctcacacccggtccggcttacagtttagttccgcaactagctcttccccacctgcccaacaatttcctcttagagaggtggctggagctgaaggcatagtcaacgcacatgtacctttttctctatcagacctctctcagatcagtcaggatttaggctctttctcatcagaccccactaaatatatacaggaattccgatatctaactctgtcctacaacttaacctggagtgacctaaatgtcatcctgacttctaccctctccccagatgaacgggaaagagtttttcctgtatcccaatctcacgctgataaccgtcggcttcatgagccagacctccaggaaggcattagagcagttctctatagatcccaatgactataggcagttcccaggatcttgctttaagtgccagaaatctggccactgggccaaggaatgcctgcagcccaggattcctcctaagctgtgccccatctgtgtgggacttcactggaaatcggactgtccaactcaccaggcagccactcccagagcccctggaactccggcccaaggctctctgactgactccttcccagatcttctcggcttagcggctgaagactgctgctcggttgcctcggaagccctatagaccatcacggatgctgagctttaggtaactctcacagtggaaggtaagcccgtccccttcttaatcaatatggaggctacccactccacattaccttcttttcaagggcctgtttcccttgcctctgtaactgttgtgggtattgatagccaggcttctaaacctcttaaaactccccaacgaattccaccacact

SEQ ID NO: 89849 - DNA, 2928 bp, Homo sapiens; identical to SEQ ID NO: 61009

SEQ ID NO: 89850 - DNA, 3654 bp, Homo sapiens; identical to SEQ ID NO: 60838

SEQ ID NO: 89851 - DNA, 5332 bp, Homo sapiens
cttcattctctcatccagctcctcggcctcatcggaacatttccaccaccattactcctttggaaactggtggcccggttccttcaaggggcacaggatgtctttgcctttttatcagaggtgccaccagcactatgatctcagctaccgcaacaaggacgtgcgcagcaccgtgagtcactaccagcgggagaagaaacgctccgccgtctacacccagggctccacggcctacagcagccgctcctccgccgcgcaccgccgggagtccgaggccttccgtcgggcgtccgcctcctcctcccagcagcaggcctcgcagcacgccctgagctctgaagtcagtcggaaggcagcctcagcctacgattatggctcctcccatggacttacagattccagtctgctgttagatgattattcatccaagttgagccccaaaccaaagagagccaagcacagcctactgtctggagaagagaaagaaaatttgcccagtgactacatggtacccattttctcaggacgtcaaaagcatgtcagtggaattactgatacggaagaagaaagaattaaggaagctgctgcttatatagcccagaggaatcttcttgctagtgaggaaggaatcacaacacctaaacagtccacggcatccaagcagaccacggcatctaagcagtccacggcatccaagcagtccacagcatccaagcagtccacggcatccaggcagtccacggcatccaggcagtctgtggtttccaaacaggccacatccgctcttcaacaggaagaaacttctgaaaagaagtcaaggaaagttgtgattcgaggaaaggcagaacgcctgtccctgaggaaaacattagaagaaaccgagacatatcatgccaagctgaatgaagaccatcttctccatgctcctgagtttatcattaaacctcgctcccacacggtttgggagaaggagaatgtaaaattgcattgctccatagcaggatggccagaacctcgtgtcacgtggtataaaaaccaggtgccaataaatgtccatgcaaaccctggaaagtatattattgagagtcgatatggaatgcacactctggagattaatgcatgtgattttgaagatacagctcagtaccgggcctcggcgatgaatgttaaaggagagctttcggcatatgcttcagttgtggtaaaaaggtataagggagagtttgatgagactcgcttccatgctggggcttccaccatgcccctcagctttggtgtgaccccatatggttatgcatcccggtttgagatccactttgatgacaaatttgatgtgtcttttgggagagagggagagacaatgagtctaggctgtcgtgttgtcatcactcctgaaattaaacatttccagccagagatccagtggtacagaaacggagtacctctttctccatcaaaatgggtgcaaacactttggagtggagagcgggcaacgctgacattttcccatctcaacaaagaagatgaaggcctctatacaatccgtgtacggatgggagaatattatgaacaatatagtgcttatgtctttgttcgagatgctgatgcagagattgaaggagccccagctgctcccttggatgtgaagtgcttggaggccaacaaagattatatcatcatctcctggaaacagccagctgtcgatggagggagtcctattctcggatattttattgataagtgtgaggtgggcacagatagctggtcgcagtgcaatgacacacctgtgaagtttgctcgttttcctgtcactggattgatcgaaggtcgttcctatatcttccgagttcgagctgtgaataaaatgggaataggtttcccatctcgagtttccgagcccgtggctgctctggatccggctgagaaagctagacttaaaagtcgcccctcagcaccctggactggacagatcattgttactgaagaggaaccttcagagggtattgtgcctggccccccgacagacctctctgtcactgaggccacccggagctatgtggtgctcagctggaagccccctggccagcgtggtcatgagggcattatgtactttgtggaaaagtgtgaggcaggaacagaaaactggcagcgagtgaacacggagctccctgtgaagtctccccgctttgctctgtttgacttggccgaggggaaatcctactgtttccgtgtccgctgttctaattctgcaggagttggtgagccctcagaggcaacggaggtgactgtggtaggggacaaacttgatatccccaaggctcctggcaaaatcatcccaagcagaaacacagacacctcagtggtagtttcgtgggaggagtccaaagatgccaaagagctggtcgggtactacatagaggcaaacgttgctggctctggcaagtgggagccctgtaacaacaaccccgtgaaaactcaccgattcacttgtcatggattagtgactggtcagagttatattttccgggtcagagcagtcaatgcagctggacttagtgaatattcccaggattcagaagctattgaagtcaaagctgctattgcaccaccatctccaccctgtgatatcacctgtcttgaaagttttcgtgactcaatggttcttggatggaagcaaccagataagattggaggggcagaaattactggctattatgtgaactatcgcgaggtcattgatggggtaccaggaaaatggagagaagccaatgtcaaggctgtcagtgaggaggcatacaagattagcaacttgaaggaaaacatggtgtatcagttccaagtggcagccatgaacatggctgggctgggcgcgccctccgcagtaagcgaatgcttcaaatgtgaagagtggaccatcgccgtcccaggaccaccgcacagtctcaagtgtagtgaagtcaggaaagactcactggttctccagtggaagccgccagtccactccgggcggactccggtcactggttacttcgtggacttgaaggaggccaaggccaaagaagaccagtggcgagggctcaatgaggcggctattaaaaacgtatacctgaaggttcgaggcctcaaggagggcgtcagctacgtgttccgtgttcgagccataaaccaggcgggagttgggaagccatctgaccttgctggccctgttgtggcagagacccgtccaggaaccaaagaggttgttgtaaatgtggatgatgatggagtcatttcattgaacttcgagtgtgataagatgactccaaagtccgagttctcctggtccaaagattatgtatccactgaggactctccacgattggaagtcgaaagcaagggcaacaagacgaaaatgaccttcaaagaccttgggatggatgacttgggtatttactcttgcgatgtaacagacactgatggaatagcatcaagctacttaatagatgaggaagaattgaaacgtttacttgctctcagccatgaacacaagttcccaactgtcccagttaaatcagagttggcagttgaaattttggagaaaggccaggtccggtttttggatgcaggctgagaaactgtctggcaatgccaaagtcaactacatatttaacgagaagggaatttttgaaggcccgaaatataaaatgcatattgaccgaaacactggcatcatcgaaatgttcatggaaaagctacaggatgaggatgagggaacgtacactttccagcttcaagatggaaaagcaactaaccattctactgttgttctcgttggagatgttttcaaaaagctccagaaagaagctgaattccagcggcaagaatggatcaggaaacaaggtcctcactttgttgagtatttgagctgggaagtgactggtgaatgtaatgtactattgaaatgcaaggtggcaaatattaagaaggagactcatattgtgtggtacaaagatgagagggagatatcagtggatgaaaagcatgactttaaggatggtatatgtaccctgcttataacagagttttccaagaaagatgctgggatttatgaagttatcctgaaagatgaccgaggaaaagataagagcagactgaagcttgtggatgaagcctttaaggaactgatgatggaagtatgcaaaaaaatagctttgtctgctacagacctgaaaatccagagcacagccgagggcatccaactgtactcttttgtaacttactatgtggaggatttgaaagttaactggtcccacaatgggtccgccattaggtactcagacagagttaagaccggggtcactggagagcagatctggctacaaatcaacgagcccaccccgaatgacaaagggaagtatgtcatggagctctttgatggcaaaactggacatcagaagacagtggatctctctggacaagcatacgatgaggcttatgctgaattccagaggttgaaacaagctgccattgccgagaaaaatcgtgcccgggtgttgggaggtctcccagacgtggtcaccatccaggaggggaaggcccttaatctcacttgcaacgtgtggggagacccgcctccggaggtgtcgtggttgaagaacgagaaggccctggcctcagacgaccactgcaacctcaagttcgaggctgggaggaccgcgtacttcaccatcaacggcgtgagcaccgctgactcgggcaaatacgggctggttgtgaagaacaagtatggctcggagaccagcgacttcaccgtcagcgtgttcatcccagaggaggaggcgaggatggccgccttggagtccctgaaaggcggcaagaaggccaagtgaccggaggtgcgaggagagccagccggcctgtgtgacttgggtgtgaatggtttgggttaaggatgagacgtcttcatgctttctcctccctattattttctggcttgaggggaaaataatgtcaggtctttcactcatataaaaaagcaccaactaatgacactttaattgtttttctttatctacaaaattatgtgttaagaaaataccattcatagcatgaagattaggaaacagttttaaggagaagacttgaatgaagttggagggacattgaatgatggtcagagggcagacgaatgtgtcgtggggcgaattgggatttgctgcagctgtgaagccatggccgtgtctcgtgtgttgttacagaggtgatgtgcttttcgacgggcgcctcgtggcttggaacctcctctgtatgaataaacagttttcacgtctgtcctcttccccgaaaaaaaaaa

SEQ ID NO: 89852 - DNA, 3898 bp, Homo sapiens
ttttttttttttcattttataatgcgctttatttgattaaagaatttgccttctttgtatacactggaatgttatattccctatgtattttacagggttacaaaatgtctctcattttaaatattaccccaaaagtaatctcagaaaaaaaaggttttttgaaattaaacttgacttttaaaaaatcatacggacaaacaactttcaaacaaaactggattagtaggatttcttgcctgcttaactaacatgacagacttcttgtcccaagcccttctcagaaaaacctcatgtggaaaccaagctagagataagaattcttccctgatgcagttaggggaaagggaaaggctagaaacttctttggcaagcaattccacacacagccatttatgtgtgagtgctctgcttcaagcacagtacactctttgcagggacggccagatgttcagagtgggagtggtacttttcaaccagctaaaagtgcagaagtcatctagtcgtctgcctcttcccactgccagtgcctgcagccttgcagcaacttttaaccacccctatggactggaatattgagttaaaagccaaggctgagctggctgacgctgtagtctccattgaaaaggaaatggatgagatggaaccgagaaaccaccagtacatgatgacactcaaaagacttagggggaaagagaaggaaggatttcagagatggggacagactggtggaaaatgttgggctgactggaaggaaatggggtatacgtgagtaatatgtacatatcgaaacaatcagttgcctcctgaaatgcaaaaaatcaaatggtgaaatggagcctccttgatagtttagggccaacaggattggcaaagactccctgaacccacagccttcaaaatcataaccccatttctgttagaaaggaggggactgatgacagagagtgcagtctggaagagggaggtggtgaaactgaggaatgtgaatggattacagactgtggccattacgttttagcttaagtacccaaaatgtggagaaatgaaaatttgggtagcaacagcagcagacatgattacatgtggatgtgaaatccctaactggacagacataaccattcttttagacatcttgaagagggactgtgccatttgaaaggtgcttctcagctatctttaatattgacacaagtgggattcatggtactgttctaaactggaaggacaggccctgaaaggaaaacaacttggcaaagagatgaaggaatgaattgatacgggaaaagaacagaagacatgcttatcttttaacttctagaccccatacccctcaaatagttcacctgaatagtccaaaaatcaagaatgggttagatatacttgttccaggagtgccaaataaatataatgcctgtaaacagatgatcccagtgcctgactgaatgtatagaaagaaaaacctaaaggtaaagggtatgaatgattaaaattttctacagagaaaactttttaaaaacaaacctaagtatgaaatataactatatttagggattatatttagggattaaaataaaggagcagctgggcatggtggctcatgcctgtaatcccaacactttgggaggctgaggtgggcggattgcatgagctcaggagttcgcgaccagcctgggcaacacggtgaaaccccgtctctactaaaatacaaaaaattagccaggcgtggtggcgtgcacctgtagtcccagctactcggaggctgaggcaggagacttgcttgaacccaggaggcggaggttgcagtgagctgagatcatgccattgcattccagcctgggttacaaagtgagactccatctcaaaaaataataataataataataataataaaataaaaataaaggagcaacttaggtaaaggtagaggaggtatttaactgggggcattctctggagagcttgctttcctgctggccaatacaatctgccaaagaaaattagcagcctttccctttatgtttgtgccatttccttatcaaagaatgtctctgtgacactgaaacatggggggtgagtcgaggggtccttgcgcgcagagaaatcgtgcattgtatcaggaaaaaaggggtctcccaatgggcttgtaaaatctgggaaaaaaattctttcagcccatcattgggggtcttcttttatttaatcccgaaaattttccttttcagctcccctcttcttggtgataacaaaaatttccatacttatcccactaggaaagtggtcctctgtggaaaaacctgacggggctgtttcccatctacccgggtcactttggtaacctgtatgttacagtaatttttcttggagacaaaggaaacttgaacagggaagaagtcattgggctgcccagcaatgctaaactccaggctgccactcttatttttggcatcaatcacaggcaggcaccactccagggtatttcgtcgactgtcatgtcgatactccccatcgatctcaccgataacaggcgcgccgacaccagacgggagtgggatggtgataaccacatcattcagttctaaattatcttcttgtagctcatattctatgttgacatcacagccatttccactctccgagggccagcaattaattgtcagtggaataaaagattcctctgtggtttgtagtctccactttagcacccctacgtcactgttgactggaaatgacttctctggattcttcaggccaattagagactctgcagtgaaaagttttttatccacatttggatgggtctgtagctgcacccctttcttatcttcattttccacatgaagacgaattcggccatacttgtcatctgagatcctaagcatgatcatgccatgcaactccatattctgtaatcctccgtctcgtccacaggttaatgttatcttttcttcaatcttcatatgtacactttccatattaatgggtggagcatgcattttggttgcttcagaagtacgcttgcccatactagaggacatgatggtttcaccttcagattttaatttgtccacaaagttatctacttcctttcctttggctccaagttttaaagccttgctggggcctgaaggcctggctggtgcaggtgccacttttggtttatcagtttcaatgatggtctctgtgatcatggcagctgtgctgcctccagatactgcagagctgccaaatccgccaaatcctggtgcttttttgccctgtctctctgcatctcttcgggcctgttgtaattcctttgctttacgacgcatctcagccttagcttcacgttcttgagtctctctgacggctctgaacaccttctcctcatgagaatccatttctgtgaaggttttgatctgtgccaagttaacattctcccggtatcccagtgcgacaatttcatcaaaagcaaaaatcaaatcaaaacagtgctcagatatttcattctcttctaaggctcggcaatattcagggatcactcttgagaagagccttagggtctccaaatcttctaaaatgttgctgtttttggtagtgatcagtaccatatacagtttctccataggctggtagacatatcttacactctctgtttcaacaaacgtatgttgttttccagtgttcatgagctttggaaaagctgctaataagccctcaatccgagttcgggtcatttccacaaactgtcgagaaacaatagcctttcctgcttttgtgcagaccgctgctgccaacagcaccatggtgagggcggtggtggggcgcgcccgcactccggctccactggggataggggtagggtctggggaacgggagcaccagcagctctggacctgctgcccccttgacaggaaccgct

SEQ ID NO: 89853 - DNA, 3028 bp, Homo sapiens; identical to SEQ ID NO: 61163

SEQ ID NO: 89854 - DNA, 5890 bp, Homo sapiens; identical to SEQ ID NO: 60776

SEQ ID NO: 89855 - DNA, 359 bp, Homo sapiens
gtacttattctggtatcagaactcacacttcacttattacagaaggaaaaagaaatttgtttcctaaacttgctttgccccattaccttgtaatctagaccctttggtaaaatttgcatttttgataactacagtaatgttcattttacttgcctgcatctgggctctacttagagaatatcacataatattacataatctgacaattggtaccagtttaaatccatcaacgtcaactacaagtaagccctctactctactttaaaaatctcttcccatttcttcagtcaacagtttttctgtttttcacaatgcctatgtcagatagaaattttcccttctaccatatatctcctcac

SEQ ID NO: 89856 - DNA, 4690 bp, Homo sapiens
ccagcacggacatggcctcgcgcggcgcccgcccgggcccgagtcccccgcgccccgctttgtagccccccggcggagaggcggcctcgacggtgcggacggcgcagacggccgggcgggcggcatggaggcggcgcatctgctcccggccgccgacgtgctgcgccacttctcggtgacagccgagggcggcctgagcccggcgcaggtgaccggcgcgcgggagcgctacggccccaacgagctcccgagtgaggaagggaagtccctgtgggagctggtgctggaacagtttgaggacctcctggtgcgcatcctgctgctggctgcccttgtctcctttgtcctggcctggttcgaggagggcgaggagaccacgaccgccttcgtggagcccctggtcatcatgctgatcctcgtggccaacgccattgtgggcgtgtggcaggaacgcaacgccgagagtgccatcgaggccctgaaggagtatgagcctgagatgggcaaggtgatccgctcggaccgcaagggcgtgcagaggatccgtgcccgggacatcgtcccaggggacattgtagaagtggcagtgggggacaaagtgcctgctgacctccgcctcatcgagatcaagtccaccacgctgcgagtggaccagtccatcctgacgggtgaatctgtgtccgtgaccaagcacacagaggccatcccagaccccagagctgtgaaccaggacaagaagaacatgctgttttctggcaccaatatcacatcgggcaaagcggtgggtgtggccgtggccaccggccctgcacacggagctgggcaagatccggagccagatggcggcagtcgagcccgagcggacgccgctgcagcgcaagctggacgagtttggacggcagctgtcccacgccatctctgtgatctgcgtggccgtgtgggtcatcaacatcggccacttcgccgacccggcccacggtggctcctggctgcgtggcgctgtctactacttcaagatcgccgtggccctggcggtggcggccatccccgagggcctcccggctgtcatcactacatgcctggcactgggcacgcggcgcatggcacgcaagaacgccatcgtgcgaagcctgccgtccgtggagaccctgggctgcacctcagtcatctgctccgacaagacgggcacgctcaccaccaatcagatgtctgtctgccggatgttcgtggtagccgaggccgatgcgggctcctgccttttgcacgagttcaccatctcgggtaccacgtatacccccgagggcgaagtgcggcagggggatcagcctgtgcgctgcggccagttcgacgggctggtggagctggcgaccatctgcgccctgtgcaacgactcggctctggactacaacgaggccaagggtgtgtatgagaaggtgggagaggccacggagacagctctgacttgcctggtggagaagatgaacgtgttcgacaccgacctgcaggctctgtcccgggtggagcgagctggcgcctgtaacacggtcatcaagcagctgatgcggaaggagttcaccctggagttctcccgagaccggaaatccatgtccgtgtactgcacgcccacccgccctcaccctactggccagggcagcaagatgtttgtgaagggggctcctgagagtgtgatcgagcgctgtagctcagtccgcgtggggagccgcacagcacccctgacccccacctccagggagcagatcctggcaaagatccgggattggggctcaggctcagacacgctgcgctgcctggcactggccacccgggacgcccccccaaggaaggaggacatggagctggacgactgcagcaagtttgtgcagtacgagacggacctgaccttcgtgggctgcgtaggcatgctggacccgccgcgacctgaggtggctgcctgcatcacacgctgctaccaggcgggcatccgcgtggtcatgatcacgggggataacaaaggcactgccgtggccatctgccgcaggcttggcatctttggggacacggaagacgtggcgggcaaggcctacacgggccgcgagtttgatgacctcagccccgagcagcagcgccaggcctgccgcaccgcccgctgcttcgcccgcgtggagcccgcacacaagtcccgcatcgtggagaacctgcagtcctttaacgagatcactgctatgactggcgatggagtgaacgacgcaccagccctgaagaaagcagagatcggcatcgccatgggctcaggcacggccgtggccaagtcggcggcagagatggtgctgtcagatgacaactttgcctccatcgtggctgcggtggaggagggccgggccatctacagcaacatgaagcaattcatccgctacctcatctcctccaatgttggcgaggtcgtctgcatcttcctcacggcaattctgggcctgcccgaagccctgatccctgtgcagctgctctgggtgaacctggtgacagatggcctacctgccacggctctgggcttcaacccgccagacctggacatcatagagaagctgccccggagcccccgagaagccctcatcagtggctggctcttcttccgatacctggctatcggagtgtacgtaggcctggccacagtggctgccgccacctggtggtttgtgtatgacgccgagggacctcacatcaacttctaccagctgaggaacttcctgaagtgctccgaagacaacccgctctttgccggcatcgactgtgaggtgttcgagtcacgcttccccaccaccatggccttgtccgtgctcgtgaccattgaaatgtgcaatgccctcaacagcgtctcggagaaccagtcgctgctgcggatgccgccctggatgaacccctggctgctggtggctgtggccatgtccatggccctgcacttcctcatcctgctcgtgccgcccctgcctctcattttccaggtgaccccactgagcgggcgccagtgggtggtggtgctccagatatctctgcctgtcatcctgctggatgaggccctcaagtacctgtcccggaaccacatgcacgaagaaatgagccagaagtgagcgctgggaacagggtggagtctccggtgtgtacctcagactgatggtgcccatgtgttcgcctccgccccccacccttgccaccacactcgcccacttgcccaccgggtcccgccggataaatgacaggcccgaggtcagaatggccatccccgggccccgtcctggggtctctgtccccacttccttctggcctgggaggtctgtaattcctgtctcctggactctcctgggaagttccctgctctgcagctctggcccaggagctgcaggctgggagggggcagccaagaagccggagctggcagcatacccagagatccggggcccccccacccccaaatcacgagtgcagctggagcttgctcccccttgttcggaagctggacgttcacttggtgactggtgcctctgcactgacggaggactctgggggtcccttccttaacggctctgacctctctcttcgttccctggtctgggactggggtcaagcccctggggggatcaagaaagggcccatctgggccccagctgtgtaacagccgagggtgggcagcccccctccactccactctgcttcccacaaagtcggctcccgaagagctcgaggctgcttctgtttatatgtgcagggcccgggcgggtgaagggtcagagagacggacacaaggagccggcaggagggcggagcgaggatgtcctttcccgggagacaagtcgggaaagccctggctggactgcctcagccccgcgcgcctcctggactcagggttccccgtcctgagctcgggagatgttcagagtcacacttgccgcccggtactgccacgcagaggtccaacttgccacccgcgtccctggtacctgagaccaccgacatcctcaggttcctgaccgtggcgcccttctacccagcccagtgtgcggccgccgcgctgtctgcacagctgggggcctctgagcctggtgggcttcctggactcttggcctcactccttgccccctccccacgacacccatgagccgaaaggatgtcactaaggatggctgattccccaagggcacccgctctccctccctccctgctggaggaacacgtcatatcagatgagaggaagatggcctctgatggacagaatttttctcttaactcagcttttgctactttggcaaaaactagcgaggggtagcagaaacctgcaccaaggattgtccctatgtcttggcccctcctagagcgtgtgcagactgatgattttatatgtaaatcaagactcacatccctttcctagtcccccacatccaaagcccctcagcctgccttgcagaccaatgggctggatgttctgtagccccctcccctacgcctcacccctcctccctctcacaggttctgggcggccagtgagagaaacgcagtgggggaggcagggagtctggtgcctgcagagattctctgcttctttcctggggggaggtggggaggtcttagcaggagcgggccctgtacccacctgctgacctgctgtttggtagagaaataaaggttgtgtgactggggg

SEQ ID NO: 89857 - DNA, 3892 bp, Homo sapiens; identical to SEQ ID NO: 61034

SEQ ID NO: 89858 - DNA, 2526 bp, Homo sapiens; identical to SEQ ID NO: 60805

SEQ ID NO: 89859 - DNA, 347 bp, Homo sapiens
ccacagtttctttttttcatgctaagagatattcagaaatatccctgggtttataggtctgactccaattttaatgtgtgttccctatggcttgaaaaaagaatcttaaattggaatatacttttcctttgcctttgggattaaaaaaacataatttttcttataaattaaataatgatcccctaatacttatgatgagtcctaaatttgactggcaggcagctagaaaggatataaataatttgagatgatataatatttgtgaagtcagtggcaccagcacagttaaaccctcctccccaaactacagctttgttctcattagagaaatgacccttttgtattgt

SEQ ID NO: 89860 - DNA, 1648 bp, Homo sapiens
gaccgcagaccctgattacgtcaagcttggcacgaggctcgactcttagcttgtcggggacggtaaccgggacccggtgtctgctcctgtcgccttcgcctcctaatccctagccactatgcgtgagtgcatctccatccacgttggccaggctggtgtccagattggcaatgcctgctgggagctctactgcctggaacacggcatccagcccgatggccagatgccaagtgacaagaccattgggggaggagatgactccttcaacaccttcttcagtgagacgggcgctggcaagcacgtgccccgggctgtgtttgtagacttggaacccacagtcattgatgaagttcgcactggcacctaccgccagctcttccaccctgagcagctcatcacaggcaaggaagatgctgccaataactatgcccgagggcactacaccattggcaaggagatcattgaccttgtgttggaccgaattcgcaagctggctgaccagtgcaccggtcttcagggcttcttggttttccacagctttggtgggggaactggttctgggttcacctccctgctcatggaacgtctctcagttgattatggcaagaaatccaagctggagttttctatttacccgggcaccccaggtttccacagctgtagttgagccctacaactccatcctcaccacccacaacaccctggagcactctgattgtgccttcatggtagacaatgagggcatctatgacatctgtcgtagaaacctcgatatcgagcgcccaacctacactaaccttaaccgccttattagccagattgtgtcctccatcactgcttccctgagatttgatggagccctgaatgttgacctgacagaattccagaccaacctggtcccctacccccgcatccacttccctctggccacatatgcccctgtcatctctgctgagaaagcctaccatgaacagctttctgtagcagacatcaccaatgcttgctttgagccagccaaccagatggtgaaatgtgaccctggccatggtaaatacatggcttgctgcctgttgtaccgtggtgacgtggttcccaaagatgtcaatgctgccattgccaccatcaaaaccaagcgcacgatccagtttgtggattggtgccccactggcttcaaggttggcatcaactaccagcctcccactgtggtgcctggtggagacctggccaaggtacagagagctgtgtgcatgctgagcaacaccacagccattgctgaggcctgggctcgcctggaccacaagtttgacctgatgtatgccaagcgtgcctttgttcactggtacgtgggtgaggggatggaggaaggcgagttttcagaggcccgtgaagatatggctgcccttgagaaggattatgaggaggttggtgtggattctgttgaaggagagggtgaggaagaaggagaggaatactaattatccattccttttggccctgcagcatgtcatgctcccagaatttcagcttcagcttaactgacagatgttaaagctttctggttagattgttttcacttggtgatcatgtcttttccatgtgtacctgtaatatttttccatcatatctcaaagtaaagtcattaacatca

SEQ ID NO: 89861 - DNA, 3963 bp, Homo sapiens
ttttttttttttacgctgcaaacattttaatgattattgttgagcatacattttggaaattttttacttcaaacggcaacaagttaaataaatgtttataatatacaaagaaaatacaaccgaaagtaaaactcgctgtaagtgtgccttgcacttagaccaggttttccccccttaatacatctttatttttgagctgcaaacacacttaagactttgatcttcatagtatggcatttaggaaataaaaatatactcccaccttaaagaaataaaaagtttggtgcatgattatatgccaaacaaagagagaacactagaatactcttgatagtgcaggcatcattaaaaaggaaaagaaaaagcttgagatgctcattaattctctatgttttaaggaagcaggatttttgaccaagtagcttaaaagccagcaaaacagggatcagtgacagcaactgtagtgtatggagtatgaaatgacaaactttacacaaatacactgttagaaatttaccagtgaacactgaagatctgagaagctgctctttggaacagtcaagtgggaccaccttattccagtcacataagcccttgtaaagtaacacagtgttctgtgctatatacttgctggctgggtagttacaggatttgttttgtcattagcagctaaaaaacttattccacatgttcttaaagccttaatggtggaaaaaaaggcaagtgtcattagcatggtggatcatatacttctctgcacacaaacacaagaggcttcactagtatttttaaagtctctgatgtctcccattgcacttcaaagctcaattgagatgaaagcctttctccattgtagcagctagcaggcgctctctcatgatctcctcggaagaatattcaggcaacttaaggtaatgcacacatgtattgactgatggatagcttgcatcagtagcatcaaccttgcgtacaaccgtgagcctgggatgcaggttagccagtccacctgggggtagagttgaacaaccagtggtaaactgcaagaatgctttcctttcatcagaagacatgccacataaaaccctcacaaacctcaggaaaccagggctgtcacgtgtataacccagcttaggttcagtgtaattgataatatcctctgctgcccaggatggtgactggtttccacaaagaatcatttggacttcttcatggctgaaggaacttaatttctccattggaaaaactttattaaacccatctctaaaggcttccatttgtttctgaatacccgtatgcatacaaaagtcaaacatcaaatccacatattcttctgcattatccattgttatcatctcatcttcaccacttggcttgagatccacagctgtaaaaccatatattcttgaggaagggcaaaactggaaatttaaacctaaatcctctatgctaagtggaggcccagaacctgatggattcttcagcactagttcctgtaattttgtgttcttctcatcttcagaaagacctttgttgcttaaaatttggcgcctcttgatagcaaggtctttaatttcttttaaaaatctggctctgtgtgggtttactaattcaaagtcttcccaagtcaaaattccattaaaccaagctgggggttttggtttagggggatcaagaataaattctgattttgaatcctcttcaaagcttcctaccgagagtgaatcatgaccttcttctgtagaagcttcagactgactttcagtacagtgtaagtctctatcacctcgtgactcataaatcagtttactcatattgcttttaatgtcacccatacacataagtttaaaaaaaggtttagaaataggtaagtccacaagtctattgtcttgaatgcatttggccaagaaaattccaaggaaatgaaacagtttcgtgatcctttcaagctcatcactatcctgtggaaatggtgctgtgaacagtccacatgacctctgcacataatatccaggaggtttcaatccacctccaagatcaacgtgacgagattcatcatctggaaaattatcatcacaaagccaagctcccaagtcagttctctggaattctgctgccaccagagcataaaactctaatgtgggtcccaagccagttccttcttctcctaaaaattcaacctcaagaactgatttccgatctgcatgtatttgcatgacattctcagcccattccatcagtgactcgccacgtggaacttttactctttcatgcttgagacgaccaactcgaaactctccagggtcatctcgcctaacactgcttgtggttctcgttcgttccacagtggcttcacgtcggttctgtaaccatactattgctcttgaggcgccaaatgctgtacatgtgaaataaagctgtctagtttcaaatggtattagaaaaggacatttgctggttaattgttcacaccagtctggcagagccccacttgccagtgccaatggttcctcaatctgctgtaatatttttgttgtaattttttgctagtgaattcatctggtggaaaagtaaactgaggctgttcatcaccatcttcctgggatattcttgaataagggtcacttgcaactatatatagaatacgcagaagctgaaggacatcttctactccacaagagttctgtccattgcctgctttggcctgaggttgttcttttgttaaattaagaatatcactactttgaagagtagaaatggccccctggtttaacccagacttttgttccatgctcaccccaaatcccaatatgcagctatgagctgagaacaatttctgtttttcctaatacttttattagtgccagttaatttccagtggcgcaggaaagcagcgtctgcattcttctgcaggtaggttatcaagtcattctttggtaattcatcagtgccaaggtactgctccacatgctctatagaccagcaacccatttttccattttccttttctttatcagaatccttcatttctctgtacatgattgtgtatgtgggctcccaaatacgcctaagtttatctgatttcacattgccattacaggacaattgaagcaatttttgtacatagtaaaagatggttgatctgaaattggtgagtggtaattcaacttcacgagtcgttccaagacctgttactttcaaagtgagagctaatcgaggtgacggagtacattcgacttcttccaagagctctgaatgaggggtccctgggggtggtatttctagatcagttgtctgctggacattagtacgaccaggtctaggatcaaaagcaggaaccaatgcagaaaactgtctctttagcacataatcatcatcccatgttctccggcgtcctcctttagtttcgtactcttcttcttcctgctccccaataggtcggctccctgctccagcaggtacctgtggtagctgcgaggtaacagcatgatgcgttacatcagagcgggagccagctcgacgttgcagggatgggcgtctcagaatcataacctcctcgtattcttggtcctcctgattgtcatcttcattctcatcatcttcttcatctggctcaggtaagtcctcatcatcatcgagctcagccaatagagtactggcacggcagctatcaaggaaatcatataaggaatattctgcttcctgacctgtgtcactctcactggaagttgatgtgaggctggtggttaaagtgttacttaaagattgaccaactgataaaactgttgttgctgtagctacattgctgctgctagtaacactggatgttgacatagtcactgttgatgtagtaccaggtgtggtcaaattagggaaactctgagcacccataagaggagaagttgctgtgctcatcacattcctccccaaagtattagtgttgttatcactgctgcttcggcttag

SEQ ID NO: 89862 - DNA, 1415 bp, Homo sapiens; identical to SEQ ID NO: 60864

SEQ ID NO: 89863 - DNA, 4248 bp, Homo sapiens
attctttggaatactactgctagaagtctgacttaagacccagcttatgggccacatggcacccagctgcttctgcagagaaggcaggccactgatgggtacagcaaagtgtggtgctgctggccaagccaaagacccgtgtaggatgactgggcctctgccccttgtgggtgttgccactgtgcttgagtgcctggtgaagaatgtgatgggatcactagcatgtctgcggagagcggccctgggacgagattgagaaatctgccagtaatgggggatggactagaaacttcccaaatgtctacaacacaggcccaggcccaaccccagccagccaacgcagccagcaccaaccccccgcccccagagacctccaaccctaacaagcccaagaggcagaccaaccaactgcaatacctgctcagagtggtgctcaagacactatggaaacaccagtttgcatggcctttccagcagcctgtggatgccgtcaagctgaacctccctgattactataagatcattaaaacgcctatggatatgggaacaataaagaagcgcttggaaaacaactattactggaatgctcaggaatgtatccaggacttcaacactatgtttacaaattgttacatctacaacaagcctggagatgacatagtcttaatggcagaagctctggaaaagctcttcttgcaaaaaataaatgagctacccacagaagaaaccgagatcatgatagtccaggcaaaaggaagaggacgtgggaggaaagaaacagggacagcaaaacctggcgtttccacggtaccaaacacaactcaagcatcgactcctccgcagacccagacccctcagccgaatcctcctcctgtgcaggccacgcctcaccccttccctgccgtcaccccggacctcatcgtccagacccctgtcatgacagtggtgcctccccagccactgcagacgcccccgccagtgcccccccagccacaacccccacccgctccagctccccagcccgtacagagccacccacccatcatcgcggccaccccacagcctgtgaagacaaagaagggagtgaagaggaaagcagacaccaccacccccaccaccattgaccccattcacgagccaccctcgctgcccccggagcccaagaccaccaagctgggccagcggcgggagagcagccggcctgtgaaacctccaaagaaggacgtgcccgactctcagcagcacccagcaccagagaagagcagcaaggtctcggagcagctcaagtgctgcagcggcatcctcaaggagatgtttgccaagaagcacgccgcctacgcctggcccttctacaagcctgtggacgtggaggcactgggcctacacgactactgtgacatcatcaagcaccccatggacatgagcacaatcaagtctaaactggaggcccgtgagtaccgtgatgctcaggagtttggtgctgacgtccgattgatgttctccaactgctataagtacaaccctcctgaccatgaggtggtggccatggcccgcaagctccaggatgtgttcgaaatgcgctttgccaagatgccggacgagcctgaggagccagtggtggccgtgtcctccccggcagtgccccctcccaccaaggttgtggccccgccctcatccagcgacagcagcagcgatagctcctcggacagtgacagttcgactgatgactctgaggaggagcgagcccagcggctggctgagctccaggagcagctcaaagccgtgcacgagcagcttgcagccctctctcagccccagcagaacaaaccaaagaaaaaggagaaagacaagaaggaaaagaaaaaagaaaagcacaaaagaaaagaggaagtggaagagaataaaaaaagcaaagccaaggaacctcctcctaaaaagacgaagaaaaataatagcagcaacagcaatgtgagcaagaaggagccagcgcccatgaagagcaagccccctcccacgtatgagtcggaggaagaggacaagtgcaagcctatgtcctatgaggagaagcggcagctcagcttggacatcaacaagctccccggcgagaagctgggccgcgtggtgcacatcatccagtcacgggagccctccctgaagaattccaaccccgacgagattgaaatcgactttgagaccctgaagccgtccacactgcgtgagctggagcgctatgtcacctcctgtttgcggaagaaaaggaaacctcaaggtctgagaaagttgatgtgattgccggctcctccaagatgaagggcttctcgtcctcagagtcggagagctccagtgagtccagctcctctgacagcgaagactccgaaacagagttggctccgaattcaaaaaagaaggggcaccccgggagggagcagaagaagcaccatcatcaccaccatcagcagatgcagcaggccccggctcctgtgccccagcagccgcccccgcctccccagcagcccccaccgcctccacctccgcagcagcaacagcagccgccacccccgcctcccccaccctccatgccgcagcaggcagccccggcgatgaagtcctcgcccccacccttcattgccacccaggtgcccgtcctggagccccagctcccaggcagcgtctttgaccccatcggccacttcacccagcccatcctgcacctgccgcagcctgagctgccccctcacctgccccagccgcctgagcacagcactccaccccatctcaaccagcacgcagtggtctctcctccagctttgcacaacgcactaccccagcagccatcacggcccagcaaccgagccgctgccctgcctcccaagcccgcccggcccccagccgtgtcaccagccttgacccaaacacccctgctcccacagccccccatggcccaacccccccaagtgctgctggaggatgaagagccacctgccccacccctcacctccatgcagatgcagctgtacctgcagcagctgcagaaggtgcagccccctacgccgctactcccttccgtgaaggtgcagtcccagcccccaccccccctgccgcccccaccccacccctctgtgcagcagcagctgcagcagcagccgccaccacccccaccaccccagccccagcctccaccccagcagcagcatcagccccctccacggcccgtgcgacttgcagccgcatgcgagttttccacccacatccaacactccccgcgaccccagggccagctgtcctctcatcctccaccaggccagcagccacccccgccgcagcctgccaagcctcagcaactcatccagcaccaccattcaccccggcaccacaagtcggacccctactcaaccggtcacctccgcgaatccgcctccctcgcttatgatacattccccccagatgtcacagttccagagcctgacccaccagtctccaccccagcaaaacgtccagcctaagaaacaggagctgcgtgctgcctccgtggtccagccccagcccctcgtggtggtgaaggaggagaagatccactcacccatcatccgcagcgagcccttcagcccctcgctgcggccggagccccccaagcacccggagagcatcaaggcccccgtccacctgccccagcggccggaaatgaagcctgtggatgtcgggaggcctgtgatccggcccccagagcagaacgcaccgccaccaggggcccctgacaaggacaaatagaaacaggagccgaagactccagttgcgcccaaaaaggacctgaaaatcaagaacatgggctcctgggccagcctagtgcagaagcatccgaccaccccctcctccacagccaagtcatccagcgacagcttcgagcagttccgccgcgccgctcgggagaaagaggagcgtgagaaggccctgaaggctcaggccgagcacgctgagaaggagaaggagcggctgcggcaggagcgcatgaggagccgagaggacgaggatgcgctggagcaggcccggcgggcccatgaggaggcacgtcggcgccaggagcagcagcagcagcagcgccaggagcaacagcagcagcagcaacagcaagcagctgcggtggctgccgccgccaccccacaggcccagagctcccagccccagtccatgctggaccagcagagggagttggcccggaagcgggagcaggagcgaagacgccgggaagcc

SEQ ID NO: 89864 - DNA, 4951 bp, Homo sapiens; identical to SEQ ID NO: 60827

SEQ ID NO: 89865 - DNA, 2480 bp, Homo sapiens
atgggccgggcgcggtggctcacggctgacatgccagcactctgggaggccgagcatggtgcggcggccgcgcgcgcggacatgggggagaagctggagctgagactgaagtcgcccgtgggggctgagcccgccgtctacccgtggccgctgccggtctacgataaacatcacgatgctgctcatgaaatcatcgagaccatccgatgggtctgtgaagaaatcccggatctcaagctcgctatggagaattacgttttaattgactatgacaccaaaagcttcgagagcatgcagaggctctgcgacaagtacaaccgtgccatcgacagcatccaccagctgtggaagggcaccacgcagcccatgaagctgaacacgcggccgtccactggactcctgcgccatatcctgcagcaggtctacaaccactcggtgaccgaccccgagaagctcaacaactacgagcccttctcccccgaggtgtacggggagacctccttcgacctggtggcccagatgattgatgagatcaagatgaccgacgacgacctgtttgtggacttggggagcggtgtgggccaggtcgtgctccaggttgctgctgccaccaactgcaaacatcactatggcgtcgagaaagcagacatcccggccaagtatgcggagaccatggaccgcgagttcaggaagtggatgaaatggtatggaaaaaagcatgcagaatacacattggagagaggcgatttcctctcagaagagtggagggagcgaatcgccaacacgagtgttatatttgtgaataattttgcctttggtcctgaggtggatcaccagctgaaggagcggtttgcaaacatgaaggaaggtggcagaatcgtgtcctcgaaaccctttgcacctctgaacttcagaataaacagtagaaacttgagtgacatcggcaccatcatgcgcgtggtggagctctcgcccctgaagggctcggtgtcgtggacggggaagccagtctcctactacctgcacactatcgaccgcaccatacttgaaaactatttttctagtctgaaaaacccaaaactcagggagggccgtgggcagcgctggggcttcctgtggctcaacctgctctccttccaggaggaacaggaggcagcccggcgccgccagcagcgcgagagcaagagcaacgcggccacgcccactaagggcccagagggcaaggtggccggccccgccgacgcccccatggactctggtgctgaggaagagaaggcgggagcagccaccgtgaagaagccgtctccctccaaagcccgcaagaagaagctaaacaagaaggggaggaagatggctggccgcaagcgcgggcgccccaagaagatgaacactgcgaaccccgagcggaagcccaagaagaaccaaactgcactggatgccctgcacgctcagaccgtgtctcagacggcggcctcctcaccccaggatgcctacagatcccctcacagcccgttctaccagctacctccgagcgtgcagcggcactcccccaacccgctgctggtggcgcccaccccgcccgcgctgcagaagcttctagagtccttcaagatccagtacctgcagttcctggcatacacaaagaccccccagtacaaggccagcctgcaggagctgctgggccaggagaaggagaagaacgcccagctcctgggtgcggctcagcagctcctcagccactgccaggcccagaaggaggagatcaggaggctgtttcagcaaaaattggatgaggtagtggaccccagagggcagctgggtgtgaaggcgctgacctacaacgacctgattcaagcgcagaaggagatctccgcccataaccagcagctgcgggagcagtcggagcagctggagcaggacaaccgcgcgctccgcggccagagcttgcagctgctcaaggctcgctgcgaggagctgcagctggactgggccacgctgtcgctggagaagctgttgaaggagaagcaggccctgaagagccagatctcggagaagcagaggcactgcctggagctgcagatcagcattgtggagctagagaagagccagcggcagcaggagctcctgcagctcaagtcctgtgtgccgcctgacgacgccctgtccctgcacctgcgtgggaagggccgccctgggccgcgagctggagcctgacgccagccggctgcacctggagctggactgcaccaagttctcgctgcctcacttgagcaagcatgagcccggagctctccatgaacggccaggctgctggctatgagctctgcggtggcctgagagagcgcgcctacggcagcagcggggagctcatcaccagcctgcccatcagcatcccgctcagcaccgtgcagcccaacaagctcccggtcagcattcccctggccagcgtggtgctgcccagccgcgccgagagggcggtg

SEQ ID NO: 89866 - DNA, 2945 bp, Homo sapiens
cgacccacgcgtgcgcctctttgtgtgctttggaaagccgcggagctggtggtggctacagttggtgttgggggcttaggcgagggacgttaccgggaagttgcaggcgggaggactcttccccatccagtcacctgacaggtcacaaacatgtcagacaaaagtgaattaaaggctgagttggaacgtaagaagcagcgactggcccaaatcagagaggaaaagaagagaaaagaagaagaaaggaaaaaaaaagaaacagaccagaagaaggaagctgttgctcctgtgcaagaagaatcagatcttgaaaaaaaaaggagagaagctgaagcattgcttcaaagcatggggctaactccagaatcccccattgtccctcctcctatgtctccatcctccaaatctgtgagcactccaagtgaagctggaagccaagactctggagatggcgccgtgggatctagacgaggacctattaaacttggaatggctaaaatcacgcaagtcgactttcctcctcgagaaattgtcacgtatacaaaggaaactcagactccagttatggctcaacccaaagaagatgaagaggaagatgatgatgtagtggctcctaaaccacctattgaacctgaagaagagaaaactttaaagaaagatgaggaaaatgaatagtaaagctccccctcatgagctgactgaagaagaaaagcaacaaatcttgcactctgaggaatttttaagtttctttgaccattctacaagaattgtagaaagagctctttctgagcagattaacatcttctttgactatagtgggagagattttggaatgacaaagaaggagagattcaagcaggtgctaaactgtcattaaatcgacaattttttggacgaacgtttggtccaaagcatccgggtgggttagttgtttggattggtcatctcagtatcccggagttactcgtggcttcctataacaacaatgaagatgcccctcatgagcctgatggtgtggcccttgtatggaatatgaaatacaaaaaaactaccccagagtatgtgtttcactgccagtcagctgtgatgtctgccacatttgcaaaatttcatccaaatcttgttgttggtggtacatattcaggccaaattgtgctttgggataaccgtagcaataaaagaactccagtgcaaagaactccactgtcagcagctgcacacacacaccctgtatattgtgtaaatgttgttggaacacaaaatgctcacaatctgattagcatctctactgatggaaaaatttgttcatggagtctggacatgctttcccatccacaggatagcatggagttggttcataaacagtcaaaagcagtagctgtgacatctatgtccttccctgttggagacgtcaacaactttgttgttgggagtgaagaaggttctgtgtacacagcatgccgccatggcagcaaagctggaatcagtgagatgtttgaggggcatcaaggaccaatcactggcatccattgtcatgcagctgttggagcagtagacttctcacatctttatgtcacttcatcgtttgactggacagtaaagctttggacaactaagaataacaagcctttgtattcatttgaagataacgcaggctatgtttatgatgttatgtggtcacctacccacccagccctgtttgcctgtgtggatggcatggggagattggatttgtggaatctcaataatgacacagaggtaccaactgccagcatttctgtggagggtaatcctgctcttaatcgtgtgagatggacccattctggcagagagattgctgtgggtgattctgaaggacagattgttatatacgatgtgggagagcagattgctgttccccgcaatgatgaatgggcacggtttggccgaacacttgcagaaattaatgcaaaccgagctgatgcagaggaggaagcagctacccgaatacctgcttagttcctgaaaaggggagtgtaactagtggatttgggaaaggttcttaagtagatcctgagactatttgcatgcttctgtctaaatgataattaaaaggaaatttcatggattaaaccatgggtttaatgcagcaaggaaacttacaatgtccctttatatataacatgcatcttgttttggatttgtgtcattttttaatatagctgattgacttcacagaaagcagcttttttgaattctaatacataggtgtatatttggtattagttattttgagttcttttcaacttataacactgtatacagttatttctaaagcacagatgaaataagttctgcatatttttaaataatcacagttccctgttatacagataatgttctcactacccataatatgtaggaacattgtttctccttagccgtagtatgcatacacctatccatgttcattctgacatcctttgttgtctttataattcatgtggtagttacctataaataaaaacaaatatgcgttaacttttcaaattttcatttttactccttacaacttgaatttttccatcttttataaaatatattttttccatatctttctttaagctcctgctgtgagcagccatctcaaatcctatagagctgtgtaccctaaatataccatgtggtatatactatagatctcccagtgcattatgaattgatgtctagataatctgttggtgaaaaagtttcccctaggttaacttttgctttactactttatattctttccatctaagacatatttcctttaaaggataaatagaaagctgcctataattttcactgattaagaactatgtatgtgacctcactgagagtaaaatctttgagagaaattgatttcatgatttcagtagccataaaggcaaagtgctcaaatggacccatactttggcattaaa

SEQ ID NO: 89867 - DNA, 6976 bp, Homo sapiens; identical to SEQ ID NO: 61016

SEQ ID NO: 89868 - DNA, 4973 bp, Homo sapiens
ctgacttagaacaacttttttgacttcctgcagggaggacccttacagtatttttggagaagttagtaaaaccgaatctgacatcatcacctagcagttcatgcagctagcaagtggtttgttcttagggtaacagaggaggaaattgttcctcgtctgataagacaacagtggagaaaggacgcatgctgtttcttagggacacggctgacttccagatatgaccatgtatttgtggcttaaactcttggcatttggctttgcctttctggacacagaagtatttgtgacagggcaaagcccaacaccttcccccactgatgcctaccttaatgcctctgaaacaaccactctgagcccttctggaagcgctgtcatttcaaccacaacaatagctactactccatctaagccaacatgtgatgaaaaatatgcaaacatcactgtggattacttatataacaaggaaactaaattatttacagcaaagctaaatgttaatgagaatgtggaatgtggaaacaatacttgcacaaacaatgaggtgcataaccttacagaatgtaaaaatgcgtctgtttccatatctcataattcatgtactgctcctgataagacattaatattagatgtgccaccaggggttgaaaaagttccagttcattgttgttcgccaagttgaacaaccagatagtactatttggttaaaatggaaaaatattgaaacctctacttgtgatacacagaatattacctacagatttcagtgtggtaatatgatatttgataataaagaaattaaattagaaaaccttgaacccgaacatgagtataagtgtgactcagaaatactctataatagccacaagtttactaacgcaagtaaaattattaaaacagattttgggagtccaggagagcctcagattattttttgtagaagtgaagctgcacatcaaggagtaattacctggaatccccctcaaagatcatttcataattttaccctctgttatataaaagagacagaaaaagattgcctcaatctggataaaaacctgatcaaatatgatttgcaaaatttaaaaccttatacgaaatatgttttatcattacatgcctacatcattgcaaaagtgcaacgtaatggaagtgctgcaatgtgtcatttcacaactaaaagtgctcctccaagccaggtctggaacatgactgtctccatgacatcagataatagtatgcatgtcaagtgtaggcctcccagggaccgtaatggcccccatgaacgttaccatttggaagttgaagctggaaatactctggttagaaatgagtcgcataagaattgcgatttccgtgtaaaagatcttcaatattcaacagactacacttttaaggcctattttcacaatggagactatcctggagaaccctttattttacatcattcaacatcttataattctaaggcactgatagcatttctggcatttctgattattgtgacatcaataagccttgcttgtggttctcaccaacatctatgatctacataagacgagatcttgcaagttagatgaacagcaggagcttgttgatacgcatgatgaaacactactgatgaatgtggagccaatccatgcagatattttgttggagacttatcataggaggattgctagatgaaggaagacttttttctggctgaatttcagagcatcccgcgggtgttcagcaagttccctataaaggaagctcgaaagactcactaaccagaataaaaaccgttatgttgacattcttccttatgattataaccgtgttgaactctctgagataaacggagatgcagggtcaaactacattaaatgccagctatattgatggtttcaaagaacccaggaaatacattgctgcacaaggtcccagggatgaaactgttgatgatttctggaggatgatttgggaacagaaagccacagttattgtcatggtcactcgatgtgaagaaggaaacaggaacaagtgtgcagaatactggccgtcaatggaagagggcactcgggcttttggagagtgttgttgtaaagatctaaccaagcacaaaagatgtcctagattacatcattcagaaattgaacattgtaaataaaaaagaaaaagcaactggaagagaggtgactcacattcagttcaccagctggccagaccacggggtgcctgaggatcctcacttgctcctcaaactgagaaggagagtgaatgccttcagcaatttcttcagtggtcccattgtggtgcactgcagtgctggtgttgggcgcacaggaacctatatcggaattgatgccatgctagaaggcctggaagccgagaacaaagtggatgtttatggttatgttgtcaagctaaggcgacagagatgcctgatggttcaagtagaggcccagtacatcttgatccatcaggctttggtggaatacaatcagtttggagaaacagaagtgaatttgtctgaattacatccatatctacataacatgaagaaaagggatccacccagtgagccgtctccactagaggctgaattccagagacttccttcatataggagctggaggacacagcacattggaaatcaagaaggaaaataaaagtaaaaacaggaattctaatgtcatcccatatgactataacagagtgccacttaaacatgagctggaaatgagtaaagagagtgagcatgattcagatgaatcctctgatgatgacagtgattcagaggaaccaagcaaatacatcaatgcatcttttataatgagctactggaaaccttgaagtgatgattgctgctcagggaccactgaaggagaccattggtgacttttggcagatgatcttccaaagaaaagtcaaagttattgttatgctgacagaactgaaacatggagaccaggaaatctgtgctcagtactggggagaaggaaagcaaacatatggagatattgaagttgacctgaaagacacagacaaatcttcaacttatacccttcgtgtctttgaactgagacattccaagaggaaagactctcgaactgtgtaccagtaccaatatacaaactggagtgtggagcagcttcctgcagaacccaaggaattaatctctatgattcaggtcgtcaaacaaaaacttccccagaagaattcctctgaagggaacaagcatcacaagagtacacctctactcattcactgcagggatggatctcagcaaacgggaatattttgtgctttgttaaatctcttagaaagtgcggaaacagaagaggtagtggatatttttcaagtggtaaaagctctacgcaaagctaggccaggcatggtttccacattcgagcaatatcaattcctatatgacgtcattgccagcacctaccctgctcagaatggacaagtaaagaaaaacaaccatcaagaagataaaattgaatttgataatgaagtggacaaagtaaagcaggatgctaattgtgttaatccacttggtgccccagaaaagctccctgaagcaaaggaacaggctgaaggttctgaacccacgagtggcactgaggggccagaacattctgtcaatggtcctgcaagtccagctttaaatcaaggttcataggaaaagacataaatgaggaaactccaaacctcctgttagctgttatttctatttttgtagaagtaggaagtgaaaataggtatacagtggattaattaaatgcagcgaaccaatatttgtagaagggttatattttactactgtggaaaaatatttaagatagttttgccagaacagtttgtacagacgtatgcttattttaaaattttatctcttattcagtaaaaaacaacttctttgtaatcgttatgtgtgtatatgtatgtgtgtatgggtgtgtgtttgtgtgagagacagagaaagagagagaattctttcaagtgaatctaaaagcttttgcttttcctttgtttttatgaagaaaaaatacattttatattagaagtgttaacttagcttgaaggatctgtttttaaaaatcataaactgtgtgcagactcaataaaatcatgtacatttctgaaatgacctcaagatgtcctccttgttctactcatatatatctatcttatatagtttactattttacttctagagatagtacataaaggtggtatgtgtgtgtatgctactacaaaaaagttgttaactaaattaacattgggaaatcttatattccatatattagcatttagtccaatgtctttttaagcttatttaattaaaaaatttccagtgagcttatcatgctgtctttacatggggttttcaattttgcatgctcgattattccctgtacaatatttaaaatttattgcttgatacttttgacaacaaattaggttttgtacaattgaacttaaataaatgtcattaaaataaataaatgcaatatgtattaatattcattgtataaaaatagaagaatacaaacatatttgttaaatatttacatatgaaatttaatatagctatttttatggaatttttcattgatatgaaaaatatgatattgcatatgcatagttcccatgttaaatcccattcataactttcattaaagcatttactttgaatttctccaatgcttagaatgtttttaccaggaatggatgtcgctaatcataataaaattcaaccattatttttttcttgtttataatacattgtgttatatgttcaaatatgaaatgtgtatgcacctattgaaatatgtttaatgcatttattaacatttgcaggacacttttacaggccccaattatccaatagtctaataattgtttaagatctagaaaaaaaaaatcaagaatagtggtatttttcatgaagtaataaaaactcgttttggtgaaaaaaaaaa

SEQ ID NO: 89869 - DNA, 5168 bp, Homo sapiens
  misc_feature (1)...(5168): n = a,t,c or g
ttttttttttttgtgcaagatttaaataaaaaaacaaaacaaaaaaataggaaatggttgctttcaaaaatttccccaggttgtgaaaaggtttgccaacgactctcagggggtgtggttctaagctgcatcaagtgaaacaaatacaaaatgctgtccctcctccctgggctcggaaggcagtgcactttctccctcttaacagcccagacttagcgggtgaggaggtcagtggcctgtgacccagggccaagctgggagtgtcccgcatagcctttttctctgaccagtggggggaattccatctacccttgagggcgtgctgggctggggccccgttttccacaaccagcacatgtgntggtgagaaaaaacccaagggtagctttatcaacagggctgctggggccttaaataacttgacagtgagtgttgggccgggtcacagccagggaaaggatttaacacagattgccctcccaagcccccactggctgggcctaattttaggattaccacgggaaaaaaagctttgatgaaagacaacaggaagtcaacacagcagagagtggtgtggacaacccatgaatgccagcctcaccgcattcccatgccccacagttaacgatgacaacaacagcaataataataataataataaaacaaaggtacaggtgaaaagcagcgcttggggtgtgctgctgcaagctggggaaggcgcgtgctcaacttggatgggacacatctagtctttcttcaagtccctggattcaaagagcttcaaccgttcttgcaccgtcaggccttccttcagactcttggacctgatgtttctgagttgccgggtgacacaggatctgtctttcttcaagaagtcagggttgcttttagatttcattatatcatatccggacaccgtggcactgtcaggggacttctcccccagtgcttccgttgcagccttgagctgctccttcaacctgctgatgtcacagtcagccttagccttcgcgatgctgagctctgtgtagatgtctttgtacttgtcacttgcatacttcttgtcccgcagtgccgtctgcagctcatccttgagggagctaatctcctgtttcaggtactgtatttccgattcctttacccgcaataagacctctagttcataggcatccttgccctgtgcaaggggtgacccagtggcctccccaccgccgtccccaatcaagcaacgtccgcaaccgtgtgatctctgcagccaggcggttgttcagctcctggttgtgggcattgagctcctggttctcacgctggcactgccgcagggcctgccgctcggcctccagcgcctgggccagatgggcattctccaggcacttctgcgagtactgctccgagaggacctccaagttccacgctgcaccgactgcagctccctccaggtactggcgccgcagggcctcaaacatccgaagttgacgctgctgatctgggaccgctggctcttctcccagtcccgctccatttcctcccggtgggcgttcttcatggcttcgatggctgagatggtggccgctgtctcctcggctaggaggcggtctttctcttctcgaagtttctctagctcccgctggtgctgcctctggagatcttcaatcttccttctggtgcgtttcttccattgctgcaaaccctcgctcgcacgtggccttaaggctctccaagtccctctggtacttctcacgcagtgtggccgcgtcgccctccaggtccttgtgtcccagctcctcccgcatgacatccatctgggcctccagctcctggatgcgctccctcagccccgtcatggagtcagcctctccctgggtggcctgccagttgggggcaggggctggcagggccttggggtgtggcccctggtggaggcagagggtgtcctgaaggcacctcaggctctgcgagtagtgctcctgcagggtcctcagctcctcctcgtggatcgtctgcagctcccggaccttgagctggaacctgtcctccagggtctgtatctgctcaccatgatgcctctccatgtcctgcctgtctctgaccgaggcatccagctggctcaggacccggctgcgctcagcctgcagtgtgctctcggtcctggtcagctgctccaccacacaccgaatctcctcctcatacctgccccgcagggtgaacatgctcatgctgtgcttgctctctgcatcctccagacactgctgctgatggtctagctgggcggccttggccttgagctctgcattctccctttcaacaatggcgatcacatccaggtactcgctcttctgcttgcggagaagctcctcatactcctccctcagggcccgggctgcctgtgcctgctctgagcaggagggctcccgggtttgccaggactccttgcagagctggagctccttctcatattctagccggattctgcaggacgcatagcaaacctgggcctgaataatggcatcctgaaccaacaatgaagaatactgaccgaggcctcccaaacaagtgttatacgagagactctgggacacctggagaagcttctggcaatctctcagcgattccacaggtggcagagatggtaaggcagccgctatctcctctaagaggctggccttctccttcagctgctgggcaagctcctcctgaatagcaacaaaggccccagggctctggtcagacacatcgaagggctcctgagagctgtctgagtctcggcccaggacttctcctaaggggctcaggtcccaggacagctgaacaccatcttcatggcccgctggaagcctgagggcttccaagacctgctgcatcactctttcaaagtctggggtttggtaggctcccaggatttccctcagcaggcatttgtgctgccgcagggccgtctgggtgccccgcagggtctcctggatgctctgtagcctgcggtggaacgactccctcactgactgtgtggcaaagctgagctctgccctgacccatgtggcattggccaggatgggggccaggccctgtgggatgctttgctgcccgtctcctgaggcaccgactgcctctcctcccagtgtccccaagtgcttcctcagagactcaacctggctccagaactcaccatccactaggaccttcctggcccaggtgtctacgggggccccagcagattccatcggtggctgtcctgaccaagaaatctcatggagcattcgggagacatctgatgttgtgttcttcagggaatctgctatctggctgatcagcgaggcctccagagcaatctggtcagaaagaagcctcacctgctcctgctctgtcaactcagactgggagcactgctgcagggaggcaggcttcccattctcctcggtgccacctgtctccagctgtgcacgggccccgccatgggctggggccggccagtgctgcagggcttggatggcgctgacgagtgcactctccacactggccagggaggctgcgcgtgcgtcctgctcatcctcctggctggccctaggcagagatctcagttgttctcggcaattttccaggcacatcagggcctgactattcttgacctggaagtccccaagctctccaacatgcccttcaaccctcctggccctctcctgcctctcctgctccagctgggaggccagtgcgccaacctggagcaggctggcgcggagctgctcacgcagctgggcctcggtgcccgcccactggtggtgcagtgcgagcagtgcctcacggctctgaccctgctggctctccagcctcacggtcacgtctttgagcttttcctctgtgacgtagagcttggtctccagggagtggatgatggagaggtacgtgtcagagtcgccagttgcaggcagtacactgggtgcaggctctgaggacatgctttcttccgagggtgaccggtcctggctggtgtcggaagatgtgctgctggtccaggtcttctcagacccttcggggtgaatgtatctttggcactggattgtggagaaccggattctttgccttttaacaccaggtgccccttggtcgagtttggctgtgccctgctgatggccctccctgtcaagcacttccactgactttgggggcaccatgctgtcttccctactggggctgccatcaccgtactcttcccccggaggagcccccaggtcctcgtcctcatcctcgagccttgtgtgtgggaggcctagaggtgccctagtggcttggactggttggcctgggagcaaagtgccatccctttctgtctcttcaggggtactccgtggctcttccatgtcctttggagattcacttgcaaatttccttaaaatctcttcttttgcctggagcttaatttctgtttcctctaagctgctccccaaggcaaccattttaaccaaagcctcattgaggtcctgctccttcttctccagaaccttctcatgtgcttccttaatgcgctccagctcttcctccttctctctcagcagagtgtgcatgctctgcagctggctggagaccctctggtaggagtgctccaggctctggttgtcagcctctcttctcctcagcttttcccggagctcagccacatcctcgtcggacgtggccacgcgctctgtcagctcctggaaccgctgtctgaggaggtcccgctcgtcacagaggctctgcacgtgctgcntggcctctcgtgcctccagctgctcctccagctggtgcacctgctcactgccctcgaaagtggcgctcagcttctccttctgcagggtctccacctgctgtgcctgaccctgcagctggtcctcataggcgctggccttgtcttccacttcctttaggttctgcagcaatgcctgcttctccttctcacagctctccagcagcagctcatagtttctctgcagcttctcctccatcagccgctgcgcctgctcactggcgcccagttgctggctgaggtcggcaatgcgctcctgcagcctctggacctccttctgccggtcccgctgcagcgcctgctgtgtctccaggccccgtagctcctgcgtcttctccagcagcagggcctcagcactcttgagcttctgctcgctagccctcagctggcc

SEQ ID NO: 89870 - DNA, 913 bp, Homo sapiens
tttcgtcgaacatgaggctccgagaggtgaaggcatagcgtgggttttgaagtcttaaacccaagggggccagctgcatagcccagagccttaaagatgatttagggaagagtcttatttcgcggctgtggtgtgggtcacaaagggcaggtcttgatggggacgttcattcttgcccaggattggctttcagagtctaatcatgttttctgtgtgtctagtatgctcaggcttcagaagaggctcgcctctagtgtcctccgctgtggcaagaagaaggtctggttagaccccaatgagaccaatgaaatcgccaatgccaactcccgtcagcagatccggaagctcatcaaagatgggctgatcatccgcaagcctgtgacggtccattcccgggctcgatgccggaaaaacaccttggcccgccggaagggcaggcacatgggcataggtaagcggaagggtacagccaatgcccgaatgccagagaaggtcacatggatgaggagaatgaggattttgcgccggctgctcagaagataccgtgaatctaaagataccgtgaatctaagaagatcgatcgccacatgtatcacagcctgtacctgaaggtgaaggggaatgtgttcaaaaacaagcggattctcatggaacacatccacaagctgaaggcagacaaggcccgcaagaagctcctggctgaccaggctgaggcccgcaggtctaagaccaaggaagcacgcaagcgccgtgaagagcgcctccaggccaagaaggaggagatcatcaagactttatccaaggaggaagagaccaagaaataaaacctcccactttgtctgtacatactggcctctgtgattacatagatcagccattaaaataaaacaagccttaatctgcaaaaaaaaaa

SEQ ID NO: 89871 - DNA, 2590 bp, Homo sapiens
  misc_feature (1)...(2590): n = a,t,c or g
tcctccctcgtcgccgccgccgccgccgccgcctcagccttcgcctcagccgccgcccgctcccgcccgcgcggcgggattagtgacgatcaatccaggatgctgcagactctggccggggtgaaccttgctgggcaattcgttgcaggggggcatggccctgccgcctcccccgcacggccacgaaggggcggacggcgacggcaggaagcaggacatcggcgacatcctccaccagatcatgaccatcaccgaccagagcgttggaccgaggcgcaagcaaagaaacatgccctgaactgtcacagaatgaaaccagcgctcttcagcgtcctgtgtgagatcaaagagaaaacaggtctcagcatcagaggagcccaggaggaggaccctcccgatccccagctaatgagactggacaatatgcttttggcagaaggggtttcaggtccctgagaaaggtgggggatcggcggcagcagctgcagccgcggcagcctctggaggttcttcagataactctattgaacacttcagattaccgagcccaaatgacccaggatcaggccaaatctatcacacagaactggagaaatattgaacaggcatgtaattgaatttactacacatgtgatggaccttcttccgaggaaccagagttaggaacacgtccccatttcctcccaaaagagattgaaagaaatggtggggcatcatccatccgaaaattttagttccattcagattgcagcttcaaccaaagcactttgttgaagcagttatgattttaagatcaaggttccttgatgccagacggaaaaggcgtaacttcagtaaacaggccacagaaatcttgaatgaatatttttactcacacctcagcaacccctaccccagtgaagaagccaaagaggagctggccaagaaatgcagcatcacagtgtcacaggtatccaattggtttggcaacaaacgaatcaggtacaagaagaacattggcaagtttcaggaagaagccaacctctatgctgcaaagacggccgtgacagctgcacacgcagtagcagcagctgtgcagaacaaccagaccaattcgcccaccacaccaaattccggttcttctggttcttttaacctcccaaattctggggacatgttcatgaacatgcagagtctgaatggggattcttaccaagggtcccaagtcggagccaatgtgcaatcacagggtggataccctccgtcatgttatcaatcagacgggaggctacagtgatggccttggaggaaattcactgtacagtccacataatttaaatgctaatggaggctggcaggacgcaacaactccatcttctgtgacttctcctacaaaaggccccaggaagtgtgcactcggatacctctaacttaatctctggccacacttttccctgagctacatgccttgataagtgcattcagagcaataggaggaaaaggaaagcgtttttgtagcccaccatctacagctttactgtaaaaccttgtcttattcgagaacttgggtaaaatctggnttttttaaaggaatcataatcattgtgtatttatacttaaaaacacacaatgttaaaaaaaaataaagcactttatccaattaggccaagatttaacattgttgacagtcctgtagctattttatcataatttattatcaatattttacattaattgtttcacagttgccaattacttggccttaaggggtaaaaagtaccatatacactaaacctcaacccgttaaagcagatgcaaaaattcacctcacctaaattgaacttcttgcatatttccattactgacttggattgtctttctttcatatcactaatggagttggaataaagagctgtttgcctatccctgttaatgatggttgtgtttaagaatcttcctcgtcacgtttgtgttcagatctcttatgttataattagatcagagactggtagcatcgtttctctctctgaaagcaccagtgcccagagtctgctcggtaataaaattatggatccagattgttctgagagacgaagatacttgctgctgatagaggtgaaaacgagattgatccgtctggggttttacggtgtgcactgggtgctgcacagacttgtcaaggtttgctacgtcctctgggcatctgcaaaaggccctgctctctggagtgttgtatatagtgtagcaaaagagtatttatacatcccaccaatcaaaacacagctttattacctcatgcgaactcatacaaaccaatagaatttcaacatgttctgtagcttagagtgctcacttactacctctgaacaatactcacgctgtagtttgtctctttcttatctttttgcatcttgtaattaactctttgtttcccttcataaaatgtaatgtacattgtaatcttttaaaagaaaaatcagggttgcacttgcaacttttaaaaaaccgagtgtggaaacattgggtcttaattcaacacaggatcggtaaaactgttgtaaatactgagaaacattttgaatgttcttcaatcttattactaatccatgca

SEQ ID NO: 89872 - DNA, 1217 bp, Homo sapiens
  misc_feature (1)...(1217): n = a,t,c or g
ttttttttttttgacacaagactaattactttattaggtgcattctataagttgaagaggagaatttttggcaaataaataaataaataaataaataaataaataatcaaacagagactctggggcccgaggagctcaggaaaacggaagcggagtctttgcatagttctaaatgaacaggaggtggcagcagtaggcaacgcggattctcggcggaaatgcagcacttgcaaaaaccagggacagaaggctttgagaaagaggagaaggtcagaaggtgactaactatttctttttcgtagagaccatggtgtggaacattcgtcctctctaccaggggcaggatgccgcgtcctacatgatctgcctgggcatcccgtaccctgtcatgcccgcctgggaggctcccttgttgctgcccatctgcaggcctattacgttctgtccctggcgaagctgctcctcggaaaagcctctccgattctgctgggctttcctgtgaaaccaggatggctctccccgatagcagccatcatccttggtgactgcaacgctgcctaaagccatcagggtcctctgcacagctgccatgtccttcccttcccatagatccaccgtctgaaagatgtcggtggttctgacaccataggtctccgcagcttttaggaactgggagatttgctccatctgcttaaaagccatctttgactctgagatcttgggtatgggctcttgtcctggtgggtataaactatttatcagcttgcacaggaccgtcccgtccattaaccatttctgaaaatgggccctgccggggggcgggtgctctatgtcctcggcgcactgcaggatgatccagtccaccagcttgttctccaggtccgcatcatacttctgctcgatcttctcctgcacctctcggcttaagccatagctcgggcccctgttagccatctaatcaagtctgaacccccaggcagcaagggggatgggtggcggacgtttcttcccgcttctcagtagcactttgcaaaggcagaaacgatgagatcgggaagagcaggtaattagcaggcagggaggaagcctcctttcatgttgaactgcagccgctgctgcctcgcgcctggaagaatggcacattgatttgattttctcatggctgagtgggctcaaccagggccgttgctaaganccctcgtgccgaattcctgcag

SEQ ID NO: 89873 - DNA, 4837 bp, Homo sapiens; identical to SEQ ID NO: 89831
  misc_feature (1)...(4837): n = a,t,c or g

SEQ ID NO: 89874 - DNA, 2411 bp, Homo sapiens
ggaagccttggcactagcggcgcccgggcgcggagtgcgcagggcaaggtcctgcgctctgggccagcgctcggccatgcgatccgccgcgcggaggggacgcgccgcgcccgccgccagggactctttgccggtgctactgtttttatgcttgcttctgaagacgtgtgaacctaaaactgcaaatgcctttaaaccaaatatcctactgatcatggcggatgatctaggcactggggatctcggttgctacgggaacaatacactgagaacgccgaatattgaccagcttgcagaggaaggtgtgaggctcactcagcacctggcggccgccccgctctgcaccccaagccgagctgcattcctcacagggagacattccttcagatcaggcatggacgccagcaatggattaccgggcccttcagtggaacgcaggctcaggtggactccctgagaacgaaaccacttttgcaagaatcttgcagcagcatggctatgcaaccggcctcataggaaaatggcaccagggtgtgaattgtgcatcccgcggggatcactgccaccaccccctgaaccacggatttgactatttctacggcatgcccttcacgctcacaaacgactgttgacccaggcaggccccccgaagtggacgccgccctgagggcgcagctctggggttacacccagttcctggcgctggggattctcaccctggctgccggccagacctgcggtttcttctgtgtctccgcgagagcagtcaccggcatggccggcgtgggctgcctgtttttcatctcttggtactcctccttcgggtttgtgcgacgctggaactgtatcctgatgagaaaccatgacgtcacggagcaacccatggttctggagaaaacagcgagtcttatgctaaaggaagctgtttcctatattgaaagacacaagcatgggccatttctcctcttcctttctttgctgcatgtgcacattccccttgtgaccacgagtgcattcctggggaaaagtcagcatggcttatatggtgataatgtggaggagatgggactggctcataggtaaggttcttaatgccatcgaagacaatggtttaaagaactcaacattcacgtatttcacctctgaccatggaggacatttagaggcaagagatggacacagccagttagggggatggaacggaatttacaaaggtgggaagggcatgggaggatgggaaggtgggatccgagtgcccgggatcttccactggccgggggtgctcccggccggccgagtgattggagagcccacgagcctgatggacgtgttccctactgtggtccagctggtgggtggcgaggtgccccaggacagggtgattgatggccacagcctggtacccttgctgcagggagctgaggcacgctcggcacatgagttcctgtttcattactgtgggcagcatcttcacgcagcacgctggcaccagaaggacagtggaagcgtctggaaggttcattacacgaccccgcagttccaccccgagggagcgggggcctgctacggccgaggcgtctgcccatgctccggggagggcgtgacccatcacagaccccctttgctctttgacctctccagggacccctccgaggcacggcccctgacccccgactccgagcccctgtaccacgccgtgatagcaagggtaggtgccgcggtgtcggagcatcggcagaccctgagtcctgtgccccagcagttttccatgagcaacatcctgtggaagccgtggctgcagccgtgctgcggacatttcccgttctgttcatgccacgaggatggggatggcaccccctgaatgccaggactgtgagagaggatccaggagagcctgactgcgttgcaaacaaaattctccaagcttggttctatcttcagcttccctttttgcaaggaacatgccctggactgagagtgggtccccactttctttctttctttctttcttttttgagacagagtgtcgctctgtccctcaggctggagtgcagtggcacgatctctgctcactgcaacctccgcttcccgggttcaagcgattctcctgcctcagcctcctaagtagctgggactacaggcgtgcgccaccacgcctggcctgggatcttttttatcacgaatattcccaaccaccgtataatgtgaggctcccacatatccacacctatgaggccggttgcatagccatgctgctgcaagattcttgcaaaagtggtttcgttctcagggagtccacctgagcctgcgttccactgaagggcccggtatccattgctggcgtccatgcctgatcttaaggaatgtctccctgtgaggaatgcagctcggcttggggtgcagagcggggc

SEQ ID NO: 89875 - DNA, 3841 bp, Homo sapiens
cggacggcaagcggcgggagattttcaaaatgggagcccagaggcaccgcccaggcctcggaaggtgtcagggagaactttccgtggtttcagcgtcgtcgcctggagcggcggtttagagagccgagcctgatgggcgccaaggccggctggctgcttggagcgctgcctcgaagggactgcgtgaaggaagctaatccggagaacccaggccagagcctggaaatatggcgacctgcatcggggagaagatcgaggattttaaagttggaaatctgcttggtaaaggatcatttgctggtgtctacagagctgagtccattcacactggtttggaagttgcaatcaaaatgatagataagaaagccatgtacaaagcaggaatggtacagagagtccaaaatgaggtgaaaatacattgccaattgaaacatccttctatcttggagctttataactattttgaagatagcaattatgtgtatctggtattagaaatgtgccataatggagaaatgaacaggtatctaaagaatagagtgaaacccttctcagaaaatgaagctcgacacttcatgcaccagatcatcacagggatgttgtatcttcattctcatggtatactacaccgggacctcacactttctaacctcctactgactcgtaatatgaacatcaagattgctgattttgggctggcaactcaactgaaaatgccacatgaaaagcactatacattatgtggaactcctaactacatttcaccagaaattgccactcgaagtgcacatggccttgaatctgatgtttggtccctgggctgtatgttttatacattacttatcgggagaccacccttcgacactgacacagtcaagaacacattaaataaagtagtattggcagattatgaaatgccaacttttttgtcaatagaggccaaggaccttattcaccagttacttcgtagaaatccagcagatcgtttaagtctgtcttcagtattggaccatccttttatgtcccgaaattcttcaacaaaaagtaaagatttaggaactgtggaagactcaattgatagtgggcatgccacaatttctactgcaattacagcttcttccagtaccagtataagtggtagtttatttgacaaaagaagacttttgattggtcagccactcccaaataaaatgactgtatttccaaagaataaaagttcaactgatttttcttcttcaggagatggaaacagtttttatactcagtggggaaatcaagaaaccagtaatagtggaaggggaagagtaattcaagatgcagaagaaaggccacattctcgataccttcgtagagcttattcctctgatagatctggcacttctaatagtcagtctcaagcaaaaacatatacaatggaacgatgtcactcagcagaaatgctttcagtgtccaaaagatcaggaggaggtgaaaatgaagagaggtactcacccacagacaacaatgccaacatttttaacttctttaaagaaaagacatccagtagttctggatcttttgaaagacctgataacaatcaagcactctccaatcatctttgtccaggaaaaactccttttccatttgcagacccgacacctcagactgaaaccgtacaacagtggtttgggaatctgcaaataaatgctcatttaagaaaaactactgaatatgacagcatcagcccaaaccgggacttccagggccatccagatttgcagaaggacacatcaaaaaatgcctggactgatacaaaagtcaaaaagaactctgatgcttctgataatgcacattctgtaaaacagcaaaataccatgaaatatatgactgcacttcacagtaaacctgagataatccaacaagaatgtgtttttggctcagatcctctttctgaacagagcaagactaggggtatggagccaccatggggttatcagaatcgtacattaagaagcattacatctccgttggttgctcacaggttaaaaccaatcagacagaaaaccaaaaaggctgtggtgagcatacttgattcagaggaggtgtgtgtggagcttgtaaaggagtatgcatctcaagaatatgtgaaagaagttcttcagatatctagtgatggaaatacgatcactatttattatccaaatggtgggtagaggttttcctcttgctggatagaccaccctcacctacttgacaacatcagtagggtacagcttttgacaatttaccagaaaaatactggcgaaaatatcaatatgcttccaggtttgtacagcttgtaagatctaaatctcccaaaatcacttattttacaagatatgctaaatgcattttgatggagaattctcctggtgctgattttgaggtttggttttatgatggggtaaaaatacacaaaacagaagatttcattcaggtgattgaaaagacagggaagtcttacactttaaaaagtgaaagtgaagttaatagcttgaaagaggagataaaaatgtatatggaccatgctaatgagggtcatcgtatttgtttagcactggaatccataatttcagaagaggaaaggaaaactaggagtgctccctttttcccaataatcataggaagaaaacctggtagtactagttcacctaaggccttatcacctcctccttctgtggattcaaattacccaacgagagatagagcatctttcaacagaatggtcatgcatagtgctgcttctccaacacaggcaccaatccttaatccctctatggttacaaatgaaggacttggtcttacaactacagcttctggaacagacatctcttctaatagtctaaaagattgtcttcctaaatcagcacaacttttgaaatctgtttttgtgaaaaatgttggttgggctacacaagttaactagtggagctgtgtgggttcagtttaatgatgggtcccagttggttgtgcaggcaggagtgtcttctatcagttatacctcaccaaatggtcaaaacaactagggtatggagaaaatgaaaaattaccagactacatcaaacagaaattacagtgtctgtcttccatccttttgatgttttctaatccgactcctaattttcattgattaaaactcctttcagacatataagtttaataaataacttttttgttgactttcaagtaaagtgattttttttaattttaacataaagtcttcagaaagcctttctatggaaaggaattttaacctataatgtaaagggatgtattctgaggggaacaaggcaggaatggaaacttgaggtcacttactaaatatagtggatataaaatagaacaccctgactttgctcttagaccataacccccgaacttactatgttcatatatttgtattgaacaattcttttaaaagcaaaaatgtaaatgatgtgtagtttatttgtgcttttattgttttccctgcgtctcagacatgttgagaatcatggacaaaacctgctggaattttggaatttttgaagatgtaaataatgtgtatttatgttataagtaacatatgtaaacatgtatatttgttttatatttatttttgtaacaccagtgtctgatgaaacatttttgcaaatgcattttataaaaaaataaatatagtgataagttacattatcttttgattcatttaattaaatacttatttttaaataacttaccagtaaactcactttttaaattttgttgcctgttgaggagccaattaaattttaaatattaattttgcaaatgttaaatacattgtttctctattatctgaaaa

SEQ ID NO: 89876 - DNA, 449 bp, Homo sapiens
attgcccggctgcggaattcgtccgagggaagctaggggagctgctgtggcccagggctcagtggggaggaagaggaggccaggagtcttggactagctgcagggtttgagctaggctgaagcagcagaaccacagaggtggctgagcaggggcctggccctgggacccagccatccacactcacacatccacttctccctccagagcccggccctgaagcaggtctctgctccacgcttttccttagttggggaatcgagagttgggggatcaaagccccccacatctccctcacccgctgcagctatgtttatcaaggtgatgtttggggctggctgctcggtgctggtgaacacctcttgcaggctggtgaacctcaccgcccacctgaggcagaaagcagggttgcccccagatgcgaccattgctctcctggctgaggatggca

SEQ ID NO: 89877 - DNA, 1816 bp, Homo sapiens
ttttttttttttggcccccaaggaggtccaggttgaaaaacaaactggtttttattctaaacacgtactagggcagcatgctggggggcctctcctgcctccagaggtgcccctgctccccactgtggccctctttagacagagtaggagctcgggctacccacatgcagcccagcccttagcacccaagggcctgcctgtgccccactctctgcctgggctagggaggcccaggaccctcggagtgggcaggcccaccctttccatgggtcaccagggtctcagtgcccacttgtcctccaaccaacagtgacacggcaccctccacacggcctgtggctgccagtgccaccaccgcctgctccgtagggaagcccatgcgctccagctgctgcagccgcagagaggagacagaggacttggacagccatggtgcgctctggggttcctgggctgggccgttcaagaagcgaaggcctggatgccctcctgcagcatctgctcatccaaggccgcccacatcggagtccctggggagaagctggccccagcccagtccaggcctgcctctgaggagccctcccaggtgggctgcacaggcctcaggcttggtgggggcagggctgagtcttcccagtgggaccagaggtcaggggaggccacataaggcggtccagggatgggaggcctcactccggcaggatgggtgacaggcagctccgccaggctacccggggtggcaaggagcctcaggggccagcaccccgccaaggtcctgcacaagacgccctcctgcaggcacctgcagccgtcgctctgagggttccagccaccggaaggccccagctgcataggccaggccggcaaggaggccgcaaaggagctgcaggaagggtggctcagagctgagcagtggggtcagggcaagcagcagccacggcgacagccacggtggcagtgccccacggggccgtctagggcggtgtccctccccagccagcatggccaggtggacaggcatgtatccacagctgccggctgcactggacagcccaaggcctgccagcagcactgccagcagcccagaagccagggcgagcagggctgaggcatgcaggaatctcagcgtgcccaggtggcactcctgctgccagcccacagtgggcaggagcagcaggctcaggagcaaggcctggcagggccgtgtggcccagggcatgggtcagcagccggtgcacctgccaggggtccagcaacagctccggggccaggaccaggccggggccggcccccaccagccacagggtgctcatcagcagcatcaggactgaggaggccagaggcagtgctggggacagttggccatgggggcccctggcatgcatcgcttggttgaggacggtcaagggtggtcctggggctgtgtgcttactgggaagccgggagggcagaatggaaagacaaggacggagattcttccggtggcggatagagtagggggtcccaggatctgtctggttcgaactcagctggtgactttgcagagatactcaatttccttgggcctcagtttcccctttgcagagcgcgcccggcaaccccgaaaggccggtcggggaccccggctgggagtcaggactctagctcccgggcgcgacccgagaaccctgaatccattccgcgcacacccggccgcgtgacccctgccgaccggctggcgcgccacccattccccgcggcccgcggattagtcagcagttgttctagtccgggtcccttcccccaaccctcccgccgatctccgcggacgcgtggg

SEQ ID NO: 89878 - DNA, 1406 bp, Homo sapiens
aatgtcgtctcgagggccccgcccgcgccggtggaggacctgtccaaagtgtcttacgaggagctgctgcagtggagcaaggaggagctgatccgcagcctgcggcgcgccgaggcggagaaggtgagcgcgatgctggaccacagcaacctcatccgcgaggtgaaccgccgcctgcagctgcacctcggcgagatccgcggcctcaaggatatcaaccagaaactccaggaagacaaccaggaactgagggacctctgctgtttcctggatgatgaccggcagaaaggcaagagggtgtctcgggagtggcagagactgggtcgctacactgccggggtgatgcacaaggaagtggccttatacctgcagaagctgaaagacctggaggtgaagcaggaggaagtggtgaaggagaacatggagctcaggagctctgtgtgctactagatgaggagaagggtgcaggctgcgcaggcagccgctgctccatcgacagccaggccagcctgtgccaactcacagcctccaccgcaccctacgtgcgggatgtgggtgacggcagcagcacctccagcactggcagcactgacagcccggaccaccacaagcaccacgcgagcagtggcagcccggagcacctgcagaagccccggagcgagggcagcccggagcactccaagcacaggagcgccagccccgagcatccacagaaacccagagcctgtggaaccccagatcgccccaaagcactcaaaggacctagcccggagcaccacaaacccttgtgcaagggcagccccgaacagcaaaggcacccgcatccagggagcagccccgaaacgctgcccaagcacgtgctgagtgggagcccggaacacttccagaagcaccggtcagggagcagccctgaacacgccaggcacagtggagggagcccggagcatcttcagaaacacgctcttggggggagcctagagcatctccccagagccaggggcaccagcccggagcacctcaaacaacattatggagggagccctgatcacaaacacggaggaggcagtggaggaagtggaggcagcggcggaggcagcagggagggcaccctcagacggcaggcacaggaggacgggtcaccccatcaccggaatgtctacagtggcatgaacgaatcaaccttgtcctatgttaggcagctggaggcaagagtaagacagctggaggaagaaaatcgcatgctgccccaggccagccagaatacagggcgacctccaactaaaaacagctcacatatggagaaaggctgggggtccagagcccggcgggtcttgcactggtggcaagggtgccgaggaataggacgatgcctggctactctcacgggttcttttaggtggtcatcg

SEQ ID NO: 89879 - DNA, 4440 bp, Homo sapiens
atggcagtcactctcggatcgcaactggcgctcaccactttggggcatcacttcgtttaccgactgcgtagtgaatttatcaagcggattctggatactcacgtcgagcgcattgaacaactcggtagcggcttcgttgctggcggggttaaccagcgatgtgcgcaatatcaccattgcttttgtgcgtctgccggaactggtgcaggggatcattctcactatcggttcagcggcgtatctgtggatgctgtcgggcaaaatgttgctggtaacggctatctggatggcgatcaccatctggggcggttttgtgctggtggcgcgggtgtacaaacatatggcgaccctgcgtgaaaccgaagacaagctgtacacggattttcaaactgtacttgaagggcgcaaagagctgactctgaaccgggaacgcgccgagtatgtgtttaacaacctctacattcctgatgcgcaagagtatcgccaccatattattcgcgcagacaccttccatcttagtgccgtgaactggtcaaacatcatgatgctgggcgcaatcggcctggtgttctggatggcgaacagcatcggttgggctgataccaacgttgccgcgacccggctgctgcgtatgaaaaacggtaaatatgacaaagaaggcgaatttaccccaatcacctgggatcaggctttcgatgtgatggaagagaaattcaaaaccgccctgaaagaaaaagcgccggaatcgatcggtatgttcggttctggtcagtggactatctgggaaggttatgccgcgtccaagctgtttaaagcgggcttccgttcgaacaacatcgacccgaacgcgcgtcactgtatggcgtcggcagtagttggctttatgcgtacctttggtatggatgagccgatgggctgctatgacgacatcgagcaggctgacgcgtttgtgctgtggggcgcaaacatggcggaaatgcacccgatcctctggtcgcgcatcactaaccgtcgtctctctaaccagaacgtcaccgtggcggtgctttctacgtaccagcatcgtagcttcgagctggcggataacggcatcatctttacgccgcaatctgacctggtgatcctgaactacatcgccaactatatcattcaaaacaatgcgataaatcaggacttcttcagcaagcacgttaacctgcgcaaaggggcgacggacatcggctacggtttacgtccgacccatccgctggaaaaagcagcgaagaatccgggttctgacgcctccgaaccgatgagctttgaagattacaaagccttcgttgccgagtatacgctggaaaaaactgccgaaatgaccggcgtgccgaaagaccagttagaacaactggcgcagctgtatgccgatccgaacaagaaagtcatctcctactggacgatgggcttcaaccagcatactcgtggcgtgtgggctaacaacctggtctacaacctgcacctgctgaccggcaaaatttcccagccgggttgcgatggcgcgtacgtgaaagtgaagcctggtgcgcaaacagcaattgttaatggtcagcctctggcactgcaagtaccggtagtgatgaaagacaataaagcctgggtttctgacacctttattaacgatgttttccagtccgggctggatcaaacctttcaggtagaaaagcgccctcacccacttaatgcgctaactgcggacgaaattaaacaggccgttgaaattgttaaagcttccgcggacttcaaacccaatacccgttttactgagatctccctgctaccgccagataaagaagctgtctgggcgtttgcgctggaaaacaaaccggttgaccagccgcgcaaagccgacgtcattatgctcgacggcaaacatatcatcgaagcggtggtggatctgcaaaacaacaaactgctctcctggcaacccattaaagacgcccacggtatggtgttgctggatgatttcgccagtgtgcagaacattattaacaacagtgaagaatttgccgctgccgtgaagaaacgcggtattactgatgcgaaaaaagtgattaccacgccgctgaccgtaggttatttcgatggtcaagatggcctgaaacaagatgcccggttgctcaaagtcatcagctatcttgatgtcggtgatggcaactactgggcacatcccatcgaaaacctggtggcggtcgttgatttagaacagaaaaaaatcgttactcggtccgctacgttgttgccttcatcatcagttacgccctgcataacggataaagactggcaaaccaccagctttggcagattatcatcctgcatatcaagaaatgctttcacggtcagcgaactggcattgatggcagataaatccgccgccagcggcaatacggctgaaggtcggacttccgccatggcagaaaacaggatcgtgttatcgatcagatcgattttggcatcaaagacaccgtcgaaattctgcatatgggggcgtgagtatcaactgcaaccgaatgttgagtgggatgcgcactatctacacggcgatggctggctgggcgagtggcaatgtgtctcgcacagcgatgatagtttgtgtctggtgtatgaacatcgcagcggtgtctatcactatcgggtaagtcaggcgtttcatttaacggcggatacgctgacggtgacgctctctgtcaccaatcaaggggcagagacgctgccatttggtaccggctggcatccttattttccgttgtcgccgcaaacgcggattcaggcacaggcgagcggttactggctggagcgggagcagtggctggcgggtgagttttgcgagcagctaccgcaggaactggattttaaccagcccgcgccgttgccgcgccagtgggtgaacaatggttttgccggatggaatggtcaggcccgcatcgagcagccgcaggaaggttatgccatcatcatggaaacgacgccacctgcaccgtgttatttcatctttgtttccgaccctgcgtttgataaaggatatgcgtttgatttcttctgtctggaaccgatgagccatgcgccggatgatcatcatcgcccggaagggggtgatctcattgcgctagcaccaggggaatcaacaacttcagagatgtcgttgcgggcctacaacgatacaaaccgtaggtcagataaggcgtttacgccgcatccgacatgttttccctcaaatcagaacaacagcgccagcccgccgacaatcacaccagacactgccaccatcgcccctgtcagccataaagctttcgccgggaacgctttgcgcagcataatcagtgacggcaaactcactgccgggagcgtcatcaacaatgccagcgccggagcggttcccatacctgccagcatcatcgtttgtacaatcggaatttctgctgccgtgggaatgacaaacaagcatcctgctaccgccatcgacaccacccacatcatgctgttatcgacagcaccatcggcatgggggaataaccagacgcgagcggcacccaacaccagtagcgtaagtcgatggcgttcgtactcaatagtccctgctagaagatctgtctcgctggcctgccgcagttcttcaacttcccggcgcagcttttcgttctcaatttcagcatccctttcggcataccatcttataacggcggcagagtcataaagcacctcattacccttgccaccgcctcgcagaacgggcattccctgttcctgccagttctgaatggtacggatactcgcaccgaaaatgtcagccagctgctttttgttgacccggaatacagctcgctgaacctggcgatggcggttcaggttattgcctatgaagtgcgcatggcctggctggcaactcaggaaaacggcgagcaggtcgagcatgaagaatcggccgtatccgctggtcgatgatctggagcgtttttatggtcttctggaacaaacgctgctggcaaccggttttatccgtgaaaaccatccggggcaggtgatgaataaattgcgccgtctgtttacccgtgcgcgcccggaaagccaggagttgaatatcctgcgcgggattctggcttctattgagcagcagaataaaggtaacaaggccgaataacagccgttgcctgatgcgacgcgtaatgcgtcttatcaggcctacaaacggaacataaccgtaggtcggataaggcgtttacgccgcatccggcagccgttgcctgatgcgacgcgtaatgcgtcttatcaggcctacagtgaacagaaccgcctacagtgtacagaaccccagggcggatatggcgttcacgccgcatccgacaacagggacaaacgccacgataaaaaaatggcactgaaggttaaatacccgactaaatcagtcaa

SEQ ID NO: 89880 - DNA, 433 bp, Homo sapiens
  misc_feature (1)...(433): n = a,t,c or g
ttcttgaccataggccgtgaggaccgtttccggaacatcacttggccctcgctctcactcgcggtcgcctggccgttgtcattgtttctccgctgtcactttttcaagccccaggctggctgcttcagaagcccctgaccccatggaggagtgggacgtgccacagatgaagaaagaggtggagagcctcaagtaccagctggccttccagcgggagatggcgtccaagaccatccccgagctgctgaagtggatcgaggacgggatccccaaggaccccttcctgaaccccgacctgatgaagaacaacccatgggtgggaaaagggcaaatgcaccatcctgtgagccccgcacccggcccctctcacaccatcctgtgagaccacgcccggtcccacttccaccatctttgttaagantgtgcccagccc

SEQ ID NO: 89881 - DNA, 2718 bp, Homo sapiens
atggagagaaagtttgaacgcgtggtggcggtacaagctaagagagtgaatgaaagctctgcagactcggtggactccgtttcatccagaagccaagtaaaaatacagaccacgtttacagctaaagctgagatagatgtgtccgggaaggcagtcgtcgccagacaagttgtaagaacgaatttaaaaatctctgcaaagacatccgagagggtcgacggtagatgtggtgattgggagctgaaaaggatttttcttccgtattcagacataatagacatgatgcaaactaaagtacagaacaagaaaaggcaagtggctttcttcattttattgatgctttggggagaggtgggttctgaatcgattcagtattccgtattggaggagacagaaagtggcacgtttgtggccaacttgacaaaggacctgggactgagggtgggggagctggcttcgcggggcgctcgggttgttttcaaagggaacagacaacatttgcagtttgatccacagacccatgatttactgctaaatgaaaaactggaccgggaggagctgtgtggctccactgagccgtgtgtgctacctttccaagtgttactggaaaaccccttgcagttttttcaggcttccttgcgagtcagagatataaatgaccacgccccggaattccctgcccgagaaatgctcctgaacatatcagaaattactatgccaggaaagatatttcctttgcacaatggcacacgatttaaacaccggcaccaacggccttcagaggtaccccatcaggtcccaccctcacttccccgttctcacccgcaatgccaagaaaggccggaagttcccggagctggtgctagacaaaccgttggaccgcgaggagcagccccaactcaggctaacgctgatcgcgctggatggcgggtctccgccccggtcagggacctccgagattcagatccaggttttggacatcaatgacaacgtccccgagtttgctcaggagctctatgaagcacaagtccctgagaacaaccccctcggctctctggttattaccgtctcagccagagatttagatgcaggatcgtttgggaaggtatcttacgccctgtttcaagtcgatgacgtcaaccaacccttcgaaataaacgcaatcacaggagaaattcggctgagaaaggctttggattttgaggaaattcagtcttatgacgtggatgttgaggctacagatggtggaggcctatcaggaaaatgctctttagtcgtcagggtcctggacgtgaatgacaatgcccctgaactcaccatgtcgttcttcatcagcctcatcccagaaaacttaccagagatcacagtggcagttttcagtgtttcagatgcagactctggacataaccaacaggttatttgttcaatagagaacaatctcccctttctactaagaccttccgtggagaatttctacaccctggtaacagaaggcgcgctggacagagagagcagagccgagtacaacatcactatcacggtcactgatttggggacaccaaggctgaaaacccagcagagcataactgtgcaggtctccgacgtcaatgacaacgtccccgccttcacccaaacctcctacaccctgttcgtccgcgagaacaacagccccgccctgcacatcggcagcgtcagcgccacagacagagactcaggcatcaacgcccaggtcacctactcgctgctgccgccccaggacccgcacctgcccctctcttccctggtctccatcaacgcggacaacggccacctgtttgccctcaggtcgctggactacgaggccctgcagtctttcgagttccgcgtgggcgccacagaccgcggctccccggcgttgagcagcgaggcgctggtgcgcttgctggtgctggacgccaacgacaactcgcccttcgtgttgtacccgctgcagaacggctccgcgccctgcaccgagctggtgccccgggcggccgagccgggctacctggtgaccaaggtggtggcggtggacggcgactcgggccagaacgcctggctgtcgtaccagctgctcaaggccacggagcccgggctgttcggtgtgtgggcgcacaatggggaggtgcgcaccgccaggctgctgagcgagcgcgacgcagccaagcacaggctggtggtgcttgtcaaggacaatggcgagcctcctcgctcggccaccgccacgctgcacgtgctcctggtggacggcttctcccagccctacctgcctctcccggaggcggccccggcccaagcccaggccgactctctcaccgtctacctggtggtggcgttggcctcggtgtcgtcgctcttcctcttttcggagctcctgttcgtggcggtgcggctgtgcaggaggagcagggcggcctcggtgggtcgctactcggtgcccgagggtccctttccagggcatctggtggatgtgagcggcaccgggaccctatcccagagctaccagtacaaggtgtgtctgacgggaggctcagaaacaaatgagttcaagttcctgaagccgattatgcccaacttccctcctcagggcactgagagagaaatggaagaaacccccacctctcggaatagcttcccgttcagttaagtgtgggattattttactaaatcttacttatgtttggagatctcttttaactt

SEQ ID NO: 89882 - DNA, 4335 bp, Homo sapiens
gatcgcgccgcacgatttcgtctggacagctccagccgtgtcctgaggagctggaccagccacatcccctggggctgcagttgaagcagaaccaagtggccatcccggcgttagaccgtaggttcctggtcccggagtggtcggagcccgccagtgggcaggcagctcttgctcacaggccgcggtgcccaggccgctggctctccgcagggcggaatggcgctgcaagtggagctggtacccaccggggagatcatccgcgtggttcatccccacaggccctgcaagcttgccctgggcagtgacggggttcgggtgaccatggagagtgcgctcaccgcccgtgaccgggtgggggtgcaggatttcgtgctgctggagaacttcaccagcgaggccgccttcatcgagaacctgcggcggcgatttcgggagaatctcatctacacctacattggccccgtcctggtctctgtcaatccctaccgggacctgcagatctacagccggcagcatatggagcgttaccgtggcgtcagcttctatgaagagccccctcacctgcttgccgtggcggacactgtgtaccgagcactgcgcacggagcgtcgggaccaggctgtgatgatctctgtggagagcggggcaggcaagaccgacgccaccaagaggctgctgcagctctatgcagagacctgcccagccccccaacgcggaggtgccgtgcgggaccggctgctacagagcaacccggtgctggaggcctttggaaatgccaagaccctccggaacgataactccagcaggttcgggaagtacatggatgtgcagtttgacttcaagggtgcccccgtgggtggccacatcctcagttacctcctggaaaagtcacgagtggtgcaccagaatcatggggagcggaacttccacatcttctaccagctgctggaggggggcgaggaagaaactcttcgcaggctgggcttggaacggaacccccagagctacctgtacctggtgaagggccagtgtgccaaagtctcctccatcaacgacaagagtgactggaaggtcgtcaggaaggctctgacagtcattgatttcaccgaggatgaagtggaggacctgctgagcatcgcggccagcgtccttcatttgggcaacatccactttgctgccaacgaggagagcaatgcccaggtcaccaccgagaaccagctcaagtatctgaccaggctcctcagcgtggaaggctcgacgctgcgagaagccctgacacacaggaagatcatcgccaagggggaggagctcctgagcccgctgaacctggagcaggccgcgtacgcacgagacgccctcgccaaggctgtgtacagccgcacttttacctggctcgtcgggaagatcaacaggtcgctggcctccaaggacgtggagagccccagctggcggagcaccacggttctcgggctcctggatatttatggctttgaagtgtttcagcataacagctttgagcagttctgcatcaattactgcaacgagaagctgcagcagctcttcatcgagctcacgctcaagtcggagcaggaggagtacgaggcagagggcatcgcgtgggagcccgtccagtatttcaacaacaaaatcatctgtgatctggtggaggagaagtttaagggcatcattctcgattttggatgaaggagtgtctgcgccccggggaggccacagacctgaccttcctggagaagctggaggatactgtcaagcaccatccacacttcctgacgcacaagctggctgaccagcggaccaggaaatctctgggccgaggggaattccgccttctgcactatgcgggggaggtgacctacagcgtgaccgggtttctggacaaaaacaatgaccttctcttccggaaccttaaggagaccatgtgtagctcaaagaatcccattatgagccagtgcttcgaccggagcgagctcagtgacaagaagcggccagagacggtcgccacccagttcaagatgagcctcctgcagctggtggagatcctgcagtctaaggagcccgcctacgtccgctgcatcaaacccaatgatgccaaacagcccggccgctttgacgaggtgctgatccgccaccaggtgaagtacctggggctgttggaaaacctgcgcgtgcgcagagccggctttgcctatcgccgcaaatacgaagctttcctgcaaaggtacaagtcactgtgcccagagacgtggcccacgtgggcaggacggccgcaggatggggtggctgtgctggtccgacacctgggctacaagccagaagagtacaagatgggcaggaccaagatcttcatccgcttccccaagaccctgtttgccacagaggatgccctggaggtccggcggcagagcctggccacaaagatccaagctgcctggaggggctttcactggcggcagaaattcctccgggtgaagagatcagccatctgcatccagtcgtggtggcgtggaacactgggccggaggaaggcagccaagaggaagtgggcggcacagaccatccggcggctcatccgaggcttcgtcctgcgccacgccccccgctgccccgagaacgccttcttcctggaccatgtgcgcacctcttttttgctaaacctgaggcggcagctgccccagaatgtcctggacacctcgtggcccacgcccccacctgccctgcgtgaggcctcagagcttctgcgggagttgtgcataaagaacatggtgtggaaatactgccggagtatcagccctgagtggaagcagcagctgcagcagaaggccgtggctagtgagatcttcaagggcaagaaggataattaccctcagagtgtacccaggctcttcatcagcactcggcttggtacagatgagatcagcccccgagtgctgcaggccttgggctctgagcccattcagtatgcggtgcctgttgtgaaatacgaccgcaagggctacaagcctcgctcccggcagctgctgctcacgcccaacgccgtcgtcatcgtggaggacgccaaagtcaagcagaggattgattacgccaacctgaccggaatctctgtcagcagcctgagcgacagtctttttgtgcttcatgtacagcgtgcggacaataagcaaaagggagatgtggtgctgcagagtgaccacgtgattgagacgctgaccaagacagccctcagtgccaaccgcgtgaacagcatcaacatcaaccagggcagcatcacgtttgcagggggccccggcagggatggcaccattgacttcacacccggctcggagctgctcatcaccaaggccaagaacgggcacctggctgtggtcgccccacggctgaattctcggtgataaaggcgcccactggaccctcccaacgcccaatgctttgcttttctcctcctccccttcccagttaccaaagactcgaacttccagacagggacccagggacaccccgaagcccacctgcaatctcccacctcctgcccatccctctcttgagggagcagcaggggccaggagctaccccaggagtgggccaggccgggccacagcaataggaaagccagggccagagcgagccatgccagccctactgccgatgccaaatatttgagagaagggaacttttgctgaggttttctctgaggtttttttgatgctttataggaaactattttttaaaaaaagccatttcccacccaaggacacagtggatgtgttttccctgactccagcagggcaaggaatgtagccgagaggttgtgtgggctgggctctggtgccctcttccctggccaggacacctctcctcctgattcccttggcaccttgtctttctgtctgtttacctgtctccctgcctgcccatctgcatcttttgcagcccactctgacttccatctgggggctgagaccacccttgcctgcccccttctttctgccttaagaatgtccttttagggctggggcatggtgggctcacggcctgtaaaccccagcactttggggagggcggagacggggcagataaaccttgaggttcagggattttcgagaccaacctgacctaacatgggaggaaattccgcctttagttaaaatacaaaattagccgggcatggtggtgcacgcctctaatcccagctactcgggaggctgaggcaggagaatcacttgaaccccgggaagtggaggtttccatgggcccagaggttcccccattgcactccagcctgggcaacagagtcgagactccgtcttaaaaaaaaaa

SEQ ID NO: 89883 - DNA, 1016 bp, Homo sapiens
  misc_feature (1)...(1016): n = a,t,c or g
gggctcgcagcttagaaggtgaggcttgtgccaggccagccgagccgcctgtatgagcagagttccggtgtcctcggattcagggcagacttgggcagtgcctgtcctgcagttgggggcaggaactccctcccctgcccccaggcgtgcccctgagccctggcacccagcttgtcgctgaaataagtggagaacaccagccttgagcctcacagttttattttctcctcgttatccatccttcctttcagcaccagtaaggaaaaagaacacctctcttcgcaaaatattttatcaggtgtaaagacttgtttttcttctagggaagaaccgtctggatatatatttgataatgtttttaccaaaaccataggtgtgcttaccatagaaaacccctaatgtcccatgaagatacaatacagaaaaaaatacagaaattaaaaaagtttttataacagtatttctaaatctcagcaagttaaaaagcaatagttaaaaagcatcaagattaatatacttaaaacttaaggtggttttggacaaatgaaaatgaacatttccttcctcagtggcccccgcgccttgtggcttcctttgagactgggcctagggcaggaacagagtcttggtatgggcctcgggtgacccgtgtgcccacccctgctaggccttagatgccacagaatctgagatccagcaatggttcactttaaaaaatcagtggaagggcctggcctgcacacaaggcccgggagtccataggcagccacaatgagacacgtgggtgggggggtcccggtcttggtgctgagggaggtgtgcgggggcctgggggccgcacatccttactctggacgccaggacctgactaggcagaggcgaccttgtgatgacagaaaatgacttgcctaaggccgcctgtgaggtgggagtcagggctgcatgctcctcccctcgaattccnccncntggcctaggatcatcagtagggtctcagttnnnnnncncccggcccg

SEQ ID NO: 89884 - DNA, 1516 bp, Homo sapiens
  misc_feature (1)...(1516): n = a,t,c or g
ggccctggtggacgaacatcctgggactcacctcaagatcctaaccagtctccacaagttccatcttgagaccttgaatcgatagaaaaggcattcgtgttttctgttttttgttttttctccctctctctcgcttcctctctctcttttagtagagccgtggccttgagtcacagcattggcaacgtctacttctaaactacggaatgttttcacactgacggtattattactcagaacgaagggcggggagggctgtccaagtgttcatgagacagtgagttactgagagctcacggggaatcacacagcacagagacaccgacagtcagacaccaagccccaggcctggccctagatgtattttttcttgaggtaccagtaggcaaagtagcccatcccacccagggagcccatgaggaaggacgccccgaagaaggatgggggtttcctcttgaccagccggaaagccattggggatgacggccgacagcagggtggtgtggatgtcacccaggactttccggaaggcaaagcgtctctggaccctctcaaagaaggactgcaggttgggccggctgccatcttcccagtatttcttggacagtcccaggaacttgaggcggtgcagggtggctcccaggaggacatcagcgagggtgaaggcacagccacagagccacagctcgcatttctgcccctcgttctccagcttcctcttctccagctccgcctcaatctggtccagcaccatggccagttccccgaggatcttcttcaggtagctcacatcatcatgctccaagatcttggccatgagcttcttttgtttagaaaggtagggctcggagagctggggctcctcttcatggtccagtttcatgaggtccgtggtggcattggctaaatgtctgcggatctcggccgtggcgtacttggggatcatggagtcggtggtgagctcgggatgcaggatgcagccatgcgtgtaggcatccatgggcagtgcgtccagcagctcccggtactgcagcacccgtgcgtgctgcaggctgcccacctcgggcatcagggccaccacgtgctctcctgtgaaggtgcgctccacatagtcaatgatctggtcatagtcactgatgatgttgtcgcggtggatgatgacgggcacctcctcgcccaggttgagccgcatgaaccagggctccttgtgctcgctctgtggcaggctcacgtcccgctcctcgcacaccaggcccttctcggcgatcaccagccgcaccgggcagttgggggagggggcgaggggatcccgggagctcctttctcctcctccccctggcccgcgccagaaaagccgccagccctcagtgtcaggctccctgcaagggtggaaggagcccgaggaagtgggtcgagccccccaaacagctcagtgtattgggccacgcacctgccaannnnnnnnttccnngncncttccgntagcctntcaggtagctctccgttnnggcagctc

SEQ ID NO: 89885 - DNA, 1909 bp, Homo sapiens
cttgaacacctggttgacatcattacgcccagcttggcacgaggaactggaagaatattaactgttccattgaagaaagtatgggaaaatttgaggaggttgttaagtctgcaagacacatgaatattccagcacgagggtatgtgtcttgtgctctgggctgtccatatgaaggaagtattacaccgcaaaaagtgacagaagtgtctaagagattgtacggcatgggttgttatgagatctctctaggagacacaattggagtgggaactccaggaagtatgaaaagaatgttggaaagtgtgatgaaagaaatcccaccagggtgctcttgctgttcactgtcatgacacatacggacaagccttagcaaatatccttacggccctttcagatgggaattaatgtggtggactccgcagtatccggattaggtggctgcccttatgcaaaaggtgcttctgggaatgtacccactgaggatttgatatatatgcttaatggcctggggctcaatacaggtgtgaatctatacaaagtgatggaagctggtgactttatttgcaaagctgtgaataaaaccacaaactctaaagtagcacaagcctccttcaatgcttgacttgaatggatttatgacgtaccgttgagaagatcaatttcagctacaatactcatctgaaaatcattaatgccaacttgctctgatatgtgaagtaatggacaagagtgggaaaaaagagatccttttcaaaaagattataactggatagattaagtcaacaaaatgcaatatcagtcatcaggtaaattgcaagctgaggataaataataaaacttgtcataattttgaacttggaaaaaagtttcttttgctctcatagaaataactttttaatttagtagatgggaaaattgacttcgtatttccccaagtatcaaatactgtgttaatacttaatcaagcaggcttaacactgtgtacatattgtcagtagtttatgagctcctgcatagtatgcagagtgtgtggcctcaatattatacattatgcctctggatctcaactactcatttgccaagtcagttatgttatggaccaaaagccaaatctccatctgaccctacataattttagcaatagaacttttatatttcaagtatggctaacatctgttaactatttcagtgactttatctggttccaagaggctgtggccaatggcaagatgccatatcctggaaacatattacgacctcccatgtttgttacatgcatccagtttaccacactttacctgtcatcagttatagtaaaaaccagcatggtgttactcaactattgagaaattgtaagctattttttttgtcctgatgtctaaattgcagtgataagaataggttgatacatgtatcataatctacctttataattttcagatcactttcaaattgcccaaggaaatattgtgatcctaagaatattaagataattttaggttaatgaaatacccattttccttttattcatggtgctttgcttacccacattattttttggtgtattttttagtggttattttagaagttgaagtggctgaaattttgtctattgtcttagaattgattgccagaaattgcaagatgtaatatatcaaagtcagggatgaggagcaggaggactattcaagataaacttctgtaacctatgcatattttatgggggcagtattattacaaatggatctgaaatgtcagttctagtatttagagagacttctctaataataccgggtgatattatctttgagtaaatttgaatataaattgaaacataaaaatgagtattgtgaactttctcgggaaatattcattaaaaccattgaaataaaaataaattcaagaaagt

SEQ ID NO: 89886 - DNA, 5537 bp, Homo sapiens
ttttttttttttaaaagaagtagacttttcttgagactttcgtacaaggcaatggacagataaccttaacctcccagagaaaacacacattggccacagaaaaaggcgcttctccggtatacctgccatagttatcagcaactttgaaatggcttctcagactctcacggggttggcttgttgtgtttgcttttgcaaataactcaggcttaagtcctgctactttcagagcctaggggacgcttaaggactaccatcagtttaacacagtggcacttggagcacatgctacttatggtggtgaggaggggtgctggtgtgaagggtctgaacgccttgctttccctctgcagtggtgtgaacaacccaaagggcactacactgggaaaggatgcttgctcagtgtccctgggaggacattttaatccgcaggttggcaggaaccagtgcccctgtggccgcccaactctccataatagaatccttggtcatccatgggccacgtaaaccatgaccacgtctcctgccctcagcgccagcctgcccttcccctggccccccatttgcccatccccaggatcatagtccagagctgctatcatgatctttggagtccacagtgggagtctcttggagttcccctggagcaccagggaggaaccctgggggatggtgagcccctgaaagtcctcgaggtgggccacagaaggcaggtgcccttgggccggagaacgccacctcctatcagtctgctctgtccccacctccatctcagccactaggcgcccggggatattgcccacttgcctgttgcactcgctgaggtagaaatcatgggtgtcctgagagccccacactcttagcaactgccttttctggaagaccagctcctcctctgcagccttgaggttggcagacatcaccagggggttgtaatcagagagggccacaaagaccctggctggagtgttggcccccgtccccagctgttgggggccacccctgggcatcttgatgactttggcggatggagctggacacagtgccgagctgggctcatggagctggcaccctctcttcacccccagagcttgtccttgcctgctgtggggctcaggctccctcctctcctctcgcctctctgtgccccacagatccaagcacagtgcctcctgctcctccttcaaaacgttatggaagtcagatgcatactgttggctggcacccagctggggaggtgtgaacccttgggcatcttgcttttgccgaagtaccctctcaagggcagccttttcctgacacggttctttcctgggcccacactcggtgcgtagatggatgaatcctggagcagggcttttgctggtgcccatgtgctggtagcaattttccttctccccagtctggtcactgactgaaggtggcctgtggttctggggactcttctgaaagagcaggtcctttctacagccctcccaggcctctgcaagctcctgggcttggctgccagcccctgaactcggacattctccttctgagcccaggttggacactggggattgcctccttgggggttcttcaaagaatgcttctaggaacttggcctggggctccccgcagcttccagggttgtgggggctggccttggcactcggaggagccagtgacagcttctgggggcagacggggaaggtgactctgtaggtggatgggtcgccacaagtgtagctaaagggtggagtctctggccatcggtgacacatgaagaagtcctcggggatctgagcaggcactgaatccagggactcaccacagagtgacatggttctcactgagaccttctgccacgtgaggggcacctgtagctgggagaattccaatagggtgctcccagcagtggcatcggcgacctcacaaaccttaagcccatctgcatacacagcataaccggtgacctggactccattggaggacccagctgagtcaatggtcacagggagccagctgaccaccaggacacctggcgaggcatggcgctccaccagcacatccagcggtgggtagggaggtcctgccaagagtgtgtcgaaggtgacggtggaggacatagttccccaatacacctgcagcaagtcccgtggcagccgcacctccacccgcgcccggtagtgcgtgccggggcacaggccctggaaggtgtagcagctcacgcccgctggggtcagggcatgctctcggtcatcaagatataccacatgggggtggcggtggctgctgtagacccaggtgatgttggctgatgtggctgtgacattctgcaggtgtagctgcatgggagccatacggagcacccctttggtccccagaaggggtctggagaggccctgcttccccatgctctgcagcaagcccagctggcaggcttccgtcttggtatccaggatctctgttgctacttctgtcttggagcccaccctgaccatctggcacagccctctgtccaccactccctgggctttcccagataataagctgtcttcctccagagcttcatcctgccccgctgggagttgactggggccaagatcaggggatttggcaggcaggcagcctgggatgtagctgtccggaatctgctccacgaagttggagggcaccagcccccgccggccatcctcaagctccccctcatagaagccatcctcatccatgtccccgaagatatatatgtagtccccagctgtgaggggcagctcaccctcagggtgatcattgggcccctcaaatgggttgtagttatactgagccatgaagatcttgagcttgggggcagcaggagccgccgagccccccatttccagggccagggacacgctgtcaggctccaggtcatccacctcactggctgtgtccctgtccagagtaggggaggacggcacggtggcccacatcgacccctcagaggaggagtttgactgggagctggttttcttggacagaggttggctggcagggactgtctctgaaacttgggggacactggctgactccccaagggcaactgggctctcctcgagggaggcttcccttttctcctgtatgtctctgttgggctgtgacactgcgtagtcttcagcccgtgcgtggaacttgggccttctgctacctttaacttgggactccggcatttgactggtctcccagggctgttcaggagggtgaccaggccgacactggagcgcctgtatctccttccaggaaggatggaggtcacacagggccttctgcgggtcgcgttgcagctgctgctgcctgtcctgcccgcgcgccgcctgctgcaacagctgttcggcgatcaagccggaggcatcgcgctcttgacacgcgcggcccaggtggccgcgcacttcgctattctcagcctccaccttccgcacccagtcggtcttggcctgcagccgcccattctcctccgccagccaggcgtttttgagcagcgccgcctgcagctgtgtctcggcctcctcgccacgtcgccgcgccggggccgcctgcgcgcccagctcctggcactcgcgccgccgctggtccagctcgcgctccagcgccagcatctgccgtcgcacctcctcgcaggttgcgctctggccgcccgcctcgggccaagcgccaccgttgccctgctgaagcatcaactgcctctgcaggcgcagcacttcccgctgggactcgcgctgcaggcggtctaagtctctgacgttgagccactgggtgcaggggccgccccttccagtatgcaggtcgctgcagggacccgaggcgacacgcgcctgcaggaggtggcactcctgccgcagctcttcgatctgcttgtccttggccagcggcgcgctcgcctgctccgacaggtcccgagcgcgctggcgggcaaagacttggcacagctccaggccggcgcaactctcgccgggtataggcgcgctcacggcccggaggttggtctcctgcagctcgcgggcgcggtcagctaggcgccgcgcgagcccggtcagctccgcgcgctttaccttgagccgcttcaccttctcgtctgcctggtaggggcagcctgcacgccgcagctgcttattctcctcttgcagggtataacagcggcgcgccagcacccacaacgccttggccagcagccagttcagctttatcagctcgtggtggcccaggcccgggggtgagggagtcaggacttcgcagggctggctctcagagccttctcctccccgcgggttgctgagtttcctgtgggctgacggtggtggtggcggcgggagtggcgatggtggcggcgagagcctccgggagccaggggtggaggtgtctggtgaggagggccgctcctcggatttggaggccttggggaggctccgggtgctgtcaagcgagcgggaacacgcaggtgcgaagcaatcaagggagctggcgtgcgtggagagcaggccgtctggggagctggagcacgcagaggacaccaggcctagcgagcgggagcgcacaccgacttcagcactcaggctgtctagagatccgagttggcaggcgggtttgggggcgtggcaagagccgctggaggtctggggcagcggttcttccaaggaatgcacagcttgggggtccggtgatcccgacaaagccgggtgcccgcggaagtgcgccaggatgtacttgaggaagagctggcgctccacctccagcgccgcctgcagatagcggatgcgcgccgcctgctcgccgtcagtctgccagcgaagctgcgccaacacttcctgcaggcgacagcggcactgcgccgcggaaacctcggacgcccccgggcggctacagtggccgcggttcaccagctcctcggccagctggcgctgcagctcccgggcttggcgcaccacgccatcgcgctcccggtgcagcagctgctgcagctgccgctgctcggcctccttccagcgcagcagctgccggatctcggcctcgcgttcccgctgcatctcctcttgcagctgccgcaactcccggctgcgctgtgcctcccacttggagcgcagacggtcagccagctgccgccgctcccgctcggcctcctcacgcagctggcgctcccgggcagcgaagcgccgccgttccgcccgccagcctgcccgctccgcctccagctccgcccgtagcttctccagctcccgcctctggttctccagcactgccgccgccgggctggagcagcccggcttcttgggcgacgcgcccaaggggctgggcgagtccttggccattgcggccgcggcccggctggtctccagacttcgcctggcaggcctcagctcgccaacggccgccgccgaccgcccggcgcgccccttccggcgccccctgggggtctccgcgtgccccttccgcctcttggcatgttcccccgcctcctgccgcggatgtctggcccaggcgcctctccaccaagctcctaccctctcccggtccagctttctcac

SEQ ID NO: 89887 - DNA, 2039 bp, Homo sapiens
cacaggttgattataggcctctgtttgcgtatatagtagtcatataagggatatcatgcagtaaaaccatcaggtgcttgtattccccccaatgcttattccaatatatggaatcccgtcgttattcccatcattagaataataaagtgacccctccccatgacgaagcccctataagacatggctaattcatcacccccaagccactcattgccgcaggcccctggtgtggggactgggcggtgagcggatgcgacctgttatctccagcagatactgggggccatggagtctcaggtgggggggggcccggccggaccggccctgcccaacgggccactccttggtacaaatggagccactgacgacagcaagaccaacctcatcgtcaactacctgccccagaacatgacccaggatgagttcaagagtctcttcggcagcattggcgacatcgagtcctgcaagttggttcgggacaagatcacagggcagagccttggctacgggtttgtgaactattctgaccccaatgatgcagacaaagccatcaacaccctcaacggcctcaaattacagacgaagaccatcaaggtgtcctatgccagacccagttcagcatctatccgggatgctaacctgtacgtcagcgggctccccaagaccatgagccagaaagagatggagcagctcttctcccagtacggccgcatcatcacgtcccgcatcctgggtggaccaggttcacaggtgtctcttcggggtgtgggattcatccgcttttgacaagaggatttgaggccgaagaggttattcaaaggattgaatggggcagaagccgctgggcgcagttgaaggcccatcacagttcaagtttcggcgaacaacccaagtcagaagacggggcaggcgctgctcacccacctctaccagtcatccgcccggcgttacgcaggccccatacaccatcagacccagcgtttccggctggacaatttgctcaacatggcctacgcggtcaagaggttctcgccgatcgccatcgatggtatgagcggcctggcgggcgtgggcctgtcggggggcgccgcgggcggctggtgcatcttcgtgtacaacctgtcaccggagccagaccagagcgtgctgtggcagctgttcgggccttttggggcagtcaccaacgtcaaggtcatccgtgatttcaccaccaacaagtgcaagggtttcggcttcatgaccatgaccaactatgacgaggcggccatggccatcgccagcctgaacggctatcgcctggggcagcgcgtgctgcaggtctccttcaagaccagcaaacagcacaaggcgtgagcccaccccgcctgccctcccaccccctccccgggcagcagagagagagagagagaaagagagagagagagagagaaggggcccaagagagacagcacaggcagccccacggacgacgcgagggccccacgtccctgcggaagccacagggtgagcactctggggtgggagggtctgcagggaattgggggggtgccccgggggatcccccgccccatcctcctgccccccaaccccaggctgggctgttcaactctctcgttcttggtttggttccatggtgaaggtttttgtttcttttttcggctaaaaagaatgcagagatgtgcccccacccccaccctcgaccacccccgatgggatggcttggggggctccagggggtgccctcccagacccccttgcccaggcctccccagcacctaggtggggcctggggtaggaggaacaggtttaaaaatccccaaaaaagcgaaccgtgaggaggggtgtgggcacccccggcccagtgccccctggtggaatgcgggggagcaggcagtggggctggaagcagaaacaaaatgaaaaaaaaaggggggtgggaggggaagaaaaactctatttttgtaaaaagggaaaaagacctcgtggagaatttttactggggattcttgaacttgaaaaaaaaaaacacaaaaaaagac

SEQ ID NO: 89888 - DNA, 1106 bp, Homo sapiens
agattcggcactaggggcttggctaaaagtaagggtgtcgtgctgatggccctgtgcgcactgacccgcgctctgcgctctctgaacctggcgcccccgaccgtcgccgcccctgccccgagtctgttccccgccgcccagatgatgaacaatggcctcctccaacagccctctgccttgatgttgctcccctgccgcccagttcttacttctgtggcccttaatgccaactttgtgtcctggaagagtcgtaccaagtacaccattacaccagtgaagatgaggaagtctgggggccgagaccacacaggccgaatccgggtgcatggtattggcgggggccacaagcaacgttatcgaatgattgactttctgcgtttccggcctgaggagaccaagtcaggaccctttgaggagaaggttatccaagtccgctatgatccctgtaggtcagcagacatagctctggttgctgggggcagccggaaacgctggatcatcgccacagaaaacatgcaggctggagatacaatcttgaactctaaccacataggccgaatggcagttgctgctcgggaaggggatgcgcatcctcttggggctctgcctgtggggaccctcatcaacaacgtggaaagtgagccaggccggggtgcccaatatatccgagctgcagggacgtgtggtgtgctactgcggaaggtgaatggcacagccattatccagctgccctctaagaggcagatgcaggtgctggaaacgtgcgtagcaacagtaggccgagtatccaacgttgatcataacaaacgggtcattggcaaggcaggtcgcaaccgctggctgggcaagaggcctaacagtgggcggtggcaccgcaaggggggctgggctggccgaaagattcggccactaccccccatgaagagttacgtgaagctgccttctgcttctgcccaaagctgatatccctgtactctaataaaatgccccccccaaacgttttaatctgttactgtggttttgttttgggtgttttttgttttttttgttgttgttttttttttgcgggggaggggatggtacagactaaacgtggggaaaagaag

SEQ ID NO: 89889 - DNA, 584 bp, Homo sapiens
  misc_feature (1)...(584): n = a,t,c or g
gcacgaggcaggatggagatccctgtgcctgtgcagccgtcttggctgcgccgcgcctcggccccgttgcccggactttcggcgcccggacgcctctttgaccagcgcttcggcgaggggctgctggaggccgagctggctgcgctctgccccaccacgctcgccccctactacctgcgcgcacccagcgtggcgctgcccgtcgcccaggtgccgacggaccccggccacttttcggtgctgctagacgtgaagcacttctcgccggaggaaattgctgtcaaggtggtgggcgaacacgtggaggtgcacgcgcgccacgaggagcgcccggatgagcacggattcgtcgcgcgcgagttccaccgtcgctaccgcctgccgcctggcgtggaatccggctgccgtgacgatccgcgctgatcccccgagggcgtccttgtccataccaggccgcacacagcgatcggcccaggccccacacgccagccgcagctcaagtaaggaggagggctgggccgcgcccgaatncaacgcgcctcctcaggctccctctattaaagccgatctgactccgcccaaaa

SEQ ID NO: 89890 - DNA, 1685 bp, Homo sapiens
atggataaattcctcgacacatacacgctcccaagactaaaccaggaagaagttgaatccctgaatagtccaataacaggctctgaaattgaggcaataattaatagcctaccaaccaaaaaaagtccaggaccagatggattcacagccgaattctaccagaggcacaagcaggagctggtaccattccttctgaaactatgccaatcaatagaaatagagggaatcctccctaactcatttcatgaggtcagcatcatcctgataccaaagcctggcagagacacaacaaaaaaagagaattttagaccaatatccctgatgaacattgatgcaaaaatcctcagtaaaatactggcaaaccgaatccagcagcacatcaaaaagcttatccaccatgatcaagtgggcttcatccctggggtgcaaggctggttcaacatacgcaaatcaataaacataatccagcatataaacagaaccaatgacaaaaaccacatgattatctcaatagatgccgaaatggcctttgacaaaattcaacagcccttcatgctaaaaactctcaataaattagtgctacaggctacacaggaagcatggcaccagccactgtttctagggatggttcaggaagcagaaggtgaatgggggcaggcatatcacactgtggaagctggaacaacggagtggaggtgccacactttacaaaaccagaactcactcactatcacaaagacagccatgagccttaaagaggagggagaaggagagatcagggtagaaagtttattccaaggaataacagagaaattcccaagcctagagaaagattatcagtattcaagtacaacaggtttacaggacaccaaacagattcaacccaaagaagacttcctcaaggcatttaataatcaagctcccaaagagcccaggctgcgcttccctggtcaggcacggcacgtctggccggccgccaggatgcaggccccgcacaaggagcacctgtacaagttgctggtgattggcgacctgggcgtggggaagaccagtatcatcaagcgctacgtgcaccagaacttctcctcgcactaccgggccacaatcggcgtggacttcgcgctcaaggtgctccactgggacccggagactgtggtgcgcctgcagctctgggatatcgcaggtcaagaaagatttggaaacatgacgagggtctattaccgagaagctatgggtgcatttattgtcttcgatgtcaccaggccagccacatttgaagcagtggcaaagtggaaaaatgatttggactccaagttaagtctccctaatggcaaaccggtttcagtggttttgttggccaacaaatgtgaccaggggaaggatgtgctcatgaacaatggcctcaagatggaccagttctgcaaggagcacggtttcgtaggatggtttgaaacatcagcaaaggaaaatataaacattgatgaagcctccagatgcctggtgaaacacatacttgcaaatgagtgtgacctaatggagtctattgagccggacgtcgtgaagccccatctcacatcaaccaaggttgccagctgctctgggctgtgccaaaatcctagtaggcacctttgctggtgtctggtaggaatgacctcattgttccacaaattgtgcctccaatttta

SEQ ID NO: 89891 - DNA, 1111 bp, Homo sapiens
atgtccaagccccccgacctcctgctgcggctgctccggggcgccccaaggcagcgggtctgcaccctgttcatcatcggcttcaagttcacgtttttcgtctccatcatgatctactggcacgttgtgggagagcccaaggagaaagggcagctctataacctgccagcagagatcccctgccccaccttgacaccccccaccccaccctcccacggccccactccaggcaacatcttcttcctggagacttcagaccggaccaaccccaacttcctgttcatgtgctcggtggagtcggccgccagaactcaccccgaatcccacgtgctggtcctgatgaaagggcttccgggtggcaacgcctctctgccccggcacctgggcatctcacttctgagctgcttcccgaatgtccagatgctcccgctggacctgcgggagctgttccgggacacacccctggccgactggtacgcggccgtgcaggggcgctgggagccctacctgctgcccgtgctctccgacgcctccaggatcgcactcatgtggaagttcggcggcatctacctggacacggacttcattgttctcaagaacctgcggaacctgaccaacgtgctgggcacccagtcccgctacgtcctcaacggcgcgttcctggccttcgagcgccggcacgagttcatggcgctgtgcatgcgggacttcgtggaccactacaacggctggatctggggtcaccagggcccgcagctgctcacgcgggtcttcaagaagtggtgttccatccgcagcctggccgagagccgcgcctgccgcggcgtcaccaccctgccccctgaggccttctaccccatcccctggcaggactggaagaagtactttgaggacatcaacccggaggagctgccgcggctgctcagtgccacctatgctgtccacgtgtggaacaagaagagccagggcacgcggttcgaggccacatccagggcactgctggcccagctgcatgcccgctactgccccacgacgcacgaggccatgaaaatgtacttgtgaagggccccgccggtcacctccccaacctgctcctgatggggcactgggc

SEQ ID NO: 89892 - DNA, 463 bp, Homo sapiens
cccacgcgtccgggcgcctgtgcttgaggttgggggttgcgtcgctctctggtaaaggcgtgcaggtgttggccgcggcctctgagctgggatgagccgtgctcccggtggaagcaagggagcccagccggagccatggccagtacagtggtagcagttggactgaccattgctgctgcaggatttgcaggccgttacgttttgcaagccatgaagcatatggagcctcaagtaaaacaagtttttcaaagcctaccaaaatctccctactgccaataaagggaaaataagagatgctcatcgacgaattatgcttttaaatcatcctgacaaaggaggatctccttatatagcagccaaaatcaatgaagctaaagatttactagaaggtcaagctaaaaaatgaagtaaatgtatgatgaattttaagttcgtattagtttatgtatatgagtactaagtt

SEQ ID NO: 89893 - DNA, 4420 bp, Homo sapiens
atggcaaaggtcattctgaagcagagtaaacaatgcaagaatctgcttacctgcaaagtggcccaggtctgccccgtatgtggctgtcttcattgttatttctggtggctctcaggtcttgagtcaagacgtcccagctctccactcatcgatattaaacccatcgagtttggcgttctcagcgccaagaaggagcccatccaaccttcggtgctcagacggacctataaccccgacgactatttcaggaagttcgaaccccacctgtactccctcgactccaacagcgacgatgtggactctctgacagacgaggagatcctgtccaagtaccagctgggcatgctgcacttcagcactcagtacgacctgctgcacaaccacctcaccgtgcgcgtgatcgaggccagggacctgccacctcccatctcccacgatggctcgcgccaggacatggcgcactccaacccctacgtcaagatctgtctcctgccagaccagaagaactcaaagcagaccggggtcaaacgcaagacccagaagcccgtgtttgaggagcgctacaccttcgagatccccttcctggaggcccagaggaggaccctgctcctgaccgtggtggattttgataagttctcccgccactgtgtcattgggaaagtttctgtgcctttgtgtgaagttgacctggtcaagggcgggcactggtggaaggcgcatgattcccagttctcagcaccaggcttgcccgccgatcaacaatttttcgccgatctgttcagcggcctggtgcttaacccgcaactactggggcgcgtctggtttgccagccagcctgcctcgttgccggtgggcagtttatgtattgattttccccgtctggatatcgtgctgcgcggcgaatacggcaatctgctggaagcaaagcagcaacgtttggtggaaggagaaatgctgtttattccggcgcgcgcggctaatttaccggtcaacaacaaaccggtgatgctgttaagcctggtgttcgctccgacctggcttgggttatcgttttacgatagccgcaccacgtcgttgttgcatcctgctcgccagatccagcttcccaagcttgcaacgcggtgaaggtgaagcgatgctttccggccctcaccctttttagccgttcgccgttggagcaaaatatcattcagccgctggtgttaagtttgctgcatctttgcggtagcgtggtgaatatgccgccgggcaattcgcagccgcgcggcgattttctctatcacagcatttgtacctgggttcaggataattatgcccagccgctcacccgcgagagcgtggcgcagttttttaatatcacgcccaatcatctgtcaaaactgtttgctcagcatggaacgatgcgttttatcgagtatgtgcgttgggtgcgaatggcgaaggcgaggatgattttgcagaaatatcatctgtcaattcatgaagtggcacagcgttgcggttttccggatagcgactatttttgtcgcgttttccggcgtcagtttggcatggattatgtcgatatcctgcaaattcatcgctgggattacaacacgccgatcgaagagacgctggaagccctcaacgacgtggtaaaagccgggaaagcgcgttatatcggcgcgtcatcaatgcacgcttcgcagtttgctcaggcactggaactccaaaaacagcacggctgggcgcagtttgtcagtatgcaggatcactacaatctgatttatcgtgaagaagagcgcgagatgctaccactgtgttatcaggagggcgtggcggtaattccatggagcccgctggcaaggggccgtctgacgcgtccgtggggagaaactaccgcacgactggtgtctgatgaggtggggaaaaatctctataaagaaagcgatgaaaatgacgcgcagatcgcagagcggttaacaggcgtcagtgaagaactgggggcgacacgagcacaagttgcgctggcctggttgttgagtaaaccgggcattgccgcaccgattatcggaacttcgcgcgaagaacagcttgatgagctattgaacgcggtggatatcactttgaagccggaacagattgccgaactggaaacgccgtataaaccgcatcctgtcgtaggatttaaataagagtccaggcctgatgagacgtgacaagcgtcacatcaggcatcgggtgcacaactcggacagaataccaagcgcccagtgatgtccgataaaatacaggatgcgtgcgaaaatcaccccggcgacagatatcgtcgatcatgatccccatgccgccatgcacattgcgatcaaaccagcggatcggccacggcttccacatatccagaatacggaaaatcacaaacccggcggcaacccactgccagtcattggtcggcagcgccatgagcgtgatccacataccaataaattcgtcccagacaatgctgccatgatcgtgcacacccatgtctttcgccgtttgatgacaaagatagacgccgatacagatccccagcatcaccaccagcgagtagagctgccagggcaaaaaggtcatcagataccagaacggaatcgctgccagcgagcccatcgtgccggggatcatctagagtgcgactcgtattcaccgccttgcaatataggataccgaatcatggcacaagtcattaatacccacagcctctcgttgatcactcaaaataatatcaacaagaaccagtctgcgctgtcgagttctatcgagcgtctgtcttctggcttgcgtattaacagcgcgaaggatgacgcagcgggtcaggcgattgctacccgtttcacctctaacattaaaggcctgactcaggcggcccgtaacgccaacgacggtatctccgttgcgcagaccaccgaaggcgcgctgtccgaaatcaacaacaacttacagcgtgtgcgtgaactgacggtacaggccactaccggtactaactctgagtctgatctgtcttctatccaggacgaaattaaatcccgtctggatgaaattgaccgcgtatctggtcagacccagttcaacggcgtgaacgtgctggcaaaaaatggctccatgaaaatccaggttggcgcaaatgataaccagactatcactatcgatctgaagcagattgatgctaaaactcttggccttgatggttttagcgttaaaaataacgatacagttaccactagtgctccagtaactgcttttggtgctaccaccacaaacaatattaaacttcctaatgctgttggtttgaaccttcctcctctgccatgtgggatgtttcaggactcagtgacctttgaggatgtggctgtgaacttcacccaggaggagtgggctttgctgggtccttcccagaagaatctctacagagatgtgatgtgggaaaccttcaggaacctgatgtctgtagaagtcatatggtagagagagtctgaaggtaaggaagatggtcaatgtgaagagatcttcagccttgttccaaatggtatagtgaagacgacttttactggagtcaaatcatgtgaaagcagtgtgtgtgaagaaggcaatatggatcattcatctcttaattgctgcatcagagctgacactggacacaaatcagatgagtgtcagcaacatagaagccacataagcagtgtgtgaaaaccttcagctattgccactcctttcaaacacatgaaaggcctcacactggaaagaaactccatgtaagaaatgtggaaaaaccttcatttctgttcaaaccttttgaagatacatggtaatgcacagtgaagatgaaccttataaatgtaagttttgtgggaaggcctttgataatctacatttatatcttacacatgaaagaactcacactggagagaaaccctatgaatgtaataaatgtgggaaagccttcagttgttccagttccattcgaaaacatgcaagaattcacactggagagaaaccctatatatgtaaacaatgtggcaaagcctttagatattccagttctattcgaaatcatgaaaacactcacactggtgaaaaaccctgtgaatgtaagcaatgtgggaaagcctttagttattccagttactttcgaatacatgaaagaattcacactggagagcaggcctacatccagatcacgtatgtggaaccgtactttgatacctacgagctcaaggaccgggtgacctactttgaccgcaactatgggcttcgcacattcctgttctgcacgccgttcacgccggatgggcgcgcacacggggagctgcccgagcaacacaagcgtaagacgctggtcagcaccgaccacgccttcccctacatcaagactcgcatccgtgtgtgccaccgggaggag

SEQ ID NO: 89894 - DNA, 1010 bp, Homo sapiens
  misc_feature (1)...(1010): n = a,t,c or g
ttttttgttccccttctacataaaaacctcagtcacccactcctgagtggagatgggcagaggctctggcccctgctcctctggcttctcagcagcgtgctttcttattgctgcagcaaggcttgaagagatgtgtgtcaatgaggacttccccaaaacggcctttatagatcgatcccacaacatatcttctgtcttttccagtaagtggagatctaaaaaggaaaaaactgggtggttccggttagaaccngagaagcccacccctgtatctgagcccgtccatctgaactggttaactgtaaacaagggggattgagctgggggaggcactttgaggtggtactgtgagcatcagaattatgaccgtttaaattccttctgcagtttactgatctgggtgccttttaatcctgttcccagataagagttttcactttctttggtttcaatgtagtctttagaactgggtccagcccttgcatctaccacatgattccagttttttttttgatcctgctggcaacttcttccatcttttcaaaaagcaggacaccaggcattgccagatgtctcctgaaacgagtctcatgcaatccaaaacagctcttggaagtcctttttcatagcgtttactgtcagtgaatcggagaactggaggacttagctcctgaaataccagcacccctctatacttcggtacatctttggcttgtgaaaaccaaacatctttttctttctgggcaatagtaggcctggtctgaagtcttaggtcaaattagctgtccactcagatgttgtcaacttctcgtcctggtttcaggggttgaaggctgtttggtgaatcagagacagggatctttggtgggagtcatggtccattcaggaagttgtgccttccaaaagcaagccgttccacgcgcaataatgtccccgaggtgcggagtgcacgccaggccagtccccctcaagcgctccctcctcatcgactgccttgtctagaaagatag

SEQ ID NO: 89895 - DNA, 2967 bp, Homo sapiens; identical to SEQ ID NO: 60934

SEQ ID NO: 89896 - DNA, 1249 bp, Homo sapiens
taataaagttgttgtttatttccacctgccagctccttcatggggcgaggggtcggaggctggagacccgggaggaaagcaagtcaagacaaatgcttgacccacggggactccaggcctggcctgcagccactctggtggacttggctttgggtctggggtcttagtgtcttaggcttgagggagaggggcagtgaagaggtgccctcagcctccccattaccccgcctctcctccacagaacccacatcctaggctggcctagccacaagcaagggggctcaggaggggcccacgcggatgtgagggttcatgagtgggtccaggttgggatcgctgtcagctgcggcccggcctaggcgagacatgagggcaaggagggccaggaagcccagcagtcccaagagtagcagcagccccgcccgctggagcagggtcagcggccgcttccgagacccagtcccggctccttagcagccgggccagccaacccaaggccggccgacgtcggtacttgtcatcgtcacagtctccatggaggcctggtgtccggtcatcatcccgcgtatcatacaccttcctaggggcgtgagtcaagggctcaggattgcccatgtggatcactgtgtgctgctcgggccggcctggggaagctgggggccggggggcctggctgtagaaggctggggcagcagaggcgctgtctacctcctctggtccaggggtacttgctggcattaaaactagaccagtcagagaagtcagacgtgtttgagggggctcgggctctgggctcaccacctcatcgatcagagggaggcccagtcctgcccgggcccagttgactgtggccagcttctctctcagtgcggaggccacggggcaagccaggttggttggggggaagatggggccattgcagctggggcactgatagccgggcaggtgccgtgtttcggggtagctgtgcagcacgttcatttgggccagcccagtgaaagagatcatagcagacaaggcgggtcgtctctcggctggccaggggtatgttgcacaggcgggcaatgggggttgtagtcgctatctaggatctcttgcaggtatgacctgacgatgcacttggcgtgattggctaccaggcagtgctcgcagacgttgacccgatgttcgaagcagaacaggttggtcacctttctcttggggcacttacaaagccccatgatcgatccccagtctctgtgtttactga

SEQ ID NO: 89897 - DNA, 2849 bp, Homo sapiens
gaattcgggttttttttttttgacgtgtctatcggaacgactttatttcagtacactgggccccaccaggcaatgtggtttgtgcgaggctgtgcgagggacaggcttgggctaagagaagggaggtgagttggttaagcgcactgcagtccgcggggcgctacgttgctttcacacatacctgctgctgtggacccacacctggcaggggcctttggtcatagacggcgtgggggagaatactgtgtgaagtctggattggggtgggtcttggtgtcacaggtgagggtgccggtgaagacaggctggccccagctttgcaccatctaggctgaaggctttggaccactcctaggtgtcaggcctggctccattagctcctggcactctggtctggcccactccctccttaaccaagcaggtccaaggtcaagaatggcacaagatcagcccagaggggccttcccacctctacaacctagtcccctggtcagctacagtggcaaaaggcaacttggtaaattgcagctttctccagtcttaagggcactggctctccaacacccctcccttgcttaggggcctctgccaaagaaaaattttacctcctgtttcagaaaatctaaccagcaaccagcctgttgattccagggcagtgagaagaggaaaagggagaaagagcctggtgggagtgtctttgagtgtagcttccaatctcaaatggtcctggaacctgtggacactgtcagctcaccatcagctgggagaggtggggccctggaggctaagcttaggtgctgtaaacattagtgtagcaaggcaggaggcagcaagctccctctctccagcccctaactgaacaaacacttcaataaataaaacggtttgaagatggcattgcaacaagaacagatggaaagcgaggtcctggaaccagcaggtgccttaaactctcccaaggcccccgaaaggggactgggctgggaacattaactctgcagccattcagagggaggactgctcctgccctccttcagtggccggtgtggtcctgttccctggtgaacatgagggcctcctgctctctcctgactccagtctctgtaatagcttcttggggtgcttttccagcctcccaaaccaaaatggcaacaaaaccagacagaactcaaccccagtcccagtcctcagtgtgcagtcaggaggcatcgatagtggaggcagcagctgcctggggcctcagggcaccctgggggtgggggtgagggtggggccagcccagcctaggatggtcagcagcaaggtgtcccgggggatggcttacctccctctgtctccctgtggtagtaaacggagtcccccacagccagtcccccacagccagccagagcgcacctgaggagggagcacagcctctgccagcgctcttccctgtcaggagccagttagtggtcaacccccaggcctcaggcatcatcaccactgcaggtagttcatcgtcctttctgggcccagggtcccagggccacacggcactcgcatgtgcacacacactcatatccacacacgcactcacacacaggcagttcctcgcaaacactccgactcaagaaagcgagttttaaagtggagttaacttcagagagaggtgaagatgatgtcccgacattagaaggtttttctgtggatggatcgggcaccgtcttcctcatattcctttttggagacccacatcttcttaaaggtgtccagggaggcaaggatggagcccccaatccacgtggaatacagtctctcctgaggtgcagatatcctgatcttcacatcttttggagctagtttcttcacttcactcaggagcctgtcaccaaaacctttgaacagggtagagcctcctgagaggacaatgttagagaaaagcgtgcgccgcaggtccatgtctgacttctgaatggcgaacaccaggacctcgtggatgccttcactctcctctccaatcaaatctggcctgaagagcaactcaggggcccggaatcgggaaggaccaatctcaatggtgctgccatcaggcaggtagtactgagctttctctgtctctagcgtctcatccttttgggggtttatggataggtaacaggctctttcttttatggccttgacaatctcaaactcagaggatgagtggaagtcgtagccctccttacgcaggtagaggcgcaggaagcgagagacgtcccggcccgcgatgtcgatgcgcatgatggagtggggcatggcaaagccctcatagatgggcacagcatgggtgactccatccccagaatccagcaccacccctgtggtcctgcctgtagcgtaaaggctgagtacagcttggcatggagatgaaaagagcgggcacattgaaggtctcgaagaaaacttcggcagctcggtttccggttttttcgtgggtttaaaggcgcctcagtcaggagcacaggatgctcctctgagaaagtctgcagctggtccttagaatagacatattgccaaatgcgttccatgtcgttccaatccttgacgatgccatgctccatgggatagcggattgaaagcagccctcggtgctcctcagctttggggccaatgaagatgtcgccttcaagggctcctgccatgacacgaacgtgcttgggtcggcccacatagtttggaaagcagtatttggggatctgatcaccagcaaaaccagctttaatcacaccggatccgttgtcgatcacgacaggctggttggcgatcacatcgtaggactccatggcagaggaatctctccttctggggaaggaactgcccagccgggtccg

SEQ ID NO: 89898 - DNA, 2562 bp, Homo sapiens
gggatgggggcggagtccagggcgtgggggggccggtttgttgtggtcgccattttgctggttgcattactgggtaatcggggccctggcttgccgcgtccgccggataccctcagccagtgggcaggtctgagctcgggctccccgagcagtttgagtccccttgcccgctccttcaggtctcagcggcggtggcagccgaggtgcaggatgcaagaaggcgccccccggccgggctcccgctccaggcctcgctcccctgcggccctctgagcccaccatggccgtcccaccgggccatggtcccttctctggcttcccagggccccaggagcacacgcaggtattgcctgatgtgcggctactgcctcggaggctgcccctggccttccgggatgcaacctcagccccgctgcgtaagctctctgtggacctcatcaagacctacaagcacatcaatgaggtatactatgcgaagaagaagcggcgggcccagcaggcgccaccccaggattcgagcaacaagaaggagaagaaggtcctgaaccatggttatgatgacgacaaccatgactacatcgtgcgcagtggcgagcgctggctggagcgctacgaaattgactcgctcattggcaaaggctcctttggccaggtggtgaaagcctatgatcatcagacccaggagcttgtggccatcaagatcatcaagaacaaaaaggctttcctgaaccaggcccagattgagctgcggctgctggagctgatgaaccagcatgacacggagatgaagtactatatagtacacctgaagcggcacttcatgttccggaacccacttgtgcttggtatttgagctgctgtcctacaacctgtacgacctcctgcgcaacacccacttccgcggcgtctcgctgaacctgacccggaagctggcgcagcagctctgcacggcactgctctttctggccacgcctgagctcagcatcattcactgcgacctcaagcccgaaaacatcttgctgtgcaaccccaagcgcagcgccatcaagattgtggacttcggcagctcctgccagcttggccagaggatctaccagtatatccagagccgcttctaccgctcacctgaggtgctcctgggcacaccctacgacctggccattgacatgtggtccctgggctgcatccttgtggagatgcacaccggagagcccctcttcagtggctccaatgaggtgtgcccccaggaaggggtcgaccagatgaaccgcattgtggaggtgctgggcatcccaccggccgccatgctggaccaggcgcccaaggctcgcaagtactttgaacggctgcctgggggtggctggaccctacgaaggacgaaagaactcaggaaggattaccagggccccgggacacggcggctgcaggaggtgctgggcgtgcagacgggcgggcccgggggccggcgggcgggggagccgggccacagccccgccgacctaccctccgcttccaggacctggtgctgcgcatgctggagtatgagcccgccgcccgcatcagccccctgggggctctgcagcacggcttcttccgccgcacggccgacgaggccaccaacacgggcccggcaggcagcagtgcctccacctcgcccgcgcccctcgacacctgcccctcttccagcaccgccagctccatctccagttctggaggctccagtggctcctccagtgacaaccggacctaccgctacagcaaccgatattgtgggggccctgggccccctatcacagactgtgagatgaacagcccccaggtcccaccctcccagccgctgcggccctgggcagggggtgatgtgccccacaagacacatcaagcccctgcctctgcctcgtcactgcctgggaccggggcccagttacccccccagccccgataccttggtcgtcccccatcaccaacctcaccaccacccccggagctgatggatgtgagcctggtgggcggccctgctgactgctccccacctcacccagcgcctgccccccagcacccggctgcctcagccctccggactcggatgactggaggtcgtccacccctcccgcctcctgatgaccctgccactctggggcctcacctgggcctccgtggtgtaccccagagcacagcagccagctcgtgaccctgccccctccctggggcccctcctgaagccataccctcccccatctgggggccctgggctcccatcctcatctctctccttgactggaattgctgctacccagctggggtgggtgaggcctgcactgattggggcctggggcaggggggtcaaggagagggttttggccgctccctccccactaaggactggacccttgggcccctctccccctttttttctatttattgtaccaaagacagtggtggtccggtggagggaagaccccccctcaccccaggaccctaggagggggtgggggcaggtagggggagatggccttgctcctcctcgctgtacccccagtaaagagctttctcacaaaaaaa

SEQ ID NO: 89899 - DNA, 4841 bp, Homo sapiens
gagaatcagagagagagagagagtctgtgtctctgggaaagaagaacatctctgcttcacagtgatttgcgctgggggagaggcatcaattggcttcggacccaagggggagacgagaccaggtcaccccggttaagaccaagtgagcgttgcccctccctctcccaactctctacccgggaatgtctcggcgaaagcagcggaaaccccaacagttaatctcggactgcgaaggtcccagcgcgtctgagaacggtgatgctagcgaggaggatcacccccaagtctgtgccaagtgctgcgcacaattcactgacccaactgaattcctcgcccaccagaacgcatgttctactgaccctcctgtaatggtgataattgggggccaggagaaccccaacaactcttcggcctcctctgaaccccggcctgagggtcacaataatcctcaggtcatggacacagagcatagcaaccccccagattctgggtcctccgtgcccacggatcccacctggggcccagagaggagaggagaggagtcttcagggcatttcctggtcgctgccacaggtacagcggctgggggaggcgggggcctgatcttggccagtcccaagctgggagcaaccccattacctccagaatcgacccctgcaccccctcctcctccaccaccccctccgcccccaggggtaggcagtggccacttgaatatccccctgatcttggaagagctacgggtgctgcagcagcggcagatccatcagatgcagatgactgagcaaatctgcaggcaggtgctgttgcttggctccttaggccagacggtgggtgcccctgccagtccctcagagctacctgggacagggactgcctcttccaccaagcccctactacccctcttcagccccatcaagcctgtccaaaccagcaagacactggcatcttcctcctcctcctcctcttcctcttcaggggcagaaacgcccaagcaggccttcttccacctttaccacccactggggtcacagcatcctttctctgctggaggggttgggcgaagccacaaacccacccctgccccttccccagccttgccaggcagcacagatcagctgattgcctcgcctcatctggcattcccaagcaccacgggactactggcagcacagtgtcttggggcagcccgaggccttgaggccactgcctccccagggctcctgaagccaaagaatggaagtggtgagctgagctacggagaagtgatgggtcccttggagaagcctggtggaaggcacaaatgccgcttctgtgccaaagtatttggcagtgacagtgccctgcagatccaccttcgttcccacacgggtgagaggccctataagtgcaatgtctgtggaaaccgttttaccacccgtggcaacctcaaagtgcatttccaccggcatcgtgagaagtacccacatgtgcagatgaacccacacccagtaccagagcacctagactatgtcattaccagcagtggcttgccttatggtatgtccgtgccaccagagaaggccgaggaggaggcagccactccaggtggaggggttgagcgcaagcctctggtggcctccacaacagcactcagtgccacagagagcctgactctgctctccaccagtgcaggcacagccacggctccaggactccctgctttcaataagtttgtgctcatgaaagcagtggaacccaagaataaagctgatgaaaacacccccccagggagtgagggctcagccatcagtggagtggcagaaagtagcacggcaactcgcatgcaactaagtaagttggtgacttcactaccaagctgggcactgcttaccaaccacttcaagtccactggcagcttcccgcttcccctatgtgctagagcccttgggggcctcaccctctgagacatcaaagctgcagcaactggtagaaaagattgaccggcaaggagctgtggcggtgacctcagctgcctcaggagcccccaccacctctgcccctgcaccttcatcctcagcctcttctggacctaaccagtgtgtcatctgtctccgagtgcttagctgtcctcgggccctacgccttcattatggccaacatggaggtgagaggcccttcaaatgcaaagtgtgtggcagagccttctccaccaggggtaatctgcgtgcacatttcgtgggccacaaggccagtccagctgcccgggcacagaattcctgccccatctgccagaagaagttcaccaatgctgtcactctgcagcagcatgtccggatgcacctggggggccagatccccaacggtggtactgcactccctgaaggtggaggagctgctcaggagaatggctccgagcaatctacagtctccggggcagggagtttcccccagcagcagtcccagcagccatcaccggaagaggagttgtctgaggaggaggaagaggaggatgaggaagaagaggaagatgtgactgatgaagattccctggcagggagaggctcagagagtggaggtgagaaggcaatatcagtgagaggtgattcagaagaggcatctggggcagaggaggaggtggggacagtggcggcagcagccacagctgggaaggagatggacagtaatgagaaaactactcaacagtcttctttgccaccaccaccaccacctgacagcctggatcagcctcagccaatggagcagggaagcagtggtgttttaggaggcaaggaagaggggggcaaaccggagagaagctcaagtccggcatcagcactcaccccagaaggggaagccaccagcgtgaccttggtagaggagctgagcctgcaggaggcaatgagaaaggagccaggagagagcagcagcagaaaggcctgcgaagtgtgtggccaggcctttccctcccaggcagctctgggaggagcattcagaagacccaccccaaggaggggccgctctttcacttgtgttttctgcaggcagggctttcttgagcgggctaccctcaagaagcatatgctcctggcacaccaccaggtacagccctttgccccccatggccctcagaatattgctgctctttctctagtccctggctgttcgccttccatcacctccacagggctctccccctttccccgaaaagatgaccccacgatcccatgagcctgtttttctgtacctgctgctctttgtcccacagagcagaaacagcttcacaaaaggacctcccagagttatgagccctgattttgtctttttctctaagttcttaacatgttatgtccctagtggcttttctgtagtccctgagcttggaaattactgtgcttacaaggggatggccccctaaggaatttttcttccctcctcattctttgtacctgaggaacatagattctctgcagctttctcaaggggaaccctctccagcttccctggtgtgacccttcttccccctcctctctcctctccctttccctttggtaggtgcacctgagcacctacatttggcattgcagcctagccaaaaagggctggcagctgtctctggagggcccagtgccactcctctggggtgacctttctgctcagctggtgggtatgggtcccctatctttctagaaccagtatgtggcattcctgtcaaatggcctgcccatgaagccctggaattccagctccacctccactaccactccaagcctggccccaccagtgctgtttggcctaggaactgtggctgggaaggtgcctccaacaatgggatccagggaagccaaggagaagacagcccccctcctatttcagcctcctgcacccaaggcagtgcctgagaagcccatcatagacaagaagtagcaaactgtacattccttcttcctccccctgctccagaaggtgccggtactgaagatgctccagtaattggtgacccaaccctaggaagtagggagaaatgaaggaagggcataggaaaattttcccagtaaatcccctgatggtcacattaaggtaaaggttttggctggtcagtgtgccaagacctctccagcttctcattcatgatgacctctcaaagttgggaaacaagctgatttcttgccaagaggtctcccaggagatatttgggaaatgtgaagttcgtatctttaaggagcatttttggtcagcatggttgatgaactaatgatgagagagttaaggaatgttgctagaacatagggcttgctggtacctatgtgactaagaaagggacatgatgtaagggaaaaggcctcaaattcttgtgaatgtggacattctcgttaatattcttttgggctaatagtgacatagtgtgcagaggtgtaccagggatcatgggggatttcctagcactagtatgcttctagttttagataactccctcctttattccctggccccttgtattttccttatcttcctctttcaagacccctacccattttgcctatccgtaggctggggcttgtgtctttgtcattgtctggttcttaagagtcccagactttgggagaccagctccaggtggcgtcctccctgcctctccgtcttgtaatgagttgtagtatttactcttaacataggatcatttggaacaggagttctgaggaggagagagtgagggttttgctattgactgacttgaacgatggcttctcctcaagctgtaggctccagagcttcctaacctagtaaaatgtcaagaacaggacgggagatattagtgtctttccctctatcattaaaagtgttttaaccaagaaaaaaag

SEQ ID NO: 89900 - DNA, 6413 bp, Homo sapiens
acaacttgagaccattatcctttgcattgtttttaggagacccaaacatggcaaacctggaagaaagcttcccccgaggaggtacaagaaagatccacaaaccagagaaagctttccagcagtcagttgaacaagacaacttatttgatatttctactgaagagggatccaccaaaagaaaaaagagccagaaggggccagcaaaaacaaaaaagttgaaaatcgaaaagagagaaagcagcaagtccgcaagagagaagtttgaaatccttagtgttgagtccctgtgtgagggaatgcgtattttgggttgcgtgaaagaggtgaatgaactggaactggtgattagtctccccaatggcctccagggctttgtgcaagtcactgaaatctgtgatgcctacaccaaaaagctgaatgagcaggtgacacaagaacaacctctgaaggacctacttcacttgcctgaacttttctcacctggaatgctggtaagatgtgtggtgagcagtctgggcatcacagacaggggcaagaagagtgtcaagctgtctctgaaccccaaaaatgtcaacagagtgctgagtgctgaggccctgaagcctggcatgctacttacaggtaccgtatccagcctggaagaccatggctacctagtggacattggtgttgatgggaccagagcttttctgccactgctgaaagcccaggagtacatcagacagaagaacaaaggtgctaaactaaaggtgggtcagtacctgaactgcattgttgaaaaggtgaaaggcaacggaggagttgttagtctgtctgttggtcactcagaggtttctacggccattgctactgaacagcagagctggaaccttaataacttgctaccaggactggtggtcaaagctcaggtacagaaggtgactccatttggccttacgctaaacttcctcacattcttcacgggcgtggttgactttatgcacctggatcccaagaaagctggaacatatttctcaaatcaggcagtgagggcctgcatcctttgcgtccatcctcgaaccagagttgtgcacctgagcctgcgccccatcttcctacagcctggacgcccactcacccgactctcttgccagaaccttggagcagtgctggatgatgttcctgtccagggttttttcaaaaaggctggggccacctttaggctgaaggatggggttctggcctatgcccggctcagccatctctctgattctaagaacgtcttcaatcctgaggccttcaagccagggaacactcacaagtgtagaattattgactacagccaaatggatgaactggccttgctctctctacgaacgtctattattgaagctcagtaccttagatatcatgacatcgaacctggggcagtggtaaagggcacagtgctaaccataaagtcatatgggatgctggtgaaggtgggcgagcagatgaggggcctggtacctcccatgcacctggctgacatcctgatgaagaatccggagaagaagtaccacatcggggatgaggtcaagtgccgggttttgctttgtgaccctgaagccaagaagctgatgatgaccctgaaaaaaaccctgattgagtccaaactacctgtcattacctgctatgccgatgccaagcctggtctgcagacacatggcttcatcatcagggtcaaggactatggctgcattgtgaagttctacaacaatgtgcagggactggtgcccaagcatgagctcagtactgagtatatccctgacccggagagagttttttacactggccaggtggtgaaggttgtcgtattgaactgtgagccatccaaagagaggatgctcttatccttcaagctgtcgagtgatccagagccaaagaaagagcctgcaggacacagtcagaagaaaggaaaagccattaacattgggcagttggtagatgtgaaggttttagagaagaccaaagatgggctggaggtggctgtcctgccccacaacatccgtgctttcctccccacatctcatctgtcggaccacgttgccaacggcccattgttacatcattggctccaggcaggtgacatccttcaccgagtcctgtgtctgagccagagcgaggggcgtgttcttctttgcaggaagccagccttggtctccacagtagaaggtggccaggatcccaagaacttctcagaaatccatcctggaatgctgctcattggttttgtgaagagcatcaaggactatggcgtgttcatccagctcccctcaggtcttagcggactggccccaaaagctatcatgagtgacaaatttgtgacctccacaagtgaccactttgttgagggccagacagtagcggcaaaggtgaccaatgtggatgaggagaagcagcggatgctgctgtcactgcggctgtcggactgtggtctgggggacttggctatcaccagcctcctcctcctgaatcagtgcctggaggagctgcagggcgtgcgcagccttatgagcaaccgagactctgtgttgatccagacgctggccgagatgaccccaggaatgttccttgacctagtggtgcaggaggtgttggaagatggctctgtggtattcagtgggggtccagtgcccgacctggtcctgaaagccagcagataccatcgcgcagggcaggaggtggaatctgggcagaaaaagaaggttgttatcttaaatgttgatcttttgaagttggaagtgcacgtttcccttcaccagggacttggtggaatagaaaagctagaaagctgaggaaaggcagcgaacaccaggcgattgtgcagcacttggagaagtcctttgccattgcctccttggtagagacgggccacctggcagctttctccctgacctctcacctcaacgacaccttccgctttgactcagagaaattgcaggtgggacagggtgtctccctaaccctcaagaccacagaaccaggagtgactggccttcttttggctgtggaggggccggctgccaagaggaccatgaggccgacccagaaggactctgagacagttgatgaggatgaagaagtggatccagctctgactgtagggaccataaagaagcacaccctctccatcggggacatggtcacagggactgtcaagtccattaagcctacccatgtggttgtgactctggaagatggcattattggctgtatccatgcctcccacattctagatgatgttccagagggcacctctcctactaccaagctgaaggttgggaagacggtcactgcccgagtgattggcgggcgagacatgaagacattcaagtatctcccaataagtcaccccagattcgttcgaaccatcccggagctgagtgttcggccaagtgagctggaggatggccacactgctcttaacactcactctgttagccccatggagaagattaaacagtaccaggccggccagactgttacttgcttcttaaagaaatacaatgtggtgaagaaatggcttgaggtggagattgccccagacatccgggggagaattcccttattgctcacttctctgagcttcaaggttctgaagcatccagataagaagttccgggttggccaggccctgagggccaccgttgttggcccagattcctccaagaccttcttatgtctgtccctcacaggtcctcacaagcttgaggaaggggaagtggccatgggccgagtggtgaaggtgactcccaacgaggggctgaccgtctccttcccctttgggaagataggaacagtcagtatatttcacatgagtgactcctactccgagacgcccctggaagacttcgtcccccagaaggttgtcagatgttacatcctgtccactgcagacaacgtattgactttgtcgctgcgatcatccagaacaaacccggagacgaaaagcaaagtagaagatccagagattaactccatccaggacattaaggaagggcagcttctgaggggctatgtagggtccatccagccacacggtgtgttctttcgccttggcccctccgttgtgggtttggctcggtactcccatgtctcccagcacagcccgtccaagaaagccctttataacaaacacctccctgaagggaagctgctcacagccagggtcctacgccttaaccaccagaagaacctggtagagctgtctttcctccccggagacactgggaagccagacgtgctttctgcttccttggaagggcaacttacaaagcaagaggagaggaaaacagaggctgaggagagagaccaaaaaggggaaaagaaaaatcagaaaaggaacgagaagaagaaccagaaggggcaggaggaggtggagatgcccagcaaggagaagcaacagccccagaagccacaggcgcagaagcggggcgggcgggagtgccgggagtctgggagtgagcaggaaagagtgagcaagaagccaaagaaagccggcctgtcagaggaggacgacagccttgtggacgtgtactatcgggagggaaaagaggaggcagaagagacgaatgtgctgcccaaggagaagcaaaccaagccagcagaagcgccccggctgcagctgtcttcaggcttcgcttggaatgtgggactagactctctgaccccggccttgccacctctagcagagagctcagacagcgaggaggatgagaagccacaccaagccacgataaagaaaagcaagaaagaaagggagttggagaagcagaaggcagagaaggaactgtcccgcactgaggaggcgctgatggatcctgggcggcagccagagtccgcggatgattttgaccgactggtgctgagctcccccaacagctccattctgtggctgcagtacatggctttccacctgcaggccacggagatcgagaaggcccgtgccgtggctgagagggcccttaagaccatctccttcagagaggagcaggagaagctgaacgtgtgggtggctctgctgaacctggagaacatgtacggctctcaggagtccctgaccaaggtctttgagcgagccgtgcagtacaacgagcctctcaaagtctttctccacctggctgacatctacgccaagtcagagaaattccaggaagctggtgaactctacaaccggatgctgaagcgtttccggcaggagaaagctgtgtggatcaaatacggcgccttccttctgcggaggagccaggctgcagccagtcaccgcgtgctgcagcgagccctggagtgcctgcctagcaaggagcatgtggatgtcattgccaagtttgcccagcttgagtttcagctgggggatgcagagcgggccaaagccatttttgagaacacgctgagcacctacccaaagcgcacagatgtctggtcggtctatatcgacatgaccatcaagcacggcagccagaaggacgtccgggacatctttgagcgggtcattcatctgagcttggcccccaagagaatgaagttcttcttcaagcgctacctggactacgagaagcagcatggcactgagaaggatgtgcaggcagtcaaggccaaggccctggagtatgtggaggccaagagctcagtgctagaggactagtggcaggctggctctgtgggacactgtcaacaatgggccagcccggccccgcctcgagtgcctgggcactcggaaaactgttacctcaggactctatttaaatgctgctttttctgcagcacgcttggggaaatcctgtcaggatgaaaaggaagttgagattttttaaatccctcttcgcttgctttattttcagtaccaacttgttatctttttccttatctgaggctacctggggattgtgggcagcaggcccctggactcccagaaatgctgagggtccctcttccaggggagttccctggggagcaagagtagaggggctattcccgagggtcctgtggtcagggtcctgctttgtccctggcaggctgtcagtccagctggagggggtcagtaggctccagggagtgggccctcccctccgatcttggagtctctgggtgttccttcagcctcagcctcactggtacctctctgccctttaggggaggctatgaagtcttggaaaggaggacaaaatcagagcccagagggggaaatggagaaacctgggctgctgaggaaagccacgggtgttggcgtgaactgatgatgtctcatcccacgcccactatggccacattacctaacctctccatatctgggctattcaaggtcttggaggccagcacagacccagctagttgttgaagccagttcttttttgtcttggtcatgagggaattaaacgttttctctggcagaa

SEQ ID NO: 89901 - DNA, 3428 bp, Homo sapiens; identical to SEQ ID NO: 61184

SEQ ID NO: 89902 - DNA, 2658 bp, Homo sapiens
ggaattcgttttaagaggatcttctgctcctcttcatctggtccgtttccttccaaggcccccgagaggaaggcatgcggtgggccctactggtgcttctagctttcctgtctcctgccagtcagaaatcttccaacttggaagggagaacgaagtcagtcaccaggcagactgggtcatctgctgaaatcacttgcgatcttactgtaacaaataccttctacatccactggtacctacaccaggaggggaaggccccacagcgtcttctgtactatgacgtctccactgcaagggatgtgttggaatcaggactcagtccaggaaagtattatactcatacacccaggaggtggagctggatattgagactgcaaaatctaattgaaaatgattctggggtctattactgtgccacctgggacaaccggaaagaattattataagaaactctttggcagtggaacaacacttgttgtcacagataaacaacttgatgcagatgtttcccccaagcccactatttttcttccttcgattgctgaaacaaaactccagaaggctggaacatacctttgtcttcttgagaaatttttcccagatattattaagatacattggcaagaaaagaagagcaacacgattctgggatcccaggaggggaacaccatgaagactaacgacacatacatgaaatttagctggttaacggtgccagaagagtcactggacaaagaacacagatgtatcgtcagacatgagaataataaaaacggaattgatcaagaaattatctttcctccaataaagacagatgtcaccacagtggatcccaaatacaattattcaaaggatgcaaatgatgtcatcacaatggatcccaaagacaattggtcaaaagatgcaaatgatacactactgctgcagctcacaaacacctctgcatattacacgtacctcctcctgctcctcaagagtgtggtctattttgccatcatcaccctgctgtctgcttagaagaacggctttctgctgcaatggagggaaatcataacagacggtggcacagagaggcccatcttttcctcatcggttattgtccctagaagcgtcttctgaggatctagttggggctttctttctgggtttgggccatttcagttctcatgtgtgtactattctatcattattggtataatggttttcaaaccagtgggcacacagagaacctcactctgtaataacaatgaggaatagccatggcgatctccagcaccaatctctccatgttttccacagctcctcctgccaacccaaatagcgcctgctatagtgtagacagcctgcggcttctagccttgtccctctcttagtgttctttaatcagataactgcctggaagcctttcattttacacgccctgaagcagtcttctttgctagttgaattatgtggtgtgtttttccgtaataagcaaaataattcaactagcaaagaagactgcttcagggcgtgtaaaatgaaaggcttccaggcagttatctgattaaagaacactaagagagggacaaggctagaagccgcaggatgtctacactatagcaggcgctatttgggttggctggaggagctgtggaaaacatggagagattggtgctggagatcgccgtggctattcctcattgttattacagagtgaggttctctgtgtgcccactggtttgaaaaccattatacaataatgatagaatagtacacacatgagaactgaaatggcccaaacccagaaagaaagcccaactagatcctcagaagacgcttctagggacaataaccgatgaggaaaagatggcctccttgtgccaccgtctgttatgatttctctccattgcagcagaaagccgttcttccaagcagacagcaggtgatgatggcaaaatagaccacactcttgaggagcaggaggaggtacatgtaatatgcagaggtgtttgtgagctgcagcagtagtgtatcatttgcatcttttgaccaattgtctttgggatccattgtgatgacatctgtctttattggaggaaagataatttcttgatcaactccgtttttattattctcatgtctgacgatacatctgtgttctttgtccagtgactcttctggcaccgttaaccagctaaatttcatgtatgtgtcgttagtcttcatggtgttcccctcctgggatcccagaatcgtgttgctcttcttttcttgccaatgtatcttaataacatcagggaaaaatttctcaagaagacaaaggtatgttccagccttctggagctttgtttcagcaattgaaggaagaaaaatagtgggcttgggggaaacatctgcatcaagttgtttatcaggtgaagttactatgagcttagtcccttcagcaaatatcttgaaccaaccagtggtatcacaccggtctaagcttctacaaaaatctcagccttctgatcctcgggacacgactagcaatccaacaactttgaactagcaatttcatcttctggcttttttggaagtccttgaatataggttttgtgacatgtgatagtttgtaatttttcctcataaatagcctgtaatcttctaaggcagtaattcttgcggacgcgtggg

SEQ ID NO: 89903 - DNA, 2204 bp, Homo sapiens
cgacgggaggcaggaggggcaggctcaggagggagttggcaggatggcagagggcaaggcaggcggcgcggccggcctcttcgccaagcaggtgcagaagaagtttagcagggcccaggagaaggtgctgcagaaattggggaaagctgtagaaaccaaagatgaacgatttgaacaaagcgctagcaacttctaccaacaacaggcagaaggccacaagctgtacaaggacctgaagaacttccttagtgcagtcaaagtgatgcatgaaagttcaaaaagagtgtcagaaaccctgcaggagatctacagcagcgagtgggacggtcatgaggagctgaaggccatcgtatggaataatgatctcctttgggaagactacgaggagaaactggctgaccaggctgtaaggaccatggaaatctatgttgcccagttcagtgaaattaaggagagaattgccaagcggggtcggaaactcgtggactatgacagtgcccgacaccacctggaggcagtgcagaatgccaagaagaaagatgaggccaagactgccaaggcagaggaagagttcaacaaagcccagactgtgtttgaagatctgaaccaagaactactagaggagctgcctattctttataatagtcgtattggctgctatgtgaccatcttccaaaacatttccaacttgagggatgtcttctacagggaaatgagcaagctgaaccacaatctctacgaggtgatgagcaaactggagaagcaacattccaataaagtctttgtggtgaagggactgtcaagcagcagcaggcgctctttagtcatttctcccccagttcgaacagctacagtctccagtcctcttacctcacctactagtccctctacactttccttgaagagtgagagtgaatctgtctcagcaactgaagatctggcacctgatgcagcccaaggggaagacaattctgagatcaaggagctcttagaagaggaggaaatagagaaggaaggatctgaagcaagctcctctgaggaagatgagcctctaccagcctgcaatggccccgcccaggcccagccctctcctaccactgaaagggccaagttcccaggaggaagttctccccagctccacaactccatcaccaggcggagccctgagcccttcagggcagccttcatcatctgccacagaagtagtcctccgaacccgcaccgcaagtgaaggatctgaacaaccaaagaagagagcctctatccagaggacctcagcaccccctagtaggcctcctccacccagagccactgcaagccccaggccctcctcagggaacataccttccagccctacagcctctggagggggttcacccaccagccctagggcctccttggggactgggactgcaagtcctaggacctccctagaggtctctcctaatccagaaccaccagagaagccagtaagaactcctgaggccaaagaaaatgaaaacatccacaatcagaaccctgaagaactttgtacttcccccaccttaatgacatctcaggttgcttcagagcctggagaggcaaagaagatggaagacaaggaaaaggataataagcttatctcagctgactcctcggagggccaagaccagcttcaagtctccatggtaccagaaaacaacaacctcacagcacctgaacctcaagaagaggtatccacaagtgaaaatccacaactctgaagagaaactaccaagactcctcctgccccaaacctcgccagagaagctcttcaaccagagggtataggtcagagggatataagagccagcatccatccctgggttctcagtaggaatgctggtgctgtctaaagacctggcattaatggaggcggaggagcagccttacgggagggatggagggaggcaggctggggagaagagaacattagactcagggaatatttaattctggttttagcattattagaataagactttatacattaactaaagtggagctttaatcactataaaaagcaaaagtatctatagacacagacacttgcctatacagagacataaccacacacactcagaggatagtgaacaaatctgtctttgacttacgacccattttgcaagacttaaagccgaaagaacacattttcagattgttaaataaagtctgattctgactaa

SEQ ID NO: 89904 - DNA, 3095 bp, Homo sapiens
atggctgcgggggaggggcggggctcgtgggtgtctccgaccctttttgtcccggcgcggcgggagcgcgcttggcgcgtgcgtacgcgacggcggttggcggcgcgcgggcagcgtgaagcgaggcgaggcaaggcttttcggacccacggagcgacagagcgagcggcccctacggccgtcggcggcccggcggcccgagatgttatctgggaagaaggcggcagccgcggcggcggcggctgcagcggcagcaaccgggacggaggctggccctgggacagcaggcggctccgagaacgggtctgaggtggccgcgcagcccgcgggcctgtcgggcccagccgaggtcgggccgggggcggtgggggagcgcacaccccgcaagaaagagcctccgcgggcctcgccccccgggggcctggcggaaccgccggggtccgcagggcctcaggccggccctactgtcgtgcctgggtctgcgacccccatggaaactggaatagcagagactccggaggggccgtcggaccagccggcgcaagcgggcgaaggtagagtacagagagatggatgaaagcttggccaacctctcagaagatgagtattattcagaagaagagagaaatgccaaagcagagaaggaaaagaagcttcccccaccaccccctcaagccccacctgaggaagaaaatgaaagtgagcctgaagaaccatcgggtgtggagggcgcagctttccagagccgacttcctcatgaccggatgacttctcaagaagcagcctgttttccagatattatcagtggaccacaacagacccagaaggtttttcttttcattagaaaccgcacactgcagttgtggttggataatccaaagattcagctgacatttgaggctactctccaacaattagaagcaccttataacagtgatactgtgcttgtccaccgagttcacagttatttagagcgtcatggtcttatcaacttcggcatctataagaggataaaacccctaccaactaaaaagacaggaaaggtaattattataggctctggggtctcaggcttggcagcagctcgacagttacaaagttttggaatggatgtcacacttttggaagccagggatcgtgtgggtggacgagttgccacatttcgcaaaggaaactatgtagctgatcttggagccatggtggtaacaggtcttggagggaatcctatggctgtggtcagcaaacaagtaaatatggaactggccaagatcaagcaaaaatgcccactttatgaagccaacggacaagctgttcctaaagagaaagatgaaatggtagagcaagagtttaaccggttgctagaagctacatcttaccttagtcatcaactagacttcaatgtcctcaataataagcctgtgtcccttggccaggcattggaagttgtcattcagttacaagagaagcatgtcaaagatgagcagattgaacattggaagaagatagtgaaaactcaggaagaattgaaagaacttcttaataagatggtaaatttgaaagagaaaattaaagaactccatcagcaatacaaagaagcatctgaagtaaagccacccagagatattactgccgagttcttagtgaaaagcaaacacagggatctgaccgccctatgcaaggaatatgatgaattagctgaaacacaaggaaagctagaagaaaaacttcaggagttggaagcgaatcccccaagtgatgtatatctctcatcaagagacagacaaatacttgattggcattttgcaaatcttgaatttgctaatgccacacctctctcaactctctcccttaagcactgggatcaggatgatgactttgagttcactggcagccacctgacagtaaggaatggctactcgtgtgtgcctgtggctttagcagaaggcctagacattaaactgaatacagcagtgcgacaggttcgctacacggcttcaggatgtgaagtgatagctgtgaatacccgctccacgagtcaaacctttatttataaatgcgacgcagttctctgtacccttcccctgggtgtgctgaagcagcagccaccagccgttcagtttgtgccacctctccctgagtggaaaacatctgcagtccaaaggatgggatttggcaaccttaacaaggtggtgttgtgttttgatcgggtgttctgggatccaagtgtcaatttgttcgggcatgttggcagtacgactgccagcaggggtgagctcttcctcttctggaacctctataaagctccaatactgttggcactagtggcaggagaagctgctggtatcatggaaaacataagtgacgatgtgattgttggccgatgcctggccattctcaaagggatttttggtagcagtgcagtacctcagcccaaagaaactgtggtgtctcgttggcgtgctgatccctgggctcggggctcttattcctatgttgctgcaggatcatctggaaatgactatgatttaatggctcagccaatcactcctggcccctcgattccaggtgccccacagccgattccacgactcttctttgcgggagaacatacgatccgtaactacccagccacagtgcatggtgctctgctgagtgggctgcgagaagcgggaagaattgcagaccagtttttgggggccatgtatacgctgcctcgccaggccacaccaggtgttcctgcacagcagtccccaagcatgtgagacagatgcattctaagggaagaggcccatgtgcctgtttctgccatgtaaggaaggctcttctagcaatactagatcccactgagaaaatccaccctggcatctgggctcctgatcagctgatggagctcctgatttgacaaaggagcttgcctcctttgaatgacctagagcacagggaggaacttgtccattagtttggaattgtgttcttcgtaaagactgaggcaagcaagtgctgtgaaataacatcatcttagtcccttggtgtgtggggtttgttttttttttttttatattttgagaataaaacttcatataaaattggcaaaa

SEQ ID NO: 89905 - DNA, 5538 bp, Homo sapiens
tttcgtattggctttcaggctggcgcctgtctcggcccccgcgccagttttgggctggttggcgcggaatcgggagattcgggaccatggcacctgtgcacggcgacgactgtgagataggggcgagtgctctgtcagattcagggagttttgtatcttctcgagcccggcgagaaaaaaaatcaaagaaggggcgccaagaagccctagaaagactgaaaaaggctaaagctggtgagaggtataaatatgaagtcgaggacttcacaggtgtttatgaagaagttgatgaagaacagtattcgaagctggttcaggcacgccaggatgatgactggattgtggatgatgatggtattggctatgtggaagatggccgagagatttttgatgatgaccttgaagatgatgcccttgatgctgatgagaaaggaaaagatggtaaagcacgcaataaagacaagaggaatgtaaagaagctcgcagtgacaaaaccgaacaacattaagtcaatgttcattgcttgtgctggaaagaaaactgcagataaagctgtagacttgtccaaggatggtctgctaggtgacattctacaggatcttaacactgagacacctcaaataactccaccacctgtaatgatactgaagaagaaaagatccattggagcttcaccgaatcctttctctgtgcacaccgccacggcagttccttcaggaaaaattgcttcccctgtctccagaaaggagcctccattaactcctgttcctcttaaacgtgctgaatttgctggcgatgatgtacaggtcgagagtacagaagaagagcaggagtcaggggcaatggagtttgaagatggtgactttgatgagcccatggaagttgaagaggtggacctggagcctatggctgccaaggcttgggacaaagagagtgagccagcagaggaagtgaaacaagaggcggattctgggaaagggaccgtgtcctacttaggaagttttctcccggatgtctcttgttgggacattgatcaagaaggtgatagcagtttctcagtgcaagaagttcaagtggattccagtcacctcccattggtaaaaggggcagatgaggaacaagtattccacttttattggttggatgcttatgaggatcagtacaaccaaccaggtgtggtatttctgtttgggaaagtttggattgaatcagccgagacccatgtgagctgttgtgtcatggtgaaaaatatcgagcgaacgctttacttccttccccgtgaaatgaaaattgatctaaatacggggaaagaaacaggaactccaatttcaatgaaggatgtttatgaggaatttgatgagaaaatagcaacgaaatataaaattatgaagttcaagtctaagccagtggaaaagaactatgcttttgagatacctgatgttccagaaaaatctgagtacttggaagttaaatactcggctgaaatgccacagcttcctcaagatttgaaaggagaaactttttctcatgtatttgggaccaacacatctagcctggaactgttcttgatgaacagaaagatcaaaggaccttgttggcttgaagtaaaaaagtccacagctcttgaatcagccagtcagttggtgtaaagttgaggcaatggctttgaaaccagacctggtgaatgtaattaaggatgtcagtccaccaccgcttgtcgtgatggctttcagcatgaagacaatgcagaatgcaaagaaccatcaaaatgagattattgctatggcagctttggtccatcacagttttgcattggataaagcagccccaaagcctccctttcagtcacacttctgtgttgtgtctaaaccaaaggactgtatttttccatatgctttcaaagaagtcattgagaaaaagaatgtgaaggttgaggttgctgcaacagaaagaacactgctaggttttttccttgcaaaagttcacaaaattgatcctgatatcattgtgggtcataatatttatgggtttgaactggaagtactactgcagagaattaatgtgtgcaaagctcctcactggtccaagataggtcgactgaagcgatccaacatgccaaagcttgggggccggagtggatttggtgaaagaaatgctacctgtggtcgaatgatctgtgatgtggaaatttcagcaaaggaattgattcgttgtaaaagctaccatctgtctgaacttgttcagcagattctaaaaactgaaagggttgtaatcccaatggaaaatatacaaaatatgtacagtgaatcttctcaactgttatacctgttggaacacacctggaaagatgcccaagttcattttgcagatcatgtgtgagctaaatgttcttccattagcattgcagatcactaacatcgctgggaacattatgtccaggacgctgatgggtggacgatccgagcgtaacgagttcttgttgcttcatgcattttacgaaaacaactatattgtgcctgacaagcagattttcagaaagcctcagcaaaaactgggagatgaagatgaagaaattgatggagataccaataaatacaagaaaggacgtaagaaaggagcttatgctggaggcttggttttggaccccaaagttggtttttatgataagttcattttgcttctggacttcaacagtctatatccttccatcattcaggaatttaacatttgttttacaacagtacaaagagttgcttcagaggcacagaaagttacagaggatggagaacaagaacagatccctgagttgccagatccaagcttagaaatgggcattttgcccagagagatccggaaactggtagaacggagaaaacaagtcaaacagctaatgaaacagcaagacttaaatccagaccttattcttcagtatgacattcgacagaaggctttgaagctcacagcgaacagtatgtatggttgcctgggattttcctatagcagattttacgccaaaccactggctgccttggtgacatacaaaggaagggagattttgatgcatacgaaagagatggtacaaaagatgaatcttgaagttatttatggagatacagattcaattatgataaacaccaatagcaccaatctggaagaagtatttaagttgggaaacaaggtaaaaagtgaagtgaataagttgtacaaactgcttgaaatagacattgatggggttttcaagtctctgctactgctgaaaaaaaagaagtacgctgctctggttgttgagccaacgtcggatgggaattatgtcaccaaacaggagctcaaaggattagatatagttagaagagattggtgtgatcttgctaaagacactggaaactttgtgattggccagattctttctgatcaaagccgggacactatagtggaaaacattcagaagaggctgatagaaattggagaaaatgtgctaaatggcagtgtcccagtgagccagtttgaaattaacaaggcattgacaaaggatccccaggattaccctgataaaaaaagcctacctcatgtacatgttgccctctggataaattctcaaggaggcagaaaggtgaaagctggagatactgtgtcatatgtcatctgtcaggatggatcaaacctcactgcaagtcagagggcctatgcgcctgagcagctgcagaaacaggataatctaaccattgacacccagtactacctggcccagcagatccacccagtcgtggctcggatctgtgaaccaatagacggaattgatgctgtcctcattgcaacggggtgggaactttgaccccacccaatttaaagttcatcattatcataaagatgaagagaatgatgctctacttggtggcccagcacagctcactgatgaagagaaatacagggactgtgaaagattcaaatgtccatgccctacatgtggaactgagaatatttatgataatgtctttgatggttcgggaacagatatggagcccagcttgtatcgttgcagtaacatcgattgtaaggcttcacctctgacctttacagtacaactgagcaacaaattgatcatggacattagacgtttcattaaaaagtactatgatggctggttgatatgtgaagagccaacctgtcgcaatcgaactcgtcaccttccccttcaattctcccgaactgggcctctttgcccagcctgcatgaaagctacacttcaaccagagtattctgacaagtccctgtacacccagctgtgcttttaccggtacatttttgatgcggagtgtgcactggagaaacttactaccgatcatgagaaagataaattgaagaagcaattttttacccccaaagttctgcaggactacagaaaactcaagaacacagcagagcaattcttgtcccgaagtggctactccgaagtgaatctgagcaaactcttcgctggttgtgccgtgaaatcctaagggaatcccaggagtaaccaaggagggggtagttgaaaaatcccagcttcctctgtgcctccactctggccctaaatgctcctccagcatctgtttctcccttgggactgtgtctcatgtttgtgtgaatgtagaccaggaaagggggctgcaaaaatgttgagtctaatgttcgtaagcatcatagaaattcctgtcttcatattaagatgtactgctttaaaacacaactccagagcccctccccaagctcccctccccaagctcctgaagacccggtttctgagggagggaaattgctacttggattgagagtagctggaatgtaagtgaccccaggctttgcctcagggcctttagcctatgtcccccccacataaagagagcttctcagagcctgactgaagagctgacgttttgctttttcatatgccaattaaacccggtctaaatccaaatgcttctccagccatccaggagtggctgtccttttcagtcttgtcttttatataggtagctgagggggaagatttagaagccttgcactcactaaatagattaaacagagcaggcttgtttgttgaattgctccaaagtccaacagacacacactgagcaggtgttttacactcacattcccttttttgccccttaaatagaaagtgcaggtaaaggtttatacaacaagaaagcacattgaaaataatttgatactctaacaatccattaacatgtgtaggggttacggtgaggatcactgtgttgtattcagaaaaacggggagagggatgcttaattggccctggcgcttgctatttttttctcatttcttcacaataggaccgtctttggcagcagcaaaatgtatttcagtatggcagtctttcctctcttacattattggtaagattatactaacaaaatgtttccccttgtacaattatgctgtgtttttaaaaaacattgacctgtgtgtttttataaaagaaaaagtatgttgtgccttcttcttaagaataaagttttctaaagggaaaaaaaa

SEQ ID NO: 89906 - DNA, 6759 bp, Homo sapiens
caccttatttagccactctgcagcttgatagcagcctattgataccacctaaataccagaccccaccagcagcagcacagggacaagctacgccagggaatgctgggcccttagctccaaatggatcagcagctcccccagctggcagtgcatttaatcccacctcgaatagtagttctacaaatcctgcagcaagtagttctgcatctggttcctctgtgccaccggtctcatcgtctgcctctgctcctggtattagccagataagcactacctcttcttcaggattcagtggtagtgttggagggcagaaccccagcactgggggcatttctgcggatagaacgcaagggaacataggctgtggtggagacactgaccctgggcagagctcttctcagccctcacaggatggacaagagagtaacgtgcctagtgttgggagcctagcagatccagactatctgaacacaccacagatgaacacacccgtgacgttgaacagcgctgccccagccagcaatagtggggcaggagtcctaccatctccagcaacccctcgcttctctgtccccacaccacgaacccccaggaccccaagaactcccagaggtgggggcactgccagtggtcaagggtctgttaagtatgatagcaccgatcaaggatcaccagcctccaccccctctactacacggcccctcaactctgtggagcccgccaccatgcagccaattcccgaagcccacagcctctatgttaccctgattctctccgattccgtgatgaatatctttaaagacagaaactttgacagctgttgcatctgtgcctgcaacatgaacatcaaaggggcggatgtcgggctttacatccccgattcttccaatgaggaccagtaccgctgtacctgtgggtttagtgcgattatgaaccgcaaacttggctacaattcaggactcttccttgaagatgagttggatatttttgggaagaattctgatattggtcaggctgcagagaggcgcttaatggatgtgtcagtccactttccttcctcaggtggaaggaaccaaaaaaccccaggagccacccataagccttctcctcctcctccagaatcaacacacacaaccttttgcttcactgaatttcctggactacatttcctctaacaatcgccaaactcttccctgtgtaagctggagttatgaccgggtgcaagcagataataatgattactggacggaatgctttaatgcgttggagcaggggcggcagtatgtggataaccccactggtggaaaagtggacgaagctctggtgagaagtgccactgtgcactcttggcctcacagcaatgtgctggacatcagcatgctctcctcccaggatgtggttcgtatgctgttgtccctgcagccctttctccaagatgccatccaaaagaagcgcacgggcaggacctgggagaacatccagcatgtgcagggaccactcacttggcagcagttccataaaatggcaggacggggaacctacggttcggaagaatctcctgagccgttgcccatccccactctgctggtaggctatgacaaggatttcctcaccatctcgccattctccttgccgttttgggagaggctcttgttggacccatatgggggccaccgtgatgttgcctatattgtggtgtgtccagaaaatgaggccttgctcgaaggagccaaaactttcttcagggacttgagtgctgtatacgagatgtgtaggcttgggcagcacaagcccatctgcaaagtgctacgtgacgggatcatgcgcgtgggaaaaactgtggcacagaagctgacagatgagcttgtgagtgagtggtttaaccagccttggagcggcgaggagaatgacaatcattccagactcaaactttatgcgcaagtttgccgccatcacctagcaccttatttagccactctgcagcttgatagcagcctattgataccacctaaataccagaccccaccagcagcagcacagggacaagctacgccagggaatgctgggcccttagctccaaatggatcagcagctcccccagctggcagtgcatttaatcccacctcgaatagtagttctacaaatcctgcagcaagtagttctgcatctggttcctctgtgccaccggtctcatcgtctgcctctgctcctggtattagccagataagcactacctcttcttcaggattcagtggtagtgttggagggcagaaccccagcactgggggcatttctgcggatagaacgcaagggaacataggctgtggtggagacactgaccctgggcagagctcttctcagccctcacaggatggacaagagagtgttacagaaagggagagaataggaattcccacggagcctgactctgcagacagccatgcccaccctccagctgttgtcatttacatggtggacccgttcacgtatgctgcagaggaggactccacttctgggaacttttggctgttgagcttgatgcgctgctacacagaaatgctggataatttacctgagcatatgagaaattctttcattctccagattgtgccttgccagtacatgctgcagacaatgaaggatgagcaagttttctacattcaatacttgaagtccatggcattttcagtgtactgccagtgcaggcgaccactgcctacacagatccacattaaatccctcacgggatttgggcctgcagccagcattgagatgaccctcaagaaccctgagcggcccagcccaatccagctttactcccctccctttatattggccccaatcaaagacaagcagacagagctgggagagacgtttggtgaggcgagccagaaatacaatgtgctcttcgtgggctattgtctgtctcacgaccagcgctggcttttggcttcctgcactgacctccatggggaattattagagacctgcgttgtaaatattgctttaccaaacaggtcacggaggagtaaagtatctgcacgtaaaattggactacagaagttatgggagtggtgcatagggattgtccaaatgacatctctaccctggagagttgtaatcgggcgacttgggcgtcttggccatggggagcttaaagattggagtatcctccttggagaatgttcactacagacaatcagcaaaaagctcaaggatgtgtgccggatgtgtggaatctctgccgcagactctccttctatccttagtgcctgcctggttgccatggagccccaggggtcctttgtagtgatgccagatgctgtcacaatgggctctgtttttggccgaagtactgcactgaacatgcagtcatctcagctcaacacccctcaagatgcttcttgtacacacatcttggtgttcccaacatcatcaaccatccaggtggctccagccaactaccccaatgaagatgggtttagccccaacaatgatgatatgtttgttgaccttccattcccagatgatatggacaatgatattggcatattaatgactgggaacctccattcctctcccaactcttccccagtaccctccccaggctctccttctggaattggtgtgggctctcacttccagcatagtcggagccagggtgagcgtcttctttctagagaagcaccagaggagctaaagcagcagcccctggcccttgggtattttgtatcaactgccaaagctgagaatcttccccagtggttttggtcatcgtgtccccaggctcaaaaccgagtgccctctcttcttaaaggcttcgctgcatcaccacatttcagtagcacagacagacgaacttctgcctgccaggaattctcagcgggttccacaccctcttgactccaaaaccacgtcggatgttttaaggtttgttttggagcagtacaacgctctgtcctggctcacgtgcaatccggccacccaggaccgtacttcctgccttcccgtccactttgtggtgctcactcagttgtacaatgccatcatgaatatactttaattggaaaagcacttgttctctctggctcagttccttctccctgcaacctcagtccaaggaacctgctacactctgcaaataacccacatccttttcttcagaccactctccacagtcctgcactgtgattccttctcagcaggcacatgtcaattctgcagtgttcattaccagagtgactccttgacacttctctcatggacctggaaacttccataagtggtgactttcagccagtgcggtggtgtgtgtagccccaaccactggtccccaggaagtggtggtggttgatggcttttcagcgggaaacagaagagacagtgtccttttgcacaagagtctgtgttttcagcctctgtatacaattgagggcagtctagccctttggatgaaatcctcttagttactggtgtatggcctgtgggttacctgaactccataatctgggactttttaaaaataagaaccagctcaagtacatggtttcatactggggtttctgtctccctagtgttcccatccagattaccatgagtgctttggttgacttcaaacctgtgtgtcaatgcagaaggtctggagacagcttcattttgtttatttattttaatttgttttgtcatatggtttttgtgactttatttttttaattcacaaggaccaggtacagtagctgaaacccaattcagatccaccataggattctttgactacatacctctgtcctagaagccggaaaaggagtaaaaacacattggggagatcatgcctaaaagtaatatattcaaaaccacccagcagtaggttttgttaacaacaaactggattttaaaagttctgccatgttaagtggccagcatttcatgaaggataacatttttatacagaaggcagtcaagctcaactcagagccatggaggcaagtaccttaattagttttatatagtcacaacggaaatatattttctagtgaattcttattggaagccaggtctctcctctcattagatcaaaagggacttatgtacatacaacaattgaaagtgtttgctcatgaaatcagttataaatatggtgaattttttctggaccataggaatattatttcaaagaaatattacaacttaaccattaaattagtacttgaagttgagcctttgtggtgggactttttaaaaaaatgcctttttaaagcattaatggctaattgaagtattttatgactcctcattcctggcccagagggttgtctttgaaaccctgtttctaacccttgtgttgtgtgtttctgtctgaggacagtgggtgtgtactggcctcccgggagccactgtgaccaggcctttgagctcttgtcatctgtggagagaatcatgcaaattttaaaagttcttccaagagacttccatgtcctggttattaacaaaaaaggaaaaatgtaataattgatatgattttgtaaaagtatttttcttgaaataatctaaagtttaaaacattatattaaaaaaaaagttgtgtggtgggaatgtgaaagcagagaaataacttgtaaatggataattttgttctctgtaccaccagttgaagggggggttgactttcgcaatgtataggataaaaaatctgatatatcaaaccatttgtatctaatgtgtacagtgtaaaattgactttaaaaatattgcagtgctattttttcttaatcagaaaggaaaattctcaaggccttttgaagagcataagaagatgaagattgtaaacttgtataaaattatcttggtgagaagacaaattgtaaagtagatatttgtaatcttttaccactttggggttgcttttttcccggaattcatcagaactttgaatttttcttttttaaatgggctgtttttaatgcaggggcttttcttccctagaaacccaattctaagcagaaaaagaaaaaaaacacaaaaaataaaaaacccctacaaaaaaactttaaaaaaaatggcagcaaagggtagttttcatctggtgtcttttatttaagttttttaagttaagaaaagctggtgacatatttatacgtttttgtgcaaaaataaatgaatggcaatagattttaaaaaaccttattatgtacttctgtgtgaaaaagtctgtataatatttcccttaaatatgcattattttacttgtgagttttttactgaattaatctgaaatgtacaagccctggatttgctacagagtgagaagttattttatttttttttatttttaattttggaaattctgcagaaatcagaactcttaccatggtttgaacaaaaaaaaggggaaatggggaggggaaaagggtgggattgtccagcatgcttgtatgtatatttcagaaccttttttaaatgtaaaagctgtacatttctgggaagttctgaatttcttttgtttccttttttccttcaagcattttgcagtgagcttcttttatatatagcaaacaatttgaaagaatacaaaaatatgtgaagttcatttaaaaaaataactacagtatagcgctggtacagtacactaaaagactttgataaaaagaaacaataataaaaggcctccattttaaatgtcattcatatataccttgtggatgagagctatatacttttacacacttttttagaggaataaattattgaattactaaaaaa

SEQ ID NO: 89907 - DNA, 1817 bp, Homo sapiens
  misc_feature (1)...(1817): n = a,t,c or g
agtgtatcatgaccacataataatttacttatgaattttcttaggtaagaaacggctgaactggatgcaatttttatcacagcttgtgtaagactgcctctgtccctcctctcacatgccattggttaaccagcagacactgtgctcaggggcgttgccagctcattgctcttatagcctgtgagggaggaagaaagaaacatttgccagccaggctagtgacagaaatggattcgaaatatcagtgtgtgaagctgaatgatggtcacttcatgcctgtcctgggatttggcacctatgcgcctgcagaggttcctaaaagtaaagctttagaggccaccaaattggcaattgaagctggcttccgccatattgattctgctcatttatacaataatgaggagcaggttggactggccatccgaagcaagattgcagatggcagtgtgaagagagaagacatattctacacttcaaagctttggtgcaattcccatcgaccagagttggtccgaccagccttggaaaggtcactgaaaaatcttcaattggattatgttgacctctaccttattcattttccagtgtctgtaaagccaggtgaggaagtgatcccaaaagatgaaaatggaaaaatactatttgacacagtggatctctgtgccacgtgggaggccgtggagaagtgtaaagatgcaggattggccaagtccatcggggtgtccaacttcaaccgcaggcagctggagatgatcctcaacaagccagggctcaagtacaagcctgtctgcaaccaggtggaatgtcatccttacttcaaccagagaaaactgctggatttctgcaagtcaaaagacattgttctggttgcctatagtgctctgggatcccaccgagaagaaccatgggtggacccgaactccccggtgctcttggaggacccagtcctttgtgccttggcaaaaaaagcacaagcgaaccccagccctgattgccctgcgctaccagctacagcgtggggttgtggtcctggccaagagctacaatgagcagcgcatcagacagaacgtgcaggtgtttgaattccagttgacttcagaggagatgaaagccatagatggcctaaacagaaatgtgcgatatttgacccttgatatttttgctggcccccctaattatccattttctgatgaatattaacatggagggcattgcatgaggtctaccaaaaggccctgcgtgtggatggtgacacagaggatggctctatgctggtgactggacacatcgcctctggttaaatctctcctgcttggtgatttcagcaagctacagcaaagcccattggccagaaaggaaagacaataattttgttttttcattttgaaaaaattaaatgctctctcctaaagattcttcacctactttcgtctccataacttctatgttttctttccttctgacacactagtgcccctaaattgtgatttgcctatacgtttagggccggggttggaagatgttaacaaccatttaagattcatttctgcagtgggagtgggtggagtttcaccctctgggaaaggggcaggtgacaggtatttatcagtcagtgcctctctagctcttgtaggaagaagcacacgcaggatggagtctagaggatgagcgatattgactagcaattcatggggctcccctccagcagtgcgagggtcagagtttctgggagccttggggagggaggcatccctgttgagggggnggttaggggagatggggagggcaccagggnaaagtgatttaggagtcaggta

SEQ ID NO: 89908 - DNA, 628 bp, Homo sapiens
tttgttcgacatcactagtccatgtggtggaattccagatggccagcatccgtccctgacagagtcagtgcatgagcgccacactggcgtctgctctgggaatgggcttctgctgtgtgtgtcttctctgtggcggaactgacttgggggatgtgatgacaaagcactggggccctctgtgctcctgagggttcccgtgtggatccgcagcaggggctgaaccacgtgtcaggagggactgccccgcacaggatgcaggctggcccttgcagcatctggcttactcccagcaatgtctctgggcccagtcttgagggcgatctgctttgaatgtggactgaaagtttcctccgagtagatggaaacatggcatcaggataactgaagcagagacctgggtgtctctagggtgcttgctctgggtgattttctctcacaccctgtcggcagggctggagtcaccaaactcccacgctgacccctgctgctaagccttctccactcacacgggccacagggttggggaggaagtgcctgagctggaattgtccttgtcacagggcagggctgaccatctccccactgcccctccccagccccccataagcacctttccactgtttctgtg

SEQ ID NO: 89909 - DNA, 1009 bp, Homo sapiens
atgacatacttctcaatagcagagctggaagaacttaaagctcagcaccagctgctaatggtgttgataggagtacataaggaacttcagattgatcaaatcagctggcagaaacaggaaacaatccattacttttataaacgatcctttactgtgacccatgttaagcaaaactgcatctatacagtggccaataaactgaccaaagaatatatttctgcatttgaggaagttttcatcctatttgacaaagaagccaaaagcaccatcacaaaaaggaatttggaacttgggtcactagaaatggactcagaactcaaggaagaaattcctgtgcatgaggaattcattttgtgtggtggagccgaaacccaggttctaaaatgtgggccctggacagacctctttcatgatcaaagtgtcaaaaggcctaagctgcttattttcattattcctggtgagcgtaaaagtctgggccaagtggctccgaactcgcgagctgtcggaacagtattatttttgctgctacgggccatctggcccagggcaacaggggctctgcgaggaaccatagagaagaaggggcgccagatcccgcgtgcctgcccacccgtccttcctttgggcagtcaccctgagctcggcaagctgtacctcacctgtccacctggaaggctgcccgctctccctgagggtcctgggaaggcggcacgagaccggaagtgcccccctcaggtgacgtcacagtaccgcgccggagctgatccgggaagccgatgtcagcctggcgcgcggcgcacagctggctgggagatttcttactggcttggagccggtggtccagatcagagagacctcttggagggtaacccaggtttttctgccttttatgtgccatttgcaaaggctttatactctttgacaaacagacgctttccagtttggactatcagtcatgctgggcatgcgttggctcccaaagacaagaagattcttacaacatcagagg

SEQ ID NO: 89910 - DNA, 567 bp, Homo sapiens
  misc_feature (1)...(567): n = a,t,c or g
tattgagtgccgtggaattccaatcaggtagtaaagatggctcactaaaatacaaattaggctaaaagcaggaggtaaagaaatagtcaaatcatatatcacctgagagcacatggggagggtcaatgatcgggatacaaacccaggtattcgagcagggagtggcaaccccctttgggtcccctccgattgtgtggagctctgttttcactgttaaatcttgcaactgcacactcttctggtccacgtttgttctggctcctgctgagctttcgctcaccgtccgccactgctgttcaccgccgttgcagacccgccattgacttccacccctctggatctggcagggtgtctgctgcatttctgatccagcgaggcacccactgacgctcccgttcgggctagagtctcaccattgttcctgcatggctaagtgcctacgttcatcctaatcgagctaaacgctagttgctggggttccatgggttctccttctggtgaacccatggcttctaatacagctataacattcaccacgtgggccaanggttcaattcctgggaatct

SEQ ID NO: 89911 - DNA, 4623 bp, Homo sapiens
tttttcccatgtttagcactagaagtaacatcacagtttattagcaaaataaagcagaaaatggaccaaaatggatcaggtaaataaatattacaacatataatgtactggtgatgaagctgcaataaagtaatataagtgatgtttacaatttttttttttttttttttttttttttactgggaaggctagttgtaaacataaacattctcactgaactactggccccccaaaacctaacctatctcacaatcaataatcatcttttgactataaaatcataaaaacttgtactctgtggctcttttgtctcgatgatttttcagagaaaaaaattagctgtgttaagtagtttcactgatttatccatcttgaatagctgccagttctggaacttcatacatcctcagaacgtcttcatagagcaaataattatgtaggcttctgggaagtggcagctgactaatataactgtcagaccgtagacgttctgattttagactggaccgaatttccaaacgacaaagatgggtcagggatggaacagtggcaatatgttgctgtagaatccaagcgtttgaggcacgagcagagagcatcctttcaacagctggtgcaagtgtcttccaattagtaaactccaaagtgaagataagggtgtcaatgctgactgagtcaatccaagaattgcacagtagaatcagtgggtcaaatccagcaaccagaagatgtggcaaccactccttatattttgcttgtgctttaattgcatgatttacaaattcatatatatggttccatggtcccaatgagcaacctttcctcaaaaagtagcgaaatatcgaaaacttctcgtacttcaggcagtatgccaaatgaagttcatttatctgggctccatatttcaaaagaatgttcacaattccaaagaactcacagtccttttggaaagccatgcacacaggagaactgaatccaaaaacaaggcacgcctgggcgtctgggctgtagccattccggagtaatatttctaggcaatcttcatgtcccccaaacactgctgagtaaacagggcttactttgtttagcccagtgtcacaggcccggttagtaagtggtattaacaagtccaagatttttgtatggcccatttgtgcagctgcatgaataggtaactgccaactgtcctcattacagtaaagatcaggatctgccccactggagagcaaaagctccacacattttgtgtgtccctcttgagcagcaatgaacaagggtgtagctttgtccaaggcttgacaattgacatttgcacccggatgaaataagtatgcttcaagctttctagcttggccatactgagcagccacaaataaaggtgtgattccaaagtcatcctggcattccttgtttgctccttttctaagaagcaattttatgatctcagcattttcctgaaaagaagcctggtgcaaggagttccatccacacatagaatgggatccattaacatttgctccgtgttgaagcaacagccttaacacatctatctgtccattttcaacagctaaaaacaatggtgtcgtttcttctaaagtagttgcattaggatctgccccagcttctaaaagaatctgtacgattttccaatgtccttgacttgcagcgagatgcaaagcacagaaaccttcaaaggtcttcatcttaatgtagttttcagatgaatctgcattaattaacatttgcaaacattctacagagttgtgataagctgcttcatgaattggcatccatcccctgttatcagcaacatcgacacttcggccctttttgagcagtttccttaagactttaacattgccttccctggcagcaagtccaactgtagagcacgtgtccgcgtaagcctctgtaaaatccatttgtttgaccagtcgacctgccgtgctgccacttctacaccgaaatggctggtccgaggccgcgtctccagagctgcgtcccagaagcccccgctttcgatccccaccgcgatgctgcagccgtccgaaaacgagagacgcgcaggcgacgtcccggcccccgtaggcggacggctccgcgacccccggatgttgatatgtcgtctgccccggaaacggtgacaggaggctcaagggggcggaggcggcgttgccgggctctccggaaggagacgtggcggcggttgggccggtgatacccgggcgctttatagtcccgccgcctcctcctccacctcctcctcctcctcctctcctcctggagcagaggaggttgtggcggtggctggagaaagcggcggcggaggatggaggaaggaggcggcggcgtacggagtctggtcccgggcgggccggtgttactggtcctctgcggcctcctggaggcgtccggcggcggccgagcccttcctcaactcagcgatgacatccctttccgagtcaactggcccggcaccgagttctctctgcccacaactggagttttatataaagaagataattatgtcatcatgacaactgcacataaagaaaaatataaatgcatacttccccttgtgacaagtggggatgaggaagaagaaaaggattataaaggccctaatccaagagagcttttggagccactatttaaacaaagcagttgttcctacagaattgagtcttattggacttacgaagtatgtcatggaaaacacattcggcagtaccatgaagagaaagaaactggtcagaaaataaatattcacgagtactaccttgggaatatgttggccaagaaccttctatttgaaaaagaacgagaagcagaagaaaaggaaaaatcaaatgagattcccactaaaaatatcgaaggtcagatgacaccatactatcctgtgggaatgggaaatggtacaccttgtagtttgaaacagaaccggcccagatcaagtactgtgatgtacatatgtcatcctgaatctaagcatgaaattctttcagtagctgaagttacaacttgtgaatatgaagttgtcattttgacaccactcttgtgcagtcatcctaaatataggttcagagcatctcctgtgaatgacatattttgtcaatcactgccaggatctccatttaagcccctcaccctgaggcagctggagcagcaggaagaaatactaagggtgccttttaggagaaataaagaggaagatttgcaatcaactaaagaagagagatttccagcgatccacaagtcgattgctattggctctcagccagtgctcactgttgggacaacccacatatccaaattgacagatgaccaactcataaaagagtttcttagtggttcttactgctttcgtgggggtgtcggttggtggaaatatgaattctgctatggcaaacatgtacatcaataccatgaggacaaggatagtgggaaaacctctgtggttgtcgggacatggaaccaagaagagcatattgaatgggctaagaagaatactgctagagcttatcatcttcaagacgatggtacccagacagtcaggatggtgtcacatttttatggaaatggagatatttgtgatataactgacaaaccaagacaggtgactgtaaaactaaagtgcaaagaatcagattcacctcatgctgttactgtatatatgctagagcctcactcctgtcaatatattcttggggttgaatctccagtgatctgtaaaatcttagatacagcagatgaaaatggacttctttctctccccaactaaaggatattaaagttaggggaaagaaaagatcattgaaagtcatgataatttctgtcccactgtgtctcattatagagttctcagccattggacctcttctaaaggatggtataaaatgactctcaaccactttgtgaatacatatgtgtatataagaggttattgataaacttctgaggcagacatttgtctcgctttttttcatttttgttgtgtcttataaactgactgtttttctttgcttggatactgtgattccaaaataaatctcatccaagcaagttagagtccagcctaatcaaatgtcataattgttgtacctattgaaagtttttaaataatagatttattatgtaaattatagtatatgtaagtagctaatgaagtaaagatcatgaagaaagaaattgataggtgtaaatgagagaccatgtaaaatatgtaaattctagtacctgaaatcctttcaacagatttttatatagcaactgctctctgcaagtagttaaactagaaactgggcacatggtagaggctcacatgggagttgtcctcacccttgttaatctcaagaaactcttatttataataggttgcttctctctcagaacttttatctattacttttttcttcttatgagtatgtttactctcagagtatctatctgatgtagacagttggtgatgcttctgagactcagaatggtttactctaacaaaacactgtgctgtctatcccttgtacttgcctactgtaatatggatttcacttctgaacagtttacagcacaatatttattttaaagtgaataaaatgtccacaagcagtgttaaaaaaaaaa

SEQ ID NO: 89912 - DNA, 3502 bp, Homo sapiens
ggaaaacagcagaggtgacagagcagccgtgctcgaagcgttcctggagcccaagctctcctccacaggtgaagacagggccagcaggagacaccatggggcacctctcagccccacttcacagagtgcgtgtaccctggcaggggcttctgctcacagcctcacttctaaccttctggaacccgcccaccactgcccagctcactactgaatccatgccattcaatgttgcagaggggaaggaggttcttctccttgtccacaatctgccccagcaactttttggctacagctggtacaaaggggaaagagtggatggcaaccgtcaaattgtaggatatgcaataggaactcaacaagctaccccagggcccgcaaacagcggtcgagagacaatataccccaatgcatccctgctgatccagaacgtcacccagaatgacacaggattctacaccctacaagtcataaagtcagatcttgtgaatgaagaagcaactggacagttccatgtatacccggagctgcccaagccctccatctccagcaacaactccaaccctgtggaggacaaggatgctgtggccttcacctgtgaacctgagactcaggacacaacctacctgtggtggataaacaatcagagcctcccggtcagtcccaggctgcagctgtccaatggcaacaggaccctcactctactcagtgtcacaaggaatgacacaggaccctatgagtgtgaaatacagaacccagtgagtgcgaaccgcagtgacccagtcaccttgaatgtcacctatggcccggacacccccaccatttccccttcagacacctattaccgtccaggggcaaacctcagcctctcctgctatgcagcctctaacccacctgcacagtactcctggcttatcaatggaacattccagcaaagcacacaagagctctttatccctaacatcactgtgaataatagtggatcctatacctgccacgccaataactcagtcactggctgcaacaggaccacagtcaagacgatcatagtcacagagctaagtccagtagtagcaaagccccaaatcaaagccagcaagaccacagtcacaggagataaggactctgtgaacctgacctgctccacaaatgacactggaatctccatccgttggttcttcaaaaaccagagtctcccgtcctcggagagggatgaagcctgttcccagggcaaacccccccccccccctcagcataaacccctgtcaagagggaggatgctggggacgttattttgtgtgaggtctttcaaaacccaaatcagtaagaaccaaaaagcgacccccatcatgctgaacgtaaactataatgctctaccacaaagaaaatggcctctcacctggggccattgctggcattgtgattggagtagtggccctggttgctctgatagcagtagccctggcatgttttctgcatttcgggaagaccggcagggcaagcgaccagcgtgatatcacagagcacaaaccctcagtctccaaccacactcaggaccactccaatgacccacctaacaagatgaatgaagttacttattctaccctgaactttgaagcccagcaacccacacaaccaacttcagcctccccatccctaacagccacagaaataatttattcagaagtaaaaaagcagtaatgaaacctgtcctgctcactgcagtgctgatgtatttcaagtctctcaccctcatcactaggagattcctttcccctgtaggggtagaggggtggggacagaaacaactttctcctactcttccttcctaataggcatctccaggctgcctggtcactgcccctctctcagtgtcaatagatgaaagtacattgggagtctgtaggaaacccaaccttcttgtcattgaaatttggcaaagctgactttgggaaagagggaccagaacttcccctcccttccccttttcccaacctggacttgttttaaacttgcctgttcagagcactcattccttcccacccccagtcctgtcctatcactctaattcggatttgccatagccttgaggttatgtccttttccattaagtacatgtgccaggaaacaagagagagagaaagtaaacggcagtaatgccttctcctatttctccaaagccttgtgtgaactcaccaaacacaagaaaatctaaatatataaccaatagtgaaatgccacacctttgtccactgtcagggttgtctacctgtaggatcagggtctaagcaccttggtgcttagctagaataccacctaatccttctggcaagcctgtcttcagagaacccactagaagcaactaggaaaatcacttgccaaaatccaaggcaattcctgatggaaaatgcaaaagcacatatatgttttaatatctttatgggctctgttcaaggcagtgctgagagggaggggttatagcttcaggagggaaccagcttctgataaacacaatctgctaggaacttgggaaaggaatcagagagctgcccttcagcgattatttaaattattgttaaagaatacacaatttggggtattgggatttttctccttttctctgagacattccaccattttaatttttgtaactgcttatttatgtgaaaagggttatttttacttagcttagctatgtcagccaatccgattgccttaggtgaaagaaaccaccgaaatccctcaggtcccttggtcaggagcctctcaagattttttttgtcagaggctccaaatagaaaataagaaaaggttttcttcattcatggctagagctagatttaactcagtttctaggcacctcagaccaatcatcaactaccattctattccatgtttgcacctgtgcattttctgtttgcccccattcactttgtcaggaaaccttggcctctgctaaggggtatttggtccttgagaagtgggagcaccctacagggacactatcactcatgctggtggcattgtttacagctagaaagctgcactggtgctaatgccccttggggaaatggggctgtgaggaggaggattataacttaggcctagcctcttttaacagcctctgaaatttatcttttcttctatggggtctataaatgtatcttataataaaaaggaaggacaggaggaagacaggcaaatgtacttctcacccagtcttctacacagatggaatctctttggggctaagagaaaggttttattctatattgcttacctgatctcatgttaggcctaagaggctttctccaggaggattagcttggagttctctatactcaggtacctctttcagggttttctaaccctgacacggactgtgcatactttccctcatccatgctgtgctgtgttatttaatttttcctggctaagatcatgtctgaattatgtatgaaaattattctatgtttttataataaaaataatatatcagacatcg

SEQ ID NO: 89913 - DNA, 1021 bp, Homo sapiens; identical to SEQ ID NO: 75838

SEQ ID NO: 89914 - DNA, 1252 bp, Homo sapiens
ccttttctttttaataaaaattacactgcaactggaacagtttctgatctcaaaaggcaagcctcttcccgtgtgatctttataatttacactcttttccgtgagctttcttacctccctttttttataactctccatattctctattcatacatatatccattatattagtaggggaataatttttatttttatttattttttttggctttagtacttgcaccctcacacacactctcccgagaaccagaagtcggttgggtgtttatataatgaagaattatggggctgtttgatcgaggtgttcaaatgcttttaaccaccgttggtgctttcgctgccttcagcctgatgaccatagctgtgggaaccgactattggctctactccagaggggtttgcaagaccaaaagtgtcagtgagaatgaaaccagcaaaaagaacgaggaagttatgacccattccggattatggagaacctgctgcctagaagggaatttcaaaggtctgtgcaagcaaattgatcacttcccagaggatgcagattacgaagctgacacagcagaatatttcctccgggccgtgagggcctccagcattttcccaatcctgagtgtgattctgcttttcatgggtggcctctgcatcgcagccagcgagttctacaaaactcgacacaacatcatcctgagtgccggcatcttcttcgtgtctgcaggtctgagtaacatcattggcatcatagtgtacatatctgccaatgccggagacccctccaagagcgactccaaaaagaatagttactcatacggctggtccttctacttcggggccctgtccttcatcatcgccgagatggtcggggtgctggcggtgcacatgtttatcgaccggcacaaacagctgcgggccacggcccgcgcccacggactacctccaggcctctgccatcacccgcatccccagctaccgctaccgctaccagcgccgcagccgctccagctcgcgctccacggagccctcacactccagggacgcctcccccgtgggcatcaagggcttcaacaccctgccgtccacggagatctccatgtacacgctcagcagggaccccctgaaggccgccaccacgcccaccgccacctacaactccgacagggataacagcttcctccaggttcacaactgtatccagaaggagaacaaggactctctccactccaacacagccaaccgccggaccacccccgta

SEQ ID NO: 89915 - DNA, 827 bp, Homo sapiens; identical to SEQ ID NO: 60912
  misc_feature (1)...(827): n = a,t,c or g

SEQ ID NO: 89916 - DNA, 1097 bp, Homo sapiens
tacaagcaaatgctggtgaatgctttcacggagcaaattctgcctcacttctccacggagggcccccaacgtctgctgccggttctggacagaatctacccagtgaccgaaatccaggaggcccataagtacatggaggccaacaagaacataggcaagatcgtcctggaactgccccagccccgccctctccacccgggttcctctgctcagggcctccccgaccggaacatctcgccttttggaggctacgccccgccctttacggtacagagcccggaagtgtcttggactctcgcctttccatcttccggcctcgagtctcgctcaggctcggttttaccccggagtctattcgaagggggctgctacgtcagcgcgtctcagcgtaagacggcgctattccgctgtaacagcttccggcgggtcctggatgttgatgtcctgcatctaacgcggtgtaacccccgaagccgagcgagctccggaggaatttcagtatctgctacggtaacttcatcagcccgccaagatggcgatgcaagcggccaagagggcgaacattcgacttccacctgaagtaaatcggatattgtatataagaaatttgccatacaaaatcacagctgaagaaatgtatgatatatttgggaaatatggacctattcgtcaaatcagagtggggaacacacctgaaactagaggaacagcttatgtggtctatgaggacatctttgatgccaagaatgcatgtgatcacctatcgggattcaatgtttgtaacagataccttgtggttttgtactataatgccaacagggcatttcagaagatggacacaaagaagaaggaggaacagttgaagcttctcaagggagaaatatggcatcaacacagatccaccaaaataaatgttttctacattttcatttggactaaatcccacgaatgacaactaccaccttttttttcctttttaattaatactaaatattgtgatttcttatttgaggttcaaaatgacctggctggaaactttgatacatattggaatacattatgttaataaacttgtaatctttttgtgaaaaaaaaaa

SEQ ID NO: 89917 - DNA, 2675 bp, Homo sapiens
atgggtctgtgggcaggagagggcacactccagtggtgtctgaggctgttgcttcagaaggttggaggcagaccagctacgagctggagcacaggaagaaaaggaacagaagaggggatccatccatatgtgactgagatatggtcgaatctaaaccaagtcacaaaatcagtgatatccattgtgcggaggtatccactagatgccactgccaagttaagagagctgaatcctaatcgtgaggttttgaggggagatcattcacagaagtctctgtctcctttcatctacagtcgcagctgttttccagacgccttgctcctcaggtcggggagtgatctgatggcccaggttcgagaaacttctttgccctccggctctggggtccgctggatctccggaggtgggggaggagcctctcctgaggaggcggttgagaaggcggggaaaatggaggaggcggcggcgggggctacgaaggcgtcttcgagacgtgaagccgaggagatgaagctggagccattacaagagcgtgagcccgcgccggaggagaacttgacgtggagcagcagcggcggcgacgagaaggtgctcccttcaatcccccttcgctgtcacagcagctcctcgcccgtttgcccgcgccgcaagccccgccctcggccccagccccgggcccgctcccgcagccagcctgggctctcggccccacccccgcctccagcccggcccccgcccccgccgccacccccgcccccacccgcaccgcggcccagggcctggcgtggatcccggcgcagatcccggcctgggtccaggcctcagacacggagaagctgctctggtgaccttagacgggtcgggggatcctggcggcttaggggactggttgctggaagtcgagtttggtcagggtcccacaggctgctctcatgtggagagctttaaagtaggtaagaactggcagaagaacctgaggttgatctaccagcgtttcgtttggagtgggaccccagagactaggaaacgtaaagcaaagtcatgcatctgtcacgtatgtagtacccatatgaacagactccactcttgtctctcctgtgtcttttttggctgcttcactgagaaacatattcacaaacatgcagaaacaaagcagcaccatttagctgtagacctttatcatggggtcatatattgcttcatgtgtaaggattatgtatatgacaaagacatagaacagattgccaaagaaacaaaagaaaaaattttgagattattaacttccacctcaacagatgtttctcatcaacagtttatgacatcagggtttgaagacaagcaatcaacctgtgagacaaaggaacaggagccaaaattggtgaaacccaagaaaaagagaagaaaaaagtcagtctatactgtaggcctgagagggctaatcaatcttgggaacacttgttttatgaattgtattgtccaggcacttacccatattcctctactgaaagatttcttcctctctgacaagcacaaatgtataatgacaagccccagcttgtgtctggtctgtgaaatgtcttcgctttttcatgctatgtactctgggagccgaactcctcacattccctataagttactgcatctgatatggatccatgcagaacatttagcagggtacaggcagcaggatgcccatgagttccttattgcaatattagacgtgctacatagacacagcaaagatgatagtggtgggcaggaggccaataaccccaactgctgtaactgcatcatagaccaaatctttacaggtggcctgcaatcagatgtcacatgtcaagcctgccatagtgtttctaccaccatagacccatgctgggacatcagtttggacttgcctggctcttgtgccacattcgattcccagaacccagagagggctgacagcacagtgagcagggatgaccacataccaggaatcccctcacttacagactgtctacagtggtttacaaggccagagcacctaggaagcagtgccaaaatcaaatgcaatagttgccaaagctaccatgagtctactaaacagctcacaatgaaaaaattacccattgtggcttgttttcatctcaagcggtttgagcatgtaggcaaacagaggcgaaagattaatacctttatctcctttcccttggagctggacatgactccgtttttggcctctactaaagagagcagaatgaaagaaggccagccaccaacagattgtgtgcccaatgagaataagtattccttgtttgcagtgattaatcaccatggaactttggaaagtggccactataccagcttcatccggcaacaaaaggaccagtggttcagctgtgatgatgccatcatcaccaaggctaccattgaggacttactctacagtgaagggtatttactgttctatcacaaacagggtctagagaaagactagtcttaccagaccacttactgaaaaaaaagtaaatgattaggcaaggattttgaagtgacacacagacctacttggaatggacaatgacagtaacacctatgtgacagctagtatcttgatataaagaacctattttagcatggcccatgggtctgtcggaagaaaaaaatgaatactaaccagtgaccattcaacc

SEQ ID NO: 89918 - DNA, 5964 bp, Homo sapiens
gaactcccgggtcgacgatttcgtgcagcgtgtagtgcgagtggggcggacgcgcgcagcccgcccgcccggcgaccagcaaggagttggcatcctttggaagagttcgtgaaagctttctgcccagagctcctggaccaatgcatcttcccaccaccttaaaccactgagcagttcagagccccagttgcagacgacttgtcctgccaccaccatgagttctgaatgtgatggtggttccaaagctgtgatgaatggcttggcacctggcagcaatgggcaagacaaagacatggatcctacaaaaatctgcactgggaagggagcggtgactctccgggcctcgtcttcctacagggaaaccccaagcagtagccctgcgagccctcaggaaacccggcaacacgaaagcaaaccaggtctggagccagagccttcttcagcagatgagtggaggctttcttccagtgctgatgccaatggaaatgcccagccctcttcactcgctgccaagggctacagaagtgtgcatcccaaccttccttctgacaagtcccaggatgccacttcctccagtgcagcccagccggaggtaatagttgtccctctctacctggttaatactgacagagggcaagaaggcactgccagacctccaacacctctggggcctcttggctgcgtccccacaatcccagcgactgcctctgccgcctcacctctgaccttcccgactctagatgatttcattccccctcatctgcagaggtggccccaccacagccagccagcccgcgcctctggctcctttgcccccattagccagacgccaccatccttctcaccaccacctccgctggtccctcctgccccggaggacctccgcagagtctcggagcctgacctcacgggagctgtttcgagtaccgattccagtcctcttactaaatgaagttttcttcttccccttattgggactgattcccaagccttttcatcagaatgcaagccttcatccgcctatccctccacaacgattgtcaatcctacaattgtgctcttgcaacacaatcgagaacagcaaaaacgactcagtagcctttcagatcctgtctcagaaagaagagtgggagagcaggactcagcaccaacccaggaaaaacccacctcacctggcaaggctattgaaaaaagagcaaaggatgacagtaggcgggtggtgaagagcactcaggacttaagcgatgtttccatggatgaagtgggcatcccactccggaacactgagagatcaaaagactggtacaagactatgtttaaacagatccacaaactgaacagagatgatgattcagatctgtactctcccagatactcattttctgaagacacaaaatctcccctttctgtgcctcgctcaaaaagtgagatgagctgcattgatggtgagaaggtagtcaagaggtcggccacactacccctcccagcccgctcttcctcactgaagtcaagctcagaaagaaatgactgggaacccccagataagaaagtagatacaagaaaatatcgtgcagagcccaagagcatttacgaatatcagcctggcaagtcttccgttctgaccaacgaaaagatgagctcagccatcagccctactccggaaatttcttcagagactcctggatatatatattcttccaacttccatgcagtgaagagggaatcagacggggctcctggggatctcactagcttggagaatgagagacaaatttataaaagtgtcttggaaggtggtgacatccctcttcagggcctgagtgggctcaagcgaccatccagctctgcttccactaaagattcagaatcgccaagacattttataccagctgattacttggaatccacggaagaatttattcgaagacgtcatgatgataaagagatgagacctgccagagccaaatttgactttaaagctcagacactaaaggagcttcctctgcagaagggagatattgtttacatttataagcaaattgatcagaactggtatgaaggagaacaccacggccgggtgggaatcttcccacgcacctacatcgagcttcttcctcctgctgagaaggcacagcccaaaaagttgacaccagtgcaggttttggaatatggagaagctattgctaagtttaactttaatggtgatacacaagtagaaatgtccttcagaaagggtgagaggatcacactgctccggcaggtagatgagaactggtacgaagggaggatcccggggacatcccgacaaggcatcttccccatcacctacgtggatgtgatcaagcgaccactggtgaaaaaccctgtggattacatggacctgcctttctcctcctccccaagtcgcagtgccactgcaagcccacagcaacctcaagcccagcagcgaagagtcacccccgacaggagtcaaacctcacaagatttatttagctatcaagcattatatagctatataccacagaatgatgatgagttggaactccgcgatggagatatcgttgatgtcatggaaaaatgtgacgatggatggtttgttggtacttcaagaaggacaaagcagtttggtacttttccaggcaactatgtaaaacctttgtatctataagaagactgaaaaccatggagattatttttattggaggaggaagcatcattcatgaaccgatctttttagttgagtcagtaggaaaattaatacagtggataaagtaagaagcaaaagacagggacagagaagtgttgtgtttaaaacccaagcctgtctaaggttactgtgtattagacagggccgaactagtgtgctgagcaaaaagaattgaagcaaattgtatttacttagccgcttctgggagccacttcagcctttcccctcccctccacttcttgggtaatctgacctgaagcatagtccaggagcagagttagccagaaatgcctcctgctgccccagccttagagagctcccatctcaatcattgagcctgaaggcttcaagcccaagaatgcaacaagacccccagcctacatttctcagctcccctggagccagctgatcctgtaacgctgctggaggtcagtctgagctaccaagactgtccctagacaaaggtggagtcccccacactgcccaagaccaaatccctcactcaacctgctgaggtgtggatggggaaacagaggcaaaactgaggcacctgatgcattcagcctgctgtgcagcagtgccattgactgccctgatgttcagagagaaacgcacacaaggtttgcccatgagaattggggagcagatggccaagcagataggttatgtctgttttctgagtgatgaagtcaggaagccctgtggctctggaggccacttgtggttcattcttttcccatatccttggcttttagaaatggttaccttcaggacagtgcagctgcatttatcagagcactattgctaagttttcttttctggcttgtgtttttctgggacagtttagaattgggaggcctattctcatagaacaccaaaaatgatgttcagtgattcatttaacatacaccaatgtactctggctgctggggggacaaccataagcaagacatgcccagggtttgccggggctccaaatctactccctgtaggagttcaaggatcacacaaacggtagtaaccagggttgggaatctgagtacaccctggcaaggctttttttcaaactgaagcagcaattttgccactaccagcagcaaccaggacgtctgttttttgtgggggccaaatcaaaaaaaaaaggcccctgtgacgcccgggctgcttggtcacaactctgtccaattcaaggatgtttatcggcctctcttagatcctgagtgagacaaatacagaaatgacccattccctgcccaccagaaactcagaggtgattggggagactgacacaggaaaatgaacttaatcaagagagactgtgatatgtgctaaaaagggtgtgagggagggagagatgaattttccctggagggatcctagaaagcattgtcatattgccatctccattagctcacttttaaacaactagggtgctggaagaacctttgtctgagggtagttcatagctggaaatacttggaatattttccagagtctctaaactctcatcttcccccacagatacacatccaagctcacaaataggagtagcaattctaggtggtagggttgtgtacggaacccctggctgtctgcatatatctcagaattaccccaggaccattgtcccaaagtctagagtctttacaggtaggcaaaatttgttttcaatgcctgtgcctcagctgctgtcacaaatacccatcttaggatcccatcagcttcccatcccccaccagacagccacagtaccctcactttctccctattgttctttcaaatcctgttctcaggaaagaaactgccactaattcattcacactaaggtgtaaatgattgataataggaatgagttacctcttcccacagacatttgtttttaagtatgacagagcagggccttaatcccaagggaaaaggttatggaactggagggggtgagctttctgggtagaaggagacttcctgaatttccttaaaacccagtaagagtaagacctgttgttttggaaggtctgctccaccatctaagagcactgttttttttttgttgttgttgttgttgttttacggcctctgagggaatatagtaaaaatgcatatgcacgtgcaatttgcacggcagcatttcaccgattgtggactgtattggctaatgtgtttcctggtctttagatgcaaaccattaataacactatcttatctcatagttttttcaggggtgcttcttgattagtagggaattttgaacacctctttaaatacagctagaaaataaaaccaatttgtaaagccacatttgcatatgatgccagcctcacgcatttgtatatctccagaaattcaggtatgcctcaccaatttgcccgtctttaataaaatcttgtgttaaaatttgcatcacgtcgccttcctatgtatgacgaaacaagaaacagagatttccaattgctcttttgtcttcagacatttagtaatataaagtacctatttttatgctgaaatgtttatacaggtttattaatagcaagtgcaactaactggcggcatgccttgcaacacattttgatatattagccatgcttccgggtaaaggcaagccccaaactccttatcttttgcagtctctctgggatcagtaaaagaaaaaaaaaaataatgtgcttaagaagtgggactgtaaatatgtatatttaactttgtatagcccatgtacctaccttgtatagaaaaataattttaaaaatttgaatggaagggggtaaaggaagtcatgaagtttttttgcatttttatttaaatgaaggaattccaaataactcacctacagatttttagcacaaaaatagccattgtaaagtgttaaaatttacgataagtattctattggggaggaaaggtaactctgatctcagttacagtttttttttcctttttaatttcattattttgggtttttggtttttgcagtcctatttatctgcagtcgtattaagtcctattgctagaataggttactacaaaaaaggttatattctgaaagaaaaataactgacattatatataaccaattaatttaaagtattgccatttaaattacacactgagagcatgtcctatgcagacatagatttttctgttcatttatttttcttcattgcagtggattgatttgataaatagatgtgttgaattactacatttgctgtacatattatttaataaactttattcagaattgcgtggcaaaaaaaaaa

SEQ ID NO: 89919 - DNA, 2464 bp, Homo sapiens
gataaacccacaagacacaaaacatacctttcgagcagttgggccaagatggcggccgccgagggaccggtgggcgacggcgagctgtggcagacctggcttcctaaccacgtcgtgttcttgcggctccgggagggactgaaaaaccagagtccaaccgaagctgagaaaccagcttcttcgtcgttgccttcgtcgccgccgccgcagttgctgacgagaaacgtggtctttggcctcggcggagagcttttcctgtgggacggagaagacagctccttcttagtcgttcgccttcggggccccagcggcggcggcgaagagcccgccctgtcccagtaccagagattgctttgcataaatccacccctgtttgaaatctatcaagtcttgttaagcccaacacaacatcatgtagcacttataggaataaaaggacttatggtattagaattacctaaaagatgggggaagaattctgaatttgaaggtggaaaatcaacagtgaattgtagtaccactccagttgcggagagatttttcaccagttccacctctctgactctaaagcatgctgcatggtatccaagtgaaatcctggatccccacgtagtgctgttaacatcagacaacgtaatcagaatttactcactacgtgagccgcagacacccactaacgtgataatactttcagaagccgaagaggaaagtctagtactcaataaaggaagggcgtataccgcatctctaggagagacagcagttgcatttgactttgggccattggcagcagtcccaaagactctatttggacaaaacggcaaagatgaagtagtggcatacccactgtacatcttatatgaaaatggagagactttcctgacatacatcagtctgttacacagccctggaaatattggaaagctgttgggtccattgcccatgcatcctgcggctgaagataactatggttatgatgcgtgtgctgtactctgcttaccctgtgtccccaatatcttagtgatcgctactgaatcaggaatgctgtatcactgtgtcgtgctagaaggggaagaagaagatgaccacacgtcagaaaagtcctgggattccaggattgacctcattccttctctgtatgtgtttgaatgtgttgagttggagcttgctttgaaactggcatctggagaggatgacccttttgattctgacttttcttgtccagtcaaacttcatagagatcccaagtgtccttcaagatatcactgtactcatgaagctggtgtacatagtgttgggctaacttggattcataaacttcacaaatttcttggatcagatgaagaagataaggatagtttacaggaactctctacagaacagaaatgctttgttgaacacatcctttgtacgaagccattgccctgcaggcagccagctccaattcgaggattttggattgtacctgacattctgggacccacgatgatctgcatcaccagtacctatgaatgcctcatatggccgttattaagtacagtccatccagcgtctcctcccctgctttgtactcgagaagatgttgaagtggcagagtctcccctccgtgttctggctgaaaccccagattcctttgaaaagcatattagaagcattttgcaacgtagtgttgccaatccagcatttttgaaagcttctgaaaaggacatagcccctcctcctgaagaatgccttcagctcctcagcagagccacccaggtgttcagagagcagtacattctcaaacaggacttggcaaaggaggagattcagcggagggtcaaattattatgtgaccaaaaaaagaaacaactagaagatctcagttattgtcgagaagagaggaaaagtctgcgggaaatggctgagcgtttagctgacaaatatgaggaagctaaagaaaaacaagaggatatcatgaacaggatgaaaaaactacttcacagttttcactctgagctcccagttctctctgatagtgagcgagacatgaagaaagaattacagctgatacctgatcaacttcgacatttgggcaatgccatcaaacaggttactatgaaaaaggattatcaacagcaaaagatggagaaggtgttgagtcttccaaaacccaccattattctcagtgcctaccagcgaaagtgcattcagtccatcctgaaagaggagggtgaacatataagggaaatggtgaagcaaatcaatgatatccgcaatcatgtaaacttctgacaccaccaggagctgactcacacctgaactgaacaccattgaaggcttaaacccatattgtaaaacaggtagaattatctaatttataaaaaggtgttttgatgacctttggtgtggttcatctttttaaatatgttgttttataataattgagtaaatgcttttatttaaaatttggaatgtgctttat

SEQ ID NO: 89920 - DNA, 2512 bp, Homo sapiens
cgacgatttcgtgggagttctgagtgcgacggcgcaggtctgcaccatggcggcccggcttgtcagccgatgcggggctgtgcgtgcagctccccacagcggcccgctggtgtcctggcgcaggtggtccggcgcctcaacagacaccgtgtatgacgtggtggtgtcgggtggaggcctggtgggcgctgccatggcctgtgccttgggatatgatattcactttcatgacaagaaaatcctgttgctcgaagcaggtccaaagaaagtactggagaaattgtcagaaacttacagcaacagggtcagctccatttcccctggctctgcaacgcttctcagtagttttggtgcctgggaccatatctgcaacatgagatacagagcctttcggcgaatgcaggtgtgggacgcctgctcagaggccctgataatgtttgataaggataatttagatgacatgggctatatccttggagaatgatgttcatcatgcatgctttcactaagcagttggaggctgtgtctgaccgagtgacggttctctacaggagcaaagccattcgctatacctggccttgtccatttcctatggccgactccagcccttgggttcatattaccctaggtgatggcagcaccttccagaccaaattgttgataggtgcagatggtcacaactccggagtacggcaggctgttggaatccagaatgtgagctggaactatgaccagtctgctgttgtggctactctgcatttatcagaggccacagaaaacaacgtagcctggcagagatttcttccctctgggcctattgctctgctcccgctctcagacaccttgagttccttggtttggtccacgtcccatgaacatgcagcagagctagttagcatggatgaggaaaaatttgtggatgccgttaactctgccttttggagtgatgctgaccacacggacttcatcgacacagctggtgccatgctgcagtatgctgtcagccttctgaagcccactaaggtctcggctcgccagctgcccccaagcgtagccagggtggatgccaaaagccgagttctgtttcctcttgggttgggacatgctgctgagtacgtcaggcctcgggtggcgctcattggggatgcagcccacagagtccatccgcttgcaggacagggtgtcaacatgggctttggggatatctccagcttggcccatcacctcagtacggcagccttcaatgggaaggacttaggttccatgagccacctcacaggttatgaaacagaaagacagcgtcacaacactgctcttctggctgctacagacttactaaaaaggctctattctaccagtgcctccccgcttgtgttgctcaggacgtggggcttgcaggccacaaatgcagtgtctccactcaaagaacagattatggcctttgcaagcaaatgagtactcctctcctaaagaaagattacgttgatgaaaaagaacatcctgcccaggacccatcatacatattttcaagatcttatttaatttaataaacttactttacattaaaattctctttttcttctttgcttaatgggcctgtggcacccaaataatgaatgataatttgctgtgaggagcgtatattagccagaccaaaggaaaaaacttcgaaggaagacttacaatttggttgaaaagagctttttattactaaaaaacccacaaggtgctgtctcactcatttccagttaatcatttctaaagagaaaatttacattttgtttttgttttaatgttggtcataaatttatacagttgttttttcgatagaggtaagaattagactcgatgcatttttgttagaattgctgtttaaatgttaacatcaggaatgcaaattaaatataaattgctttaacctttgttacaggggatactgggacttttctgaaaggaaaaccagggtctcattaatgctaggttattactttatcacaggcaccagattttccattttatttatgggttcctctctgggacaccactggtccggtttaataaaacaataaataattcattgcacagatccgaagtacctcaggaaccagatcacaagggaaaccgattagcagcagaatttgttcatgtttggtggcagactggtggccaactggagggaggggagttttactgtgggtttttgaagaggtctcgtcacaagaccagagatgcctcttgaagagatttttaggttgtaggtttgcttactctaaagaacatcttgcccagaagtctgatttgagatgaaatgaagagaaacagtctgcttttgaaccaagtaaggtattcttgggaataatttttagagccatgagaaatctattcttacaggggtgcttttcaggcaaatgcagaaaatttaaaagagtctagaacaaaaaagtgacaatgtcacaaccttgctggaatctcaggaaaaagaattaaagatggcagctgctgtgaaaagctg

SEQ ID NO: 89921 - DNA, 7703 bp, Homo sapiens
tttttttttgtaagaaatctgattattcaaatttattaccatcaagaattatgcaatgatgctgtagtttttcttaacaaatagaaaacagactgtgtacaacagtgaactctacagcactagcacccacaaggtaaaaatgaatgtttcatcatccaacattaccaaccctggaatgttgatcttgacttagcctagctaggtttggggacgtcggcaccacgtccctcagctaaaacagctatgcacccttccccgcccccacttacctatctagatagcgctgcccagaggaagaggcgctctccctgcccctcagcaagctgggataataaggactgattagagtaccattgatagaagtccagtagtcttgccacattggtttatgagggcatcttggagtggaaaagagcgattatcgggggctttgaaaacagctgcaaaccagggaggaaaatcatctggcccctgctctgaggacagacatgtgctaccaggcccactggcctggacctgaaaggccagccacgcccccgcttggccctgaggtgcatggggtgtggcacacaccctaacctgtgctattcaccttggccacacagccagaccccacagcctacaaacaccacaccatactgcaatgctggggaccaaagccaggctctgtgggcccaggtcagccagcagctccctcgggaaccccaggcacacggagttgcttcccctcttgagggtttgaagcagaagccaagggctgactctttttttttttcttgggttttttgttttttttgttttttatttttgggggtttttgtttttgttttaacctttgcaaacacgatggtgatgaggaatgccttgccaggctctcccagacacatctgtggttctgggctgtgaatgttaaacacacactgggatagacgaccagggatgagtgttccctatcttctccccgcccaccactgtcaatgtggcctaaaaaaaggctttaaagggaaaacaaaacttaaaaaaacattgagtttccctgcatttagctgaaacaggatctcgtctgaagggctggaggagcagccggatcagcactgcctcccggcccacggccgagcctccgctcaggctggcagccccagctttgcacgaggaaggcaatgttctgtccttcagcagaagtcatacaaaataaggatccaaagtgaactcaagaaaaaaaaaaaacaaaacaaaataaaccccaacccctacagtggcccattctgcagatacggattcgcgaaaggaaaaatcagagggaagaggctaaaatccctcagtctaccccacttaatgtattaaaaaggaggctttgccccaaccccaccccatgagaagaagcatgagaaatgcgggagcgcaacagagagcttgaagcgggctccaggtgggtctggtggacagaagggccacagtgcctgcctgctgggccatccacttgcccagggatgttctaggctctctgattggtgtggcaacgttcctgaaacgctgtgatccccgtgggctgtgctctgccagtgacagcatctgcgtaggagggctggacgatggtcggtatggctcagaggagctgggtcccctccggagccccacggcgggggtggcggaggagaggggagcggtagttacgttgcatagtggtcaaagctgccgaggtactccagggccgcacggtagcacagctgatactggtcctctgtctgcaccatggcaggacgctgtgtacgcagggtcttcacggtctgaaacatgtcgaccacgccctcatagcgcatgcgctccaggacgatgctcagagtgatgaacaccccggtgcggcccacgccagcactgcagtgcaccgtgataggcccatcctgtccaaactgctccttggtcttatgcacctgcccgatgaagtcaatgaatccctcgcctgtcttgggcacgccctgctctggccagtctgtgaactggaactgccggattgtccttgactgcccatcccgggcatccgtgaccttgaactcacgcaggatatactggggcatgttgtactcagccatcgggtcaacaacaaagtactggtagcgagcagagcgctctgctggccagtactggtggcatttctccctgcccatctcccgaagcttggtcagcatgacgatgatggtggaattgtgctcccatagcatgcgccagaagtcctcggtgctctctgccagaggcccctgtgtagctatgtaggccttctgctgtctataaccatccaggaagctggcattgatgtagtcagagccctccacaccacggatgggctgcagacacacacgggtcaattcgtagggcatgatgttcaccagccggttcttgaacttgttgcagggcaggttggcgctgatgaagcgggacgtgtgggccttggagctggccagcaacttgaactcgagctccatggcggtcacactctcccctggaggcacttggcccagcttctggatgtgggcatacaggttgcgggcaggcacctctgtgtggccgcacgtggcagcctccagcagcgcctcatggatgaacacgtactggtcctccgtctgcaccatgtagttcctctgtgatcgcatgcaggtcacgtggccatagatgtccaccgtcttctcgtgcttcatccgctccaacatggcatcaatcacgatgaagcagccggtgcggcccacgcccgcgctgcagtgcaccaccatgggccctgcgtctagggggttgcaggccttgacccgtcgtaggaaggccaggatgggagttgggtactcaggaactccatggtctggccaggccatgaactgaaactgacgcagctcacgcttctcactggagccactcttgtggagtgcgaaggtgcgcacagtgtatgtggccagctccactgtgtccaacagggtcacctgaataaggccacaggtctcggtgccacgggctggccagtactgatcacattttacccgggacttctcctccagccgtgtcatcatgaccacagtggccgtgcgctgttcccacaccatcctccagaaatcgcccatggtctcgggcagggggccctgcgtggcgatgtaggcattctgcttgcggtagccatcgatgtagttggcattgatgtagtcactcccggggacgccatcgatagaggtaaggatgactcgagagtggtcgtaggcgatgacattcgcatagcggttcttgggcttgttcacctccaggtttgaattctcccacgtgaactgctgtccagggtcgatggactcatactcctgggagaacttgaggccatcgttggctttgaggcgctcgatgttgtccgccaggtcggtgatggggatgggtgggtggtctcgcatacctggggtctggtagttgagcctccgcatctccacagggtcagaggagtgggccagcaaggagtccttcagtccgatcgactgctcatccttagaggacggagagtgggtccttttccttttgaacaagaggatggcgatgacaatgaggatgatgaggatgactgccagcacgggacccgtcacccacagcatctccggctcctcctgctgctgggctggtgtcacctggaccacgatctcatccgagtaggggctggaggcatagcgcttctggtccatgggttccttcaaggaggcaagcacaaagcactggtagctcaagtccggagacaggggccggttgtagaagccccggtagttcttcttgtcccccaaggtaaaggtctccgggagcacatccagttgagcagccacatatggcttcagacgttctgcctgccgccgccgccgccgctgctcctctccgccttgctcgatggcttctagaagctcgtccagctccagttcctcgggtgtgctccaccttggcgtcagcatgctcccgcccacacggtcaatgggtaccacaacaatgtagaaccacctgacaagcgaggggtcttgcacatggggcatggagagatcgaagcggccgtcctctatgtaggcagaggcaggcagcggcttgtgaggcaggaggtcgggggctgtgcggatggacaccaggtgctgcaggccccctgcgctgctgccacggttcatcagcacaaacgagtactctgtgttgggctgcaggtctgcgatcagcttccgcatcgagtgcccgtccacctccacactctgcccattgtacagaatcttaaagggcacagctgacttataggagtcgggaacctcccagctgagcagcacagacgtcttcattgcagccgccacccggaagttcttggcaaacacttgctccaccggcatggtccgggactggatgctggggctgagtgggccagagcctttgctggtccatgcgcggaccttgatgtcgtaagtggtgtctggcttgaggccagtaagggtaaagcgggtgtctgtcgtgatgttctgcagctcctgttggctgttgatgtctcggaacaccacggtgtagctgatgatgcgcccgttcctctccgccagcactggcgggtcccaggccagttctgtggtagacgtggtcagtcctgtcacatgcaggttttgggggaagccgctgggcaggtcctcgggggtcctgatctccttctcgaactcctcacccaagccagcccggttcttggcagcaagccggaagatgtaggtggtccccttgtgcaggccggtgactgtgaagtgctggtcatccttgccgaaatctatggtgttgggccgcgcctcgtcggcccggcagtactgcagccggtagcccagcagctcgccaggcagttccttgggtgggtgccactggagcagccgcagtgttcatggccgtggtgctgatcatcatggtgggccggcctgggactgcacctgttgtagtgacaattttgggcttgctgcgggcaccatcccccttggtggtataggcagcaacagtaacggagtaggtggtctccggggtcaggccgctgatagtggtttcatagtcctcggactcctctggccgccactgggcctcggctagcatgacgtcttggatgatggggagtccacggggctcgccattctccagccgcacgtaggtgacctggtagccgcggatctggccatgctgcttgctggggacaggcagcttccagtagacatgcacagcagtggagttcagtggctccacctccaccttccgcggaggcccgctgggcacgtcctcatcggtgcgcaccagcaccgggctgctctcggggccggggcccacgtctgtgtgtgcccgcacccacacccggtactccgtccacttctccaggcccaccaggtcccagctggagtgctcacggctgatgccatccaccacatgccgcccgcggtcctcgccgtccaccgcctcgtaggccacggagtactgggtgataacgccgttgcggctgtcggcaggcggcgggacccaacttacccggaccgtggtggagcccatgctcacacacatcaccttctggggaggggcggagggggtggactgggctgtgcgggcctcaatggtgggggtgaagacgcccacccccatatccgagcgtgcagccagctggaagcggtagagtgtgtcaggcttcaggtcctctagtgtgtaggaggaggttgggtcgaaggtgaccttgtgctgttggtcttcgtcctctgccgcccagtacaccagttcatacatgatgatccgctcctgagggggcagcagccacgagagctggatcctggtgtccgactccacctcggcctggaagtccgcgggctgggcaggcactccctgctgcgtcttgacctggatggtggggctgggagggccatcgcccacggcggtgaaggcaagcacgcgcaggctgtaggtgatgccaggcagcaggctgcccacggtcgtgaggagccccgcgtcggtgttgtgcttgtgccaggcgttcggggggcggcgggagtccggagtatagtagacgcggtatccccgcaccaggccgttgggctcctcgggaggctcccactgcaccagcatggtgctggcgctcagcatgcgtgcctgcacgcggcgcggtgggctggagggcgcctgttctcccgtgcgtgcccgcactgcctcgctgggcggccctcgcccgatgctgttcaccgccagcacgcggaaggcatattccgagaaagggctgaggccgccaatgctgtagcgggtggtggccaccccatccacctcctgaaaggggccctccgtgcccgctgcgcggtactggatgccatagtaggttacaggctccgagttcccagagtcccaggtgagggtgacactggtggcagttgtctctgtcaccacaagatcaatcggaggctttggaagagctttcactgtgacctgggctgtggcctcgatcatgcccagcgaggagatggccacacaggtgtagttggcagagcgtacgacattgctgagctccaggacgttgcggccaactggcatctcatcctccttggtgagctcctcggcccccatcatccacttcacgtagggcatgggtgcacccactgccacgcatgtcaggttcacgctgccgcctggcatcacctcctggctgctgggagggatggagaaacgaggagccacgcggcgcactcgcacatacaggttcgcaggggctgagtaacgtgtgcctgccgagttggtcgccacacactcgtacttgccttggtcggattcctcactgctctctatctgcaaggcacctgaacgcagctgcttgatgcggccgttgctcgtggcagggtctacaggaaggaagtccttgaaccaagaaatctcagggtctggatttccgcctgcggcacatagcatggtggctgtgcgtgccttctccaccaccttcagctgaggccccatgtcgatggaagggaacccagggggcagctgttcctcttcgagcactgagagcttggcactagtgttgatctcacccaggctgttagtagctgtacactcatagatggcttcatctcgctgcacccgcaatggctggatccgaagcactgaccctgccccatcatcaaactcaatgacctcgaagcgctgggagctgactttcttccccttcttcatccatgtgatgcgcggcttgggttctcctgtagcttggcacacgaaggaggctacccctcctgacagcccagtctggtcctcagggactttaatgaagacaggtttgctgtcaccatgggcgcctgccaccaaaccaagcatcaccagtgcaggcacaaggggcaccatcgtcctccctggggctggctcaggggccatccagggctctagctccacagccagccacagcccaggacaatcaaccgagtctttgcttcttcaccccggtcactcttgctggatactcagcaccaagggccgggcaccagggcctccactccttccttcaatactgcccgtctcaggcagtggcatcttcagcaatttaatcactgacatgcagagaccttccctcctgcaccactgtccaatcagtcatcaatcctctcctccttccgctctgtctcccctgtgctcagggtgctccggcgcctccaggctttgctctctattccccgtccacgaaa

SEQ ID NO: 89922 - DNA, 4866 bp, Homo sapiens; identical to SEQ ID NO: 60983

SEQ ID NO: 89923 - DNA, 7113 bp, Homo sapiens
gttcagatgacctacggacaggtctatttcaggatgtacaggatgctgaatctttgaaattgcctggcgtctatgaagtcttattttataatgaaactgaagattgcccagggatgatgttatggagatatccagaacctagaggactcacccttgtacgaataactcctgtaccttttaacaccacagaggatccagatattagcacagcagaccttggtgatgtgctacaggatccttgtagcttggaatactgggatgaactccagaaggtttttgttgcatttagagaatttaatctgtctgaaagcaaagtttgtgaactgcagttgccggatatcaatctcgtgaatgaccagaagaaattagtatcttcagatctttggagaattgtcttgaacagcagtcaaaatggagctgatgaccaaagctctgcaagtgagtctggttctcaaagcacttgtgatccacttgtgactccaacagccctggctgcctgtaccagagttgactcctgctttaccccatggtttgtcccatccctttgcgtttctttccagtttgctcacctggaattccatctttgtcatcaccttgaccaactaggcacagctgcaccacagtacctacagccatttgtttccgacagaaatatgccatctgaactagaatacatgattgtttccttcagagaaccacacatgtatcttcgacagtggaataatggttctgtctgtcaggagatccagttcttagctcaagcagactgtaaacttctagagtgcagaaatgtcactatgcaaagtgtggtgaaacccttcagcatcttcgggcagatggcagtttccagcgatgtagtggaaaagctgcttgactgcaccgtgatagttgattctgtatttgtaaaccttggacagcatgtagtccattcactaaacactgcaatacaagcttggcaacagaacaaatgccctgaggtagaggagttggtcttcagccattttgtgatctgtaatgacacacaggagacactgcggtttggccaggtggatactgatgaaaatattctgctggcgagtctccacagtcaccagtacagctggcgctctcacaaatccccacagctgttacacatctgtattgaaggttggggcaactggcgttggtcagagcctttcagtgtggaccatgccgggacttttattagaacaattcagtacaggggtcgaactgcttctctcatcatcaaggttcagcaactcaatggagtacaaaaacagattatcatctgtggaagacagatcatctgtagttacttgtctcaaagcatagaactaaaagtcgttcagcattacattggtcaagatggacaagctgtagttcgggaacattttgactgcctcacagccaaacagaaattgccttcgtacatactagaaaacaatgaactgacggagctgtgtgtgaaggccaaaggagatgaagactggtcaagagatgtgtgcctggaatccaaagcccctgagtacagcattgtcattcaggtgccatcttcaaacagttccattatttatgtctggtgcacagttttgactttagaacccaactctcaagtgcaacaacgaatgattgtgttcagccctctttttatcatgaggagtcatcttccagaccccattatcatacatttggagaaaaggagtctgggattgagtgaaacacaaattattccaggaaaagggcaggaaaaaccactgcaaaacatagaacctgaccttgtacatcacctgacattccaagcaagagaagaatatgatccttcagattgtgcagttcccatctcaacatccctcattaagcaaatagccactaaggtacaccctggaggcacagttaatcagatccttgacgaattctatgggccagaaaagtcgcttcaacccatatggccctataataagaaggattctgacaggaatgaacagctaagtcagtgggatagcccaatgcgagtgaagctgtcaatctggaagccatatgttagaactttgttgatagaacttctgccctgggccctgcttatcaatgaatccaaatgggacctctggctatttgaaggagagaaaattgttctacaggttcctgctggcaaaattattattcctcctaattttcaggaagcttttcaaattggaatatactgggcaaatacaaacactgtgcacaagtcagtagcaattaaactggtccataacctgacatctccaaagtggaaagatggaggtaatggtgaagttgtgacactggatgaagaagcgtttgttgatactgaaataagacttggtgcttttccaggacatcagaagttatgtcagttctgcatttcctccatggtacagcaaggtatacaaattattcagattgaagacaagactacaataatcaataatacaccatatcaaatattttataaaccacagctatctgtctgcaatccccattctggaaaggagtattttcgtgttccagacagtgctacttttagcatttgcccaggtggagagcagcctgctatgaaatccagctcccttccttgctgggacttgatgcctgacatcagtcagtcagtactggatgcatccctgcttcagaaacagatcatgctgggcttttctcctgccccaggtgctgacagctcacagtgctggagcctgccagctatagttagaccagagtttcccagacagagtgtggcagtacccctcgggaatttccgggaaaatggattctgtaccagggctatagtgctgacatatcaagaacacctcggagtgacttatttaaccctctcagaagaccctagtcctcgagtaattatccacaatagatgtccagtaaaaatgcttataaaggaaaacattaaagatattccaaagtttgaggtttattgcaaaaaaattccctccgagtgctcaattcatcatgagctgtatcatcagatttccagttatccggactgcaagaccaaagacttacttccaagcctacttttgagagttgaacctctagatgaagtaacaactgagtggagtgatgccattgacatcaacagtcagggaacacaggttgtgttcctgactggctttggctatgtgtatgtggatgttgtacatcagtgtggcacagtcttcatcactgtggccccagaaggaaaagcaggacctattttaaccaataccaacagagcgccagagaagattgttacatttaaatgttcatcactcagttaagcctggcagtgtttgatgacctcacccaccacaaagcatcagctgagcttctgagactcacactggacaacatttttctctgtgtggccccgggagctggtcccctccctggggaagagcctgtggctgcgttgtttgaactttactgtgtggagatctgctgtggggacctgcagctagacaaccagctttataacaagtccaatttccactttgctgtcttagtctgccagggagaaaaagcagaacccattcagtgttccaaaatgcagagtctcctcatatccaacaaagagttggaagaatacaaggaaaaatgttttatcaaactttgcatcaccttaaatgaaggcaagagcatcctctgtgatattaatgagttcagctttgaattaaaacctgctcggttatacgtggaagacacatttgtatactacatcaagactttgtttgacacctaccttcctaacagcaggttggctggtcactccacacacctctccgggggtaaacaggtgttgcccatgcaggtcacacagcacgccagggccttggtgaatcctgtgaagttacggaaactggtgatccagccagtaaatttgctcgtcagcatccacgcttccctcaagctgtacatagcctcagaccacactcctctctccttctcggtgtttgaaagaggacccatcttcaccactgcgaggcagcttgtgcacgccctggcaatgcactatgccgctggggccctttttagagcaggctgggtagttgggtctctggatattcttggcagccctgcaagcctggtgagaagcatcgggaacggggtcgccgacttcttcaggcttccgtatgaggggctgacccggggccctggagccttcgtgagtggcgtctccagagggaccacatcgtttgtaaagcacatctccaaaggtaccctcacatccatcaccaacctcgccacaagcctggcccggaacatggaccggctctcactggatgaggagcactacaaccggcaggaggagtggcggcggcagctccccgagagcctgggcgaggggcttcgacagggcctgtcccggctgggcatcagcctgcttggtgcaattgctggtatagttgatcagccgatgcagaacttccagaaaacatctgaggcacaggcttcagcaggacacaaggccaagggtgtcatctcgggtgtggggaaaggaatcatgggggtgttcacaaagcccatcggaggagctgctgagctggtgtcacagactggctatggtattttacatggagctggactttctcagcttcccaaacagcgccatcagccaagtgatggtacatgctgaccaggctccaaacagccatgtcaaatatgtctggaaaatgcttcagtctctgggcagaccagaagtccacatggccctggacgtggttctggtgaggggctcaggccaggagcatgaagggtgcttgctgctgacatcagaagtgctcttcgtggtgagtgtcagtgaggacacacagcagcaggccttccccgtcacagaaatcgactgtgcacaggacagcaagcagaacaacttactcacagtgcagctcaagcagccaagagtggcctgtgatgtggaggtagatggagtccgagagagactgtcagagcaacagtacaacagactggtggactacatcacaaagacatcttgtcacctggcccccagctgttcttccatgcaaataccatgccctgtggtggctgcagaacctcccccctccactgttaaaacataccattacctggttgatccacattttgctcaggtcttccttagtaaatttaccatggtgaaaaataaagccctgaggaaagggtttccttgagtcccctctgaggtgtttattcctgcttgtgtgatttagtttttgggtttctttgagacagggtctcactgcattgcccttgctgacctcaaattctggggttcaagcaatcctcccacctcaacccacaagtagctacgactgacaagcacctgccaccataaagggctgcattttgccaccataaagggctgcatttttttaaaaagcctaggcagctctaacatcatctgatatggacacaaggccaacagtttccttatttacatccttacctctaaaagatacttcaaagtgacaaaaacgtgttccttccccacttagagacaatgattaacagggccctatatgttcttaccacatacagaggatgcatttatttttgctctatgacacttgcaaaaatctctactgtaattaatttgggtctattaactctctgttccatcatagaatgtggccaggccttacaatggagagccagagttaaaacttcaagttgcatctgtttttgggctgagtcaccacctttgcctcatgctcctttgtctgcaaaggcctaggattctttctttaaatgaaatgcttaggactttttgtggcttgttacatttgtcatttaactgcagtgctattctttgaaagctgctatgtgtattttctctgaagtctgcattttactaaaatttacaacagtctgatgattgattgattactgtccaggtacattttagaaaaagtgttcttcttccagtttgttttactaagcaaactttgagtaaatcctttgtcctatattgaatccagtcccaaagtgttcaggtgagtttctctagttccataaacaaaacatacatagtgggaactccctggtatgccatagagcacacaagaaccccaatattaatgctaacaattataccagtccattttgtttattctgtggaattgacttgacaaagcatgaagatattcccagtgtctgtctgataatattttgcatctaagaatgggtttgactcaagatcttgggttaccaagatgtcttaaatgttcagtaaatatctttcttacagtccagtagcttagagcatgtttgctgattgatattacatttaaacttggggctacagcttgttacctagaattttgagatactaagagaatgcaattttaaatgcccactgggttttatttgttttggagagaggggtctcattctgttcacccggggttagagtacagtgggaacagtcatggctcactgcagcttaagctcactgcctgggctcaagtgatcttactccagcctcccaagcagctgggactacaccaccacaggtatgcaccaccatacctggctgatttttaaaaattttttctagagatgaggtctcactatggttgcccagctggtctcatactcctcagttcacgcaattcctcccactctccacctccccaaactgctggggattacaggtgtgagccaccatgcccaacacccactgatctttaactctccaccatgttgggccataagaagtcactatataattgttactggaaagcaagacttaacgaacaattctgactatgaaaaatgtctctttcagtttgttctgtaaatatttagaaaagtgacagctgtcaacctcagagtaactatttctaaaaatgtaaatatgtattaatccttgtatcttttatggtaattttgcatattgatatgaattatataaaattgtttaaaataaaaggtgtccttgaattactgaccacccatagatgtctactgttaccaggttttacaatgcaaattttcactaatacctgggtttaatacagctcacatcactgaatgttacacatgaatttaaatgggtaatatacaggttttgttataataaagttactgattaaattaaaaaaaaaa

SEQ ID NO: 89924 - DNA, 2718 bp, Homo sapiens
ccgacgatttcgtgatttctgcagcacaaagcactggttctggagctttatgaaagcctcaagcggaagccctgagagctctggctgtgaatgcactttattttggacccagaagatcctggggctcctcaggcctcgacagagggaaaaccgaagcacaggcgactccgcggcggggttgtaatggcggcgcctcctgctcgcccagaccacacccggctgctccagatctgccttctcctgggggttctggtggaaatcagggccgaacagattctctactcggtgtttgaggagcaggaagaaggctcagtggtgggcaacatcgccaaggacctggggttggcgccccgggagctggcggagcgcggagtccgcatcgtctccagaggtaggacgcagcttttcgccctgaacccgcgcagcggcaccttggtcaccgcgggtaggatagacagggaggagctctgcgacagatctccaaactgtgtgacaaacctggagattcttctagaagatacagtgaagattttgcgggtagaggtggaaataatcgatgttaatgataacccacccagttttgggacagaacagagggaaataaaagttgctgaaaatgaaaatcctggggcaagatttcctcttcctgaagcttttgatccggatgtaggtgtaaactccctgcagggttaccagctcaactcaaacggttacttttccctggacgtgcaaagtggggccgatgggattaagtacccagagctggtgctggaacgcgctctagatcgcgaggaagaggcggttcaccacctcgttctcacggccttcgatggaggtgacccggttcgctctggcactgccaggattctcataatacttgtggataccaacgataatgctcccgtgttcactcagcccgagtaccacgtaagtgttcgtgagaacgttcctgtaggcactcggctactcaccgtaaaagccactgatccagatgaaggagccaatggagacgtgacgtattctttccggaaagtaagagacaaaatatcacagctatttcagttgaattctctgagtggggatataacaatattggggggtctagattatgaggactctggattctatgacatagatgtagaagcccatgatgggcctggtctccgagctagaagcaaggtactggtgacagttctggatgaaaatgacaacgcaccagaagtcacagttacatctctcaccagctcagtccaggaatcttcttccccgggtacagtaattgcacttttcaacgtgcatgacagtgactcaggaggaaatggcctagtcacatgttctattccagataatctgccattcacacttgaaaagacctatggaaattattatcggttgttgacacacagaacactggacagggaagaagtctcagaatataacatcgctgtaactgccactgaccagggaactcctccactgtctacagaaactcatatttcactgcaagtgatggacatcaatgacaacccacccactttccctcatgcttcctactctgcttacattcctgaaaacaaccccagaggagcctccatcttatctatgactgctcaagaccctgacagtggtgacaatgcccgaatcacttactccctggccgaagacaccttccagggtgcacctctgtcctcctatgtctccatcaactccaatacagggatcctatatgctctttgctccttcgactatgagcagtttagagacctgcagctgctgatgacagccagtgacagtggagaccctccactcagcagcaatgtgtcactgagcctctttgtgctggaccagaacgacaatgtccctgagatcctgtaccccaccttccctactgatggctccactggtgtggagctggcaccccgctccgcagattccggctacctggtgaccaaagtggtggcagtggacagagactcaggtcagaatgcctggctgtcctacagcctactcaagtccagcgagccgggactatttgcagtggggctgcacacaggcgaggtgcgcaccgcacgggccctgctggacagagacgcgctcaagcagaggcttgtagtggtcgtccaggaccatggccagccccctctctcggccaccgtcacactcactgtgggctgttggccgacagcatcccagatgtcctggcttgacttgggcagcctcaagcctttcagcagacccagacggactttgggcctcacactctatctcgtggtggcagtggccgctgtctcctgcgtcttcctggcttttgtcacggtgctgctagcactcaagctgagacgctggcacaagtcacgcctgcttcacgctgaaggcagcaggttggcaggtgtgcctgcctcgcactttgtgggcgtggacggggttcgggctttcctgcagacctattcccacgaggtctccctcaccgcggactcgcggaagagtcacctgatcttctcccaacccagctatgcagacacgctcatcagccgggagagttgtgagaaaagcgagcctcttctgataactcaggatttacttgaaacaaaaggagaccctaatcttcaggtgagtcaatcttataatagatcataccacactgaaatatagacaaagagttgtgtaaatgtctctcattttatatgtaatatatcaaataaagttgcctcttttaat

SEQ ID NO: 89925 - DNA, 659 bp, Homo sapiens
tttcgtgtttagagggccctggggttgagggtccatacccctaagaaactgtgactccgttccccgagctgcaggcaggtctggggatggcagggctgaggatgcaccttgccttataaatgtctccccactgttccacaactccgtggggtaagcatggcatggaatgtggaggagagtcttagcaggcgcccaatcgggggagtctggggcttagtgttgcctttgttcccagcttactctgtaatcccaacaagactttcctcactgtggggtcctcagtttcctcaattcagaggcaaagaagttggagtagaaatggtttttggggggctgccatctccgaatctgtggtctgattctggggtggaggggcgaagggcagctccagcacggcacctgtcctttgtatgaagagatgaatggccgaccacagactctggatgcccagtgggctcaaggaggaatgttgggcatcagaattgccgcagtgaacaactcctgcttacaggggctcaatctgcataacaaatttaacaccgcagttcatctttcccttgattcaaaaaaaaagcctcactgaaacgtggtgcaaaaaatatcttggaaaattttgcaccaatgaattcaggatgcccaattttccgcaagggaattat

SEQ ID NO: 89926 - DNA, 2297 bp, Homo sapiens; identical to SEQ ID NO: 61226
  misc_feature (1)...(2297): n = a,t,c or g

SEQ ID NO: 89927 - DNA, 3032 bp, Homo sapiens
  misc_feature (1)...(3032): n = a,t,c or g
tttcgtgggtgcgccaaggagaggtaaccccttcgggagcccggggaatcccggccgccaccaggggccgtgccaccgccctcgcgggaccaaagcttccggcgtgtccccaactttgtggcgccctcaggccgcggcgactgggttagagatgccttccagcggcagagcgctgctggactcgccgctggacagcggctccctgacctccctggactctagtgtcttctgcagcgagggtgaaggggagcccttggcgctcggggactgcttcacggtcaacgtgggcggcagccgcttcgtgctctcgcagcaggcgctgtcctgcttcccgcacacgcgccttggcaagctggccgtggtggtggcttcctaccgccgccccggggccctggccgccgtgcccagccctctggagctttgcgacgatgccaaccccgtggacaacgagtacttcttcgaccgcagctcgcaggcgttccgatatgtcctgcactactaccgcaccggccgcctgcatgtcatggagcagctgtgcgcgctctccttcctgcaggagatccagtactggggcatcgatgagctcagcatcgattcctgctgcagggacagatacttcagaaggaaagagctgagtgaaactttagacttcaagaaggacacagaagaccaggaaagtcaacatgagagtgaacaggacttctcccaaggaccttgtcccactgttcgccagaagctctggaatatcctggagaaacctggatcttccacagctgcccgtatctttggcgtcatctccattatcttcgtgggggtgtccatcattaacatggccctgatgtcagctgagttaagctggctggacctgcagctgctggaaatcctggagtatgtgtgcattagctggttcaccggggagtttgtcctccgcttcctgtgtgtgcgggacaggtgtcgcttcctaagaaaggtgccaaacatcatagacctccttgccatcttgcccttctacatcactcttttggtagagagcctaagtggggagccagaccacgcaggagctgggagaacgtgggggcgcattgtccagggtgtttgaggctgctcagggctcttgcgcatgctaaaagcttggggcagacattccacaggattacgctcccttgggatgacaatcacccagtgttacgaagaagtcggcctactgctcctatttctatccgtgggaatctctatattttcaactgtagaatactttgctgagcaaagcattcctgacacaaccttcacaagtgtcccttgtgcatggtggtgggccaccacctctatgactactgtgggatatggggacattagaccagacaccaccacaggcaaaatcgtggccttcatgtgtatattatcgggaattcttgtcttggccttgcctattgctattattaacgatcgcttctctgcttgctacttcaccttgaaactcaaggaagcagctgttagacagcgtgaagccctaaagaagcttaccaagaatatagccactgactcatatatcagtgttaacttgagagatgtctatgcccggagtatcatggagatgctgcgactgaaaggcagagaaagagcaagtactaggagcagcgggggagatgatttctggttttgaattaattttcaatttatttacaaaagctatgtacaattaactaaaatgataaagcagtgatgtggatttctgtattctgatgatgagtctcttcagagtactgctcatcttaattaatttttgctgatatattgcttcatctactagaatatttcacatcacctataacaactgcacagtgttctgacacatttgagtgtccaaaatagccaattaacacaaccaaatacaactgggccaatataaacatgtttgaattgtcaaatataaaataatgttattgcaatacatacaaaaaagttaaagattttatgtatcactaacattagaagttttttgcaccactaattttttaaaaatggaaggtaaactgcatagcccagagaaagataagtaaatatttaagaacatattgaacaactttgctatttaaagatattatccaagtacataaattactccgttctctatcagttaaagctattgaatataatactttagctttacaagagaaaacccatatttgatgggcagagattatatccctatcttctttttcatgtaaaccactggtcacaaatgaactgatctctgtatcccattattactataagaggtgggaatcccaaaactgcttagattgcagtaccatgagcctacacaaagacttcaacaattgcacatccttcattcctccccaactgagtgtagtatgtggagccataaaacagccatatttccttagtatttccatgaatatcagatggtcctttaaatgtctctttatggatgtattgttcacattatggctttaaaataatgaatatgtaaaagtgaggtagtgaacatcctaaatttctacactggaattactaaataatccttatttcataaaatgggaaatatatgttaaatgacatcactggatgaacttgaagatcttttacttgttaacaaaaaaatactatggacagctttctgattgttggggtaaatagcaaatgttcaaactttgcaggcattttgacattcatcataacaacacaattcctagacattgtattatataattaaagccaaaacctctaaagctaagaactagctcatgattcccattattttagtaaatgagattctacaacctaagaataacaaggaatgcatcactttaatacctacatttccaatataatagagcccccaaggggaagaaaattggttcttgaggaaaaaaaaatcttatcacttcatttacaaaacacagataagcatattgagtatatctgtggtattaacatttcatgggggtgagatgttaggnaaaaaagcctagaaggctctttgccaggggtgaatggtgataagaaat

SEQ ID NO: 89928 - DNA, 3902 bp, Homo sapiens
aggcggattgtctgtcgttgcagtagctgtaggaaggggaggccattttccgtttctgggaggagtgaggggcaacgggtcggagaaaaaggaaaaaagaagggctcagcgcctccccgccgggccgtggacagaggggcacagtttcggcaggcgggtgaggtcgctgagggcccgccggagatgttttccttgtcgagcacggtgcaaccccaggttacagttcctctgagtcatctcatcaatgccttccatacaccaaaaaacacttctgtttctctcagtggagtgtcagtttctcaaaaccagcatcgagatgtagttcctgagcatgaggctcccagcagtgagccttcacttaacttaagggaccttggattatctgaattaaaaattggacagattgatcagctggtagaaaatctacttcctggattttgtaaaggcaaaaacatttcttcccattggcatacatcccatgtctctgcacaatccttctttgaaaataaatatggtaacttagatatatttagtacattacgttcctcttgcttgtatcgacatcattcaagagctcttcaaagcatttgttcagatcttcagtactggccagttttcatacagtctcggggttttaaaacttttaaaatcaagggccacgacgtcttccagtctacctttcgagagattagctgaaacacagaatatagcgccatcattcgtgaaggggtttcttttgcgggacagaggatcagatgttgagagtttggacaaactcatgaaaaccaaaaatatacctgaagctcaccaagatgcatttaaaactggttttgcggaaggttttctgaaagctcaagcactcacacaaaaaaccaatgattccctaaggcgaacccgtctgattctcttcgttctgctgctattcggcatttatggacttctaaaaaacccatttttatctgtccgcttccggacaacaacagggcttgattctgcagtagatcctgtccagatgaaaaatgtcacctttgaacatgttaaaggggtggaggaagctaaacaagaattacaggaagttgttgaattcttgaaaaatccacaaaaatttactattcttggaggtaaacttccaaaaggaattcttttagttggacccccagggactggaaagacacttcttgcccgagctgtggcgggagaagctgatgttcctttttattatgcttctggatccgaatttgatgagatgtttgtgggtgtgggagccagccgtatcagaaatctttttagggaagcaaaggcgaatgctccttgtgttatatttattgatgaattagattctgttggtgggaagagaattgaatctccaatgcatccatattcaaggcagaccataaatcaacttcttgctgaaatggatggttttaaacccaatgaaggagttatcataataggagccacaaacttcccagaggcattagataatgccttaatacgtcctggtcgttttgacatgcaagttacagttccaaggccagatgtaaaaggtcgaacagaaattttgaaatggtatctcaataaaataaagtttgatcaatccgttgatccagaaattatagctcgaggtactgttggcttttccggagcagagttggagaatcttgtgaaccaggctgcattaaaagcagctgttgatggaaaagaaatggttaccatgaaggagctggagttttccaaagacaaaattctaatggggcctgaaagaagaagtgtggaaattgataacaaaaacaaaaccatcacagcatatcatgaatctggtcatgccattattgcatattacacaaaagatgcaatgcctatcaacaaagctacaatcatgccacgggggccaacacttggacatgtgtccctgttacctgagaatgacagatggaatgaaactagagcccagctgcttgcacaaatggatgttagtatgggaggaagagtggcagaggagcttatatttggaaccgaccatattacaacaggtgcttccagtgattttgataatgccactaaaatagcaaagcggatggttaccaaatttggaatgagtgaaaagcttggagttatgacctacagtgatacagggaaactaagtccagaaacccaatctgccatcgaacaagaaataagaatccttctaagggactcatatgaacgagcaaaacatatcttgaaaactcatgcaaaggagcataagaatctcgcagaagctttattgacctatgagactttggatgccaaagagattcaaattgttcttgaggggaaaaagttggaagtgagatgataactctcttgatatggatgcttgctggttttattgcaagaatataagtagcattgcagtagtctacttttacaacgctttcccctcattcttgatgtggtgtaattgaagggtgtgaaatgctttgtcaatcatttgtcacatttatccagtttgggttattctcattatgacacctattgcaaattagcatcccatggcaaatatattttgaaaaaataaagaactatcaggattgaaaacagctcttttgaggaatgtcaattagttattaagttgaaagtaattaatgattttatgtttggttactctactagatttgataaaaattgtgcctttagccttctatatacatcagtggaaacttaagatgcagtaattatgttccagattgaccatgaataaaatattttttaatctaaatgtagagaagttgggattaaaagcagtctcggaaacacagagccaggaatatagccttttggcatgggtgccatgggcttcacatctgtaaatcccagcacttttgggaggctgaggcggggtggattgcttgaggcccaggagttccgagaccaagcctggcccaaccgtggtgaaacactggtcccctactaaaataccaaaaaaataagggctggggcgccgttgctcacgccctgtaatcccagcacttttcaaagggccaaggcgggcaaattcacctgaggtcaagagtttgagaccaagcctggccaacatggtgaaaccccatctctactaaacatgcaaaaattacctgggcatggtggcaggtgcttataatcccagctactctgggggccaaggcaggagaattgcttgagcctgggagatggaggttgcagtgagctgagatcatgccactgcactccagcctggggcaacagagcaagactctgcctcaaaaaaaaattaaaataaatttaaatacaaaaaaaaatagccagggtgttggggtgcatgcctgggattcccagctacttgagaggctgaggcacgagaattgcttgaacccaggaggtggaggttgcagtgagccaagatcacaggagccacttgcactccagcctgggtgacagagttgagactctgtctcaaaaaaaaaaattaaataaattattataaccctttcagaaatgctgtgtgcattttcatgttctttttttttagcattactgtccactctccctaatgaaatgtacttcagagaagcagtattttgttaaataaatacataacctcattcctgaataatgtccctcattttgactataactgtgcttggtttcaaaagcaaaattaaacgaaaaatctcagtcccctccgaagtgaactttgtgttaccctgcgtcagaaatgccaagttgtgtttacttttcgattcagattttgtgaatatgaacatgctgttataggatctacagatgaatatttaactcaatagaaaaattattttagaacacattgtattggtattacaaccagattatattcttgacgttgacttcattaaaattatctacgaatttcctaataaaaaaaa

SEQ ID NO: 89929 - DNA, 468 bp, Homo sapiens
ggccgctggtcaccgccgccaccccctcccgccctgttctctttcaggtcgggccgggcccggccgcttccgcgagcgccctgcagactgagggagagagagagaaagaggaggggaggaggaggaggattcagggaataggagctggggagcccttctgcgccacaggtaaaataaaataatgatgatgatcgtaaaaaagcccaagccctctgaacgcctccgccttcctccagtgcagccccacatgcagtcgttccccgcccgggcctcccactcagcctcaggacaggtttcgccccccttcgcgccgctgctgcagccgcagccgccgccgccttctcacgggagggcctgagggtgccgccgccacggcggacgggttgccgcaccgccccccgtttgtgcgcctcggagtcggcgtcgggggtggatggcgggaggggtggacccttcagctccctggcg

SEQ ID NO: 89930 - DNA, 1503 bp, Homo sapiens
aaagaacccggccaggtgcagggtttcatgcctataatcccagcactttgggaggcctagacgggaggattgcttgagctcagaagtttgagatcagcctcaacaagatgatgagaccccttctctacaaaagaaattataaaaaattagtcaggtgtggtagtacacacctatagccccagctactcaggaggctgaagcgggaggatcacttgaggccaggagtttgaggccatagtgagcaaggatcatgccactgccctccagcctgggcaacaacgagaccctgtctctaaaaaataaataaaaactagttcctcgcccgctgggtgcttaagttgggcggatggcagcaaaccggctccgctagaggaccgagccgcccagccccgctcccccggacccatcggcgcgctgcccacacctccaggcgaccggccaactgggtcctgaagtagctgaaatgcgaaaaaggcagcagtcccaaaatgaaggaacacctgccgtgtctcaagctcctggaaaccagaggcccaacaacacctgttgcttttgttggtgctgttgttgcagctgctcctgcctcactgtgaggaatgaagaaagaggggaaaatgcggggaagacccacacacactacaaaaatggagagtatccaggtcctagaggaatgccaaaaccccactgcagaggaagtcttgtcctggtctcaaaattttgacaagatgatgaaggccccagcaggaagaaaccttttcagagagttcctccgaacagaatacagtgaagagaacctacttttctggcttgcttgtgaagacttaaagaaggagcagaacaaaaaagtaattgaagaaaaggctaggatgatatatgaagattacatttctatactatcaccaaaagagtggttatctcataatacacttatcaagtccttattaccacgaacctcacccaccgtggacaagagaaacataagcaggaaaaaaggaggaggaataaacacacgcctgtccataataaaactcgctcttgaagactcagcggcagccctgcaccggagactgacgacttgcgcggctgtgacctccgccctgcagcggaccctcgactgccctgcactgcggctctggaggccccgactcagtgcatgggaaagaaatcctcactatcagaaaacagaggggcaatctgctgctctccctttccggccaaacacgtcacccatcaaccggatacctaccaagaggctttcagaggaggcgcccaaggtctcccaggcccgcccctccccaatcacgctccgctcagccccctcaacttttggcctccgggaagttcgcagcgttctcacgcttggcaggaagttcccgccaaggcttccggaaaatcctttaaaaagcaacgcttgcgctgggcggggcttggtgcgctctcacccttatctccaaattctgggtgttgtcgcgagggctgctgtgtccggaacttccggttccg

SEQ ID NO: 89931 - DNA, 3275 bp, Homo sapiens
ccggggcgcgaccatctgcgctgcggcgccggcgactcagcgctgcctcagtctgcggtgggcagcggaggagtcgtgtcgtgcctgagagcgcagctgtgctcctgggcaccgcgcagtccgcccccgcggctcctggccagaccacccctagtcccccctgccccaagtcgcagccatgaactacctgcggcgccgcctgtcggacagcaactttatggccaatctgccaaatgggtacatgacagacctgcagcgtccgcagccgcccccaccgccgcccggtgcccacagccccggagccacgcccggtcccgggaccgccactgccgagaggtcctccggggtcgccccagcggcctctccggccgcccctagccccgggtcctcggggggcggtggcttcttctcgtcgctgtccaacgcggtcaagcagaccacggcggcggcagctgccaccttcagcgagcaggtgggcggcggctctgggggcgcaggccgcgggggagccgcctccagggtgctgctggtcatcgacgagccgcacaccgactgggcaaaatacttcaaagggaaaaagatccatggagaaattgacattaaagtagaacaggccgaattctctgatctcaaccttgtggcccatgccaatggtggattctctgtggatatggaagttcttcggaacggggtgaaggtcgtgcggtctctgaagccggattttgtgctgatccgccagcacgccttcagcatggcacgcaacggagactaccgcagtttggtcattgggctgcagtatgctggaatccccagtgttaactccttgcattctgtctacaacttctgtgacaagccctgggtgtttgcccagatggttcgactgcataagaaactggggacagaagaattccctctaattgatcagaccttctaccccaatcacaaagaaatgctcagcagttacaacgtaccccgtggttgtgaagatggggcacggaacactctggggatggggcaaggtcaaggttgacaaccagcatgacttccaggacatcgcaagtgtcgtggcactgaccaagacgtatgccactgccgagcccttcatcgatgccaaatatgacgtgcgtgtccagaagattgggcagaactacaaggcctacatgaggacgtcagtgtcagggaactggaagaccaatactggctctgcgatgctggagcaaattgccatgtctgacagatacaagctgtgggtggacacgtgctcagagatttttgggggactggacatctgcgcagtggaagcgctacatggcaaggacggaagggatcacatcattgaggtggtgggttcctccatgccgctcattggtgaccaccaggatgaagacaaacagctcatcgtagagctcgtggtcaacaagatggctcaggccctgccccggcagcgacagcgggatgcctcccctggcaggggctcccatggccagactccgtccccaggggccctgcccttgggccgccagacctcccagcagcccgcagggcccccggctcagcagcgacccccaccacagggcggccctccacagccgggtccaggcccccagcgccagggacccccattgcagcagcgcccgcccccgcagggccagcagcacctttcaggccttggacccccagctggcagccccctgccccagcgccttccaagtcccacctcagcgccccagcagcccgcgtcccaggccgcgccgccgacccagggtcaaggccgccaatcccggccagtggcgggaggccccggggcgcctccagcagcccgcccgcccgcctctccgtctccccagcgccaggcgggccccccacaggctacccgtcagacatccgtctctggcccggctccgccaaaggcctctggggccccaccgggcgggcagcagcgccagggcccgccccagaaacccccaggcccagccggccccacacgccaggccagccaggcgggtcccgtgccccgcactgggccacccaccacgcagcagcctcggcccagcggcccgggccccgctggacgtcccaaaccacagctggcccagaaacccagccaggacgtgccgccacccgccaccgccgctgcagggggacctccgcacccccagctcaacaaatcccagtctctgaccaatgccttcaaccttccagagccagccccgcccaggcccagccttagccaggacgaggtgaaagctgagaccatccgcagcctgaggaagtctttcgccagcctcttctccgactgataccccactctgagaaccccaaaatccctgggcaacccttctctgggccctgaatccatttctcacttttggagtctccaaatcccttgagaacccatctcccggttctccaagattccacctctcattcctcaagatccccgagtaccttgagaaacctgactcctcctggccctaaatccggttctcacatgtggaatccccaagtccttttagaaccccactcgtgggtcacttcaggatctacttctgttttagaacctccacattcctgaagacctccgcccctggtttccccagagggcgttttccttcctgggaagtgcccaaataccaggcaacccattgcagaatcccttcctggagccctgaagttcctgggaaaaccctatttttggtcccaaatctctccagcacacctatttcccatcataattttccaaatcctcaagaaacccctactgttgagccccttcccatggatcttccatccctctgaagatccacatcttcaaatgccacccaacacctagccccacaaggatttcccttcaccagctcccctcaacctcattcaataccttgggagcccctcccacttccaggacccctcggttcccccagggaccccctccccagtttcctgcctctgacagctgtctttaaatatgcaaactccacccatcttcccagaatcctttgcacacggaaggccagtggtctccgcttccccacctttgctgtggtgtctgtgtctgtgactgacgtggcctccttttgtgccgtgcttggcatatgtggtcctcgttcatcgtgccgcctgtggtgatgcgtgcagtgacgctgtttatgtggtccgcacctccccctgaccttcactccttgcctggactcaccccacccctcagcggctctgaaccccaagagaagagtcgggaaacaaaataaacaagcaaaggcccagcaaaaaaaaaa

SEQ ID NO: 89932 - DNA, 7753 bp, Homo sapiens
  misc_feature (1)...(7753): n = a,t,c or g
cccggaattcccgggccgacgatttcgtgcgagcggcagcagctccgggctcgagagcccgcgcccatgccagtgcccatgcggggccgccgccagtgacgccggagaggtgttccccccacactggggctcccactactgcgaggagtgacccacgaaggccacagagatggccggggcttcggtgaaggtggcggtgcgggtccgccccttcaattcccgggaaatgagccgtgactccaagtgcatcattcagatgtctggaagcaccaccaccattgttaaccccaaacagcccaaggagacgcccaaaagcttcagctttgactactcctactggtcgcacacctcacctgaggacatcaactacgcgtcgcagaagcaggtgtaccgggacatcggcgaggagatgctgcagcatgcctttgagggatacaacgtgtgcatcttcgcctatgggcagacgggtgccggcaagtcctacaccatgatgggcaagcaggagaaggaccagcagggcatcatcccacagctctgcgaggacctcttctctcggatcaacgacacgaccaacgacaacatgtcctactccgtggaggtcagctacatggagatttactgtgagcgcgtccgtgacctcctgaaccccaagaacaagggcaaccttcgcgtgagggagcacccactgctggggccctacgtggaggacctctccaagctggctgtcacctcctacaatgacatccaggacctcatggactcagggaacaaggccaggaccgtggcggccaccaacatgaatgagaccagcagtcgctcccacgccgtcttcaacatcatcttcacccagaagcgccatgacgcagagaccaatatcaccacggagaaggtgagcaaaatcagcctggtggacctggctgggagcgagcgggctgactccacgggagccaagggcacgcgcctcaaggagggagccaacatcaacaagtcgctgaccaccctgggcaaggtcatctccgccctggctgaaatggactccggacccaacaagaacaagaaaaagaagaagacagatttcattccgtaccgagattccgtgttgacctggctcctccgggaaaacctgggcggtaactcaaggacagctatggtggcagccttgagtcctgcagacatcaactacgatgagacccttagcacgctgaggtatgctgaccgggccaagcagatccgctgcaatgctgtcatcaatgaggaccccaacaacaagctgatccgcgagctgaaggatgaggtgacccggctgcgggaccttctgtacgcccagggtcttggcgacatcactgacatgaccaatgccctggtgggtatgagcccctcatcctcgctctcagccctgtccagccgcgcggcctccgtgtccagcctccacgagcgcatcttgtttgccccgggcagcgaggaggccattgaaagactgaaggaaacagagaagatcatagctgagctcaatgagacctgggaggagaagctgcggcggacagaagccatccggatggagagggaagccctgctggccgagatgggtgtggccatgagggaggatggcggcaccttgggcgtattctctcccaaaaagacaccacacctcgtcaacctgaacgaggacccgctgatgtctgagtgcctgctctactacatcaaggatgggatcaccagagtgggcagggaggatggcgagaggcggcaggacattgttctgagtgggcacttcatcaaggaggagcactgcgtcttccggagcgactccaggggaggcagcgaagctgtggtgaccttggagccctgtgagggggcagacacctacgtcaatggcaagaaagtcacagagcccagcatcctgcgttcaggaaaccgcatcatcatgggtaagagccatgtgttccggttcaaccaccccgagcaggcccggcaggagcgtgagcgcacgccttgtgcggagacgccagctgagcctgtggactgggccttcgcccagcgtgagctgctggagaagcagggcatcgacatgaagcaggagatggagcagaggctccaggaactggaggaccagtaccgccgcgagcgggaggaggccacctacctgctggagcagcagcggctggactatgagagcaagctggaggctctgcagaagcagatggactccaggtactacccggaggtgaacgaggaggaggaggagcccgaggatgaagtccagtggacagagcgggagtgtgagctggcgctctgggccttccggaagtggaagtggtaccagttcacgtctctgcgggacctgctgtggggcaacgccatcttcctcaaggaggccaatgccatcagcgtggagctgaaaaagaaggtacaattccagtttgtcctcctgacggacacactctactcccctctgccacccgacctgctgcccccagaggccgccaaagaccgagagacgcggcccttcccccgcaccattgtggccgtggaggtccaggaccagaagaacggggccacccactactggacgctggagaagctcaggcagcgtctggacctgatgcgggagatgtacgaccgcgctgcagaggtgccctccagtgtcatcgaggactgtgacaacgtggtgaccggcggagaccccttctatgaccgcttcccctggttccggctggtgggcagggccttcgtgtacctgagcaacctgctgtaccccgttcccctggtacaccgtgtggcaatcgtcagcgagaagggcgaggtgaagggcttcctccgcgtggccgtccaggccatctcagccgatgaagaggcccctgattatggctctggcgtccgccagtcgggaactgctaaaatctcctttgatgaccagcattttgaaaagttccagtccgagtcttgccccgtggtggggatgtcccgctcgggaacctcccaggaagagcttcgcatcgtggagggccagggccagggtgcagacgtggggccctcagccgatgaagtcaacaacaacacctgttcagcagcagtgcccccagaaggcctcctcctagacagctctgagaaagccgccctggatgggcccctggatgctgccctggaccacctccgcctgggcaacaccttcaccttccgtgtgacagtcctgcaggcgtccagcatctctgccgaatatgccgacatcttctgccagttcaacttcatccaccgccacgacgaggccttctccacagagcccctgaagaacacaggcagaggccccccacttggcttctaccacgtccagaacatcgcagtggaggtgaccaagtccttcattgagtacatcaagagccagcccattgttttcgaggtctttggccactaccagcagcacccgttcccgcccctctgcaaggacgtgctcagccccctgaggccctcgcgccgccacttccctcgggtcatgccactgtccaagccagtgcccgccaccaagctcagcacactgacgcggccctgtccgggaccctgccactgcaagtacgacctgctggtctacttcgagatctgtgagctggaggccaacggcgattacatcccggccgtggtggaccaccgtgggggcatgccatgcatggggaccttcctcctccaccagggcatccagcgacggattacggtgacactactgcatgagacaggcagccatatccgctggaaggaagtgcgcgagctggtcgtgggccgcatccgaaacactccagagaccgacgagtccctgatcgaccccaacatcttgtctctcaacatcctctcttccggatacatccacccagcccaagatgaccggaccttttaccaatttgaggctgcgtgggacagctccatgcacaactctctcctgctgaaccgggtcaccccttatcgagagaaaatctacatgacactctccgcttatatcgagatggagaactgcacccagccggctgttgtcaccaaggacttctgcatggtcttctattcccgtgatgccaagctgccagcctcgcgctccatccgcaacctctttggcagtgggagccttcgggcctcagagagtaaccgtgtgactggtgtgtacgagctcagcctgtgccacgtggctgacgcgggcagcccagggatgcagcgccggcgccgacgagtcctggacacatctgtggcctatgtccggggcgaggagaacctggcaggctggaggccccggagtgacagtctcattctggaccaccagtgggagctggagaagctgagcctcctgcaggaggtggagaagactaggcactacctgctcctgcgggagaagctggagaccgcccagcggcctgtcccggaggcactgtccccggccttcagcgaggactctgagtcccatggctcctccagcgcctcctccccgctctcggctgagggccgcccattcaccctgggaggcttcccaacgagaggcagcgggagctggccgtcaagtgcttgcgcctgctcacgcacacattcaacagagagtacacacacagccacgtctgcgtcagtgccagcgagagcaagctctccgagatgtctgtcaccctgctccgggacccgtcgatgtcccctctaggggtggccactctcaccccctcctccacttgcccctctctggttgaagggcggtacggtgccactgacctgaggaccccgcagccctgctcccggccagccagcccagagcccgagctgctgccagaggccgactccaagaagctcccttcccctgcccgggcaacagagacagacaaggagccccagcgcctgctggttccctgacatccaggagatccgagtcagcccgatcgtttccaagaaggggtacctgcacttcctggagccgcacacgtcaggctgggccaggcgcttcgtggtggtgcggcgcccctatgcctacatgtacaacagcgacaaggacaccgtggagcggttcgtgctcaacctggccactgcccaggtggagtacagtgaggaccagcaggctatgctcaagacacccaacacattcgcggtgtgcacggaacaccgcggcatcctgctgcaggccgccagcgacaaggacatgcatgactggctgtacgccttcaaccccctcctggccgggaccatacggtccaagctctccagaaggaggtctgcccagatgcgggtctgaacctgagccctcccgtgacagccgggcaggccccagcccatcccctccctcatcctcgtctgacctgtcaacctgccgcccagcccctctcctgccatacagcccacgactgggtcgaaccccccagggggcgcccatgcccaggcccggggaccctgtgcccacacgaaccagctgtgctccccancagaggctgtgcgtgtcagttcttcttgcagaatgtgctctggtggaacaagttgggagaggctgggggggccaagggcacaggttacgggggttcttgctgccgttctaatatttttttaagcatagacagacttataattaatatacgttagttagtgacattgaaacagtcaactcggaaattaactataagacttggtctatttataagtatttatttctaatgcctccacatagccctgtaatattcagatggaacccccaaccacctccaccctgtttgttcccacatgtgtctcccaagcctgctagggacaggcagggcagggacagccaccttggaaggccgcagtgaggagctgtctggaccagtggggcaccttggggctagcacacgggtgtatcgcctgggccccaggcttctccatggccacatgggtcctgggtgtatgtgtgggagagtgggggggtgtctttggtgcctgaagtctgcgcggcatggagggtggtgtgagttcctctggtgggagggagaacgcacatctcttctgggcggccacctgaggagtgactccaagaagagttccggcagctttccccaggaaagggtgaggggtgacactcggctctggctctgagatgaggcagacggcacccaggctgtgatctgtcctgggcggggaccaggagggagcggggtcgggatcacctgccagtgtgcagactctgggactgcgtgctgtctccggaccatcagggtagggtggtgggttgagaccaggaagtcagggaagatcggaattcagggcgacggtctaggtgtcgagggctgtggccgcagcctcttcagctgcggcgagaaatggagtgagtcaaggtagcttctgggaagaaatgctgccattagcaggtttcttgcaaagactttcctctctttgttcccagggcagagagtttctgtgagtcccactgagaaaatcccatggggtgggggtatcctggtcggtcggcaatggagggtggctggcttggtggttattgtcttcaaggagctcttcgctgctgcatctgcggtgtccctttgttcttgtcccatttcaccccctctgcagacaccaatgtccgagggccacccaggacaggacgggggtcagccccaagctgagagtctggtcataggagtcatgtccagaggcctagggaggttttaggggccctccccacccacacccacaggtcgatttggtctcttttttaagttcaaagggaaagacagtagccaagcaacagagcccctctcccgccgtggcccgtgggagcagttacatcgggtctggtgctccagacctagggcccagcactttcatcagatcctgcctcctggagtgggggaaacgcagcaccccactggttctgaggcccctaccctcccaggctgtcccacgtgatgctgacatgagcctcagagaccccaatcccatgcctgggggagagacagcggctcaggagtgggggagcacgggccttctacaccacatgggaaggctctggcatgaggttttcctttgggaaggttgtttgggcccctgaagttccatctccgagagtggtgtgcagggcaggccagggcccatgctggctgcagtctctgtggctgcctgcctgggccagcctgtttgggagctgggactgtgggctcgccttttcgtacctgggctcaggtgcggtgtggccaccgccaccctcatcccctgcctgggaggctctcccaggggctgatgggggggttctgtgagggagaatcagggctcgggaagccacgcctgggaaggcaggacacaggacacagcagctttctttggaaatctcccaggtgaggattcacatcccaaaataaaattcagaagccaggtggcctgtgctccccatgggtgacctctggaggcagtggaccaagatgcagcaaggagaggatgcagaacagcttcttgcagaagcacctgctccggcatccagcgctgcctggaggcaggaaggagaggcagggcaggacacgctggtctgagatgagggggagccccacgggccccaggcaggctagaggaggcacaggccctgccacggccaactcaggtcagccagcctgaggctgtggcctccaaagggtctgggcgcaccccccaggtcgcaggtgtctgaggccagccaacctgcagagcactcgcggcgtgggtgggctgagtggaggtgcctgggagctgcctaaattcagaagcctccactaccatggagactgcctggctgtgtcctctcaca

SEQ ID NO: 89933 - DNA, 2176 bp, Homo sapiens
ccggggggcgccatcttgcttcctttatggcggcgaacgaggcccagagaggccaccgtcccgcgcggggcagcacagcgcgggagagctcggagcgcagagggccgcatccccagttcccagtctccatccccggcagaagcaggcggagcgacccggtccccgcccccgcgcccgccccgccccgcgcgcccgcctggcccctcggccccgcccctgctccggagtgacgcgggcccgggcgcgacggtctcggcggcggcggcggcggcgacagagcgagcgcggcgcggggccaccatgggggcccagctcagcacgttgggccatatggtgctcttcccagtctggttcctgtacagtctgctcatgaagctgttccagcgctccacgccagccatcaccctcgagagcccggacatcaagtacccgctgcggctcatcgaccgggagatcatcagccatgacacccggcgcttccgctttgccctgccgtcaccccagcacatcctgggcctccctgtcggccagcacatctacctctcggctcgaattgatggaaacctggtcgtccggccctatacacccatctccagcgatgatgacaagggcttcgtggacctggtcatcaaggtttacttcaaggacacccatcccaagtttcccgctggagggaagatgtctcagtacctggagagcatgcagattggagacaccattgagttccggggccccagtgggctgctggtctaccagggcaaagggaagttcgccatccgacctgacaaaaagtccaaccctatcatcaggacagtgaagtctgtgggcatgatcgcgggagggacaggcatcaccccgatgctgcaggtgatccgcgccatcatgaaggaccctgatgaccacactgtgtgccacctgctctttgccaaccagaccgagaaggacatcctgctgcgacctgagctggaggaactcaggaacaaacattctgcacgcttcaagctctggtacacgctggacagagcccctgaagcctgggactacggccagggcttcgtgaatgaggagatgatccgggaccaccttccacccccagagggaggagccgctggtgctgatgtgtggccccccacccatgatccagtacgcctgccttcccaacctgggaccacgtgggccaccccacggagcgctgcttcgtcttctgagggccgggcacggtcacacggccacccgccccgcgcaccccacgccctgttcacgctcacccagtcacctccccacatcgcacactggggccccgggttcagcctggcctgcccgtgccctggtgaatcacctggctgagcagttcccctggagccccttcgggagcagggctgtgtcccagatgggccacggctgagccttcagagtacgtcctgcctggcacttactggtccttaccagagacgcccagccccatccctgtcctcatgacccctcgtccaccccacacacacactataaggctgagggctgccagcagccccgtctgcccaccattcccggccgtggaccatagtcgggatgtcagcagacacacatgggcagcccaaagctgcaggtgccagggcccaccccagcctcgcctgtcacccccactcccgcctcagggccaggcccaggcctcaccacctgacgctgcatgagacattgacaccagaaagccctcttgggggcactgctccctaccccagggccctggccagccgggagcttggctctcctctggctagagtgggaagagggggctggccatggggccctcccagaacctcagcatttccttccagcccatccaaacactgaggcagccttggggaaccccgagctggggggttggcagcccactgcaccgcctcagggttttggggtcctgggctggggccaccatccctgatggcagaactcccacaaccacatgtatttattcctctgtcctaaaccgtcccctccttccctcacccccagcacagggggattctgagcagtgcctcttgtctgagggacatatcagtgacctcgacgttgcctttagactacagttgtgttagcctcttgcgtattggctttttcagagtcatttatgagcagaaaaaaaaaaagtaaaactttgctaatattaaaaaaaaaa

SEQ ID NO: 89934 - DNA, 400 bp, Homo sapiens
  misc_feature (1)...(400): n = a,t,c or g
tttcgtgtcggggctgnancccgagggcaccccctccgtcagtgggggtggggcttggagagggacacggaaggggggatgagacggggagagccacccccagtgtctcctgggtctggggatccccgtgagacccccgggggaccaccctgcgcgagggaggtggtggtggcggtgggcggaggcggtgggaggacaccgaggacggtcggtgaggtgagcgtttctgggggtggtgcagaggctcgatggtggacggtgtgccagccggtgccacactgcacctctctgccctcatcttttcgaatcgggggccctaacccctctctttcacggggtgctgccgggtcaaggcattcatcctctatctgaaggagaggacttgggtgaggagctgctg

SEQ ID NO: 89935 - DNA, 4837 bp, Homo sapiens; identical to SEQ ID NO: 89831
  misc_feature (1)...(4837): n = a,t,c or g

SEQ ID NO: 89936 - DNA, 2537 bp, Homo sapiens; identical to SEQ ID NO: 61074

SEQ ID NO: 89937 - DNA, 3293 bp, Homo sapiens
  misc_feature (1)...(3293): n = a,t,c or g
tttcgtgaagaggaggtgtgcggggtggctgcctggtgacgaggacgggcgcagcagcccacaaggtgataaaaggagtggcggctgccctggcagaatggctggacggcaaggggagcccggcccccgggacctggggagtgcatcatgatgatcaggctgccacacaagaagctgcagagactgttcctcanaaaggaagaaggcgtcgtgaaggagatagacatcagccatcatgtgaaggagggctttgagaaggcagatccttcccagtttgagctgctgaaggttttaggacaaggatcctatggaaaggtgttcctggtgaggaaggtgaaggggtccgacgctgggcagctctacgccatgaaggtccttaagaaagccaccctaaaagttcgggaccgagtgagatcgaagatggagagagacatcttggcagaagtgaatcaccccttcattgtgaagcttcattatgcctttcagacggaaggaaagctctacctgatcctggacttcctgcggggaggggacctcttcacccggctctccaaagaggtcatgttcacggaggaggatgtcaagttctacctggctgagctggccttggctttagaccatctccacagcctggggatcatctacagagatctgaagcctgagaacatcctcctggatgaagaggggcacattaagatcacagatttcggcctgagtaaggaggccattgaccacgacaagagagcgtactccttctgcgggacgatcgagtacatggcgcccgaggtggggaaccggcgaggacacacgcagagtgccgactggtggtccttcggcgtgctcatgtttgagatgctcacggggtccctgccgttccaggggaaggacaggaaggagaccatggctctcatcctcaaggccaagctggggatgccgcagttcctcagtggggaggcacagagtttgctgcgagctctcttcaaacggaacccctgcaaccggctgggtggtgctggcattgacggagtggaggaaattaagcgccatcccttctttgtgaccatagactggaacacgctgtaccggaaggagatcaagccaccgttcaaaccagcagtgggcaggcctgaggacaccttccactttgaccccgagttcacagcgcggacgcccacagactctcctggcgtccccccgagtgcaaacgctcatcacctgtttagaggattcagctttgtggcctcaagcctgatccaggagccctcacagcaagatctgcacaaagtcccagttcacccaatcgtgcagcagttacacgggaacaacatccacttcaccgatggctacgagatcaaggaggacatcggggtgggctcctactcagtgtgcaagcgatgtgtgcataaagccacagacaccgagtatgccgtgaagatcattgataagagcaagagagacccctcggaagagattgagatcctcctgcggtacggccagcacccgaacatcatcaccctcaaggatgtctatgatgatggcaagtttgtgtacctggtaatggagctgatgcgtggtggggagctcctggaccgcatcctccggcagagatacttctcggagcgcgaagccagtgacgtcctgtgcaccatcaccaagaccatggactacctccattcccagggggttgttcatcgagacctgaagccgagtaacatcctgtacagggatgagtcggggagcccagaatccatccgagtctgcgacttcggctttgccaagcagctgcgcgcggggaacgggctgctcatgacaccctgctacacggccaatttcgtggccccggaggtcctgaagcgtcaaggctatgatgcggcgtgtgacatctggagtttggggatcctgttgtacaccatgctggcaggatttatcccttttgcagatgggccagacgatacccctgaggagattctggcgcggatcggcagtgggaagtatgccctttctgggggaaactgggactcgatatctgacgcagctaaagacgtcgtgtccaagatgctccacgtggaccctcatcagcgcctgacggcgatgcaagtgctcaaacacccgtgggtggtcaacagagagtacctgtccccaaaccagctcagccgacaggacgtgcacctggtgaaggtaccggcaggcgacaggcgcgatggccgccacctactttgctctaaacagaacacctcaggccccgcggctggagcccgtgctgtcatccaacctggctcagcgcagaggcatgaagagactcacgtccacgcggctgtagcgggtgggaccctggccccagcgtcccctgccagcatcctcgtgggctcacagaccccggcctcggagcccgtctggcacccagagtgaccacaagtccagcagggaggcggcgcccgccctcgccgtgtccgtgttttctttttcagccccggagagggtcctgacctgggggcttctccaagcctcactgcgccagcctccccgcccgctctcttttctcccaagcaaaaccaaatgcgccccttcacctcgcgtgcccgtgcgaggccgggggcttctttcagagcccgcgggtcctctcatacatggcttctgtttctgccgagagatctgttttccaattatgaagccggtcggtttggtcagactcccgacacccacgtcccaggtacccggtgggaaagtggcagtgcgagggcgcagccattggtggttgcagggccccagagggctggggtgacctggcatcccggggctccccacgggctggatgacggggttggcactgtggcgtccaggaggagatgcctggttctgcccaaaataatccaaagagccgtttcctcctcgcccttcagtttttgcctgaggtgctgggtagcccatcctttcctctgtcccagattcaaatgaggagtaagagcccagacgagaggaaggcaggctggatctttgccttgagagctccgtgtcaccaggatggaagggggtgcctctcggaggagcctgtgtccacctccagtctcggctttccccggggggccaagcgcactgggctgccgtctgtccccagctcccgtggccacacagctatctggaggctttgcagggagtcgtgggttctcgcacctgctcagccctgtgtcggcttctgtgtgctcacctaaagctgtggttttgctgtgttcacttcgatttttctggtctgtggagaaactgtgaattggagaaatggagctctgtggctttcc

SEQ ID NO: 89938 - DNA, 2379 bp, Homo sapiens
  misc_feature (1)...(2379): n = a,t,c or g
tttcgtgcgccatgtgagggggctcgggggccgcggggggccgggcgctccccgccggnnnnnnnnnnnnnnnnnnnnnnnnnnnncacatggcttgctcgaggccccccagccagtgtgaacccacatccctgcccccagggccacctgcaggacgccgacacctacccctcagcagacgccggagagaaatgagtagcaacaaagagcagcggtcagcagtgttcgtgatcctctttgccctcatcaccatcctcatcctctacagctccaacagtgccaatgaggtcttccattacggctccctgcggggccgtagccgccgacctgtcaacctcaagaagtggagcatcactgacggctatgtccccattctcggcaacaagacactgccctctcggtgccaccagtgtgtgattgtcagcagctccagccacctgctgggcaccaagctgggccctgagatcgagcgggctgagtgtacaatccgcatgaatgatgcacccaccactggctactcagctgatgtgggcaacaagaccacctaccgcgtcgtggcccattccagtgtgttccgcgtgctgaggaggccccaggagtttgtcaaccggacccctgaaaccgtgttcatcttctgggggcccccgagcaagatgcagaagccccagggcagcctcgtgcgtgtgatccagcgagcgggcctggtgttccccaacatggaagcatatgccgtctctcccggccgcatgcggcaatttgacgacctcttccggggtgagacgggcaaggacagggagaagtctcattcgtggttgagcacaggctggtttaccatggtgatcgcggtggagttgtgtgaccacgtgcatgtctatggcatggtcccccccaactactgcagccagcggccccgcctccagcgcatgccctaccactactacgagcccaaggggccggacgaatgtgtcacctacatccagaatgagcacagtcgcaagggcaaccaccaccgcttcatcaccgagaaaagggtcttctcatcgtgggcccagctgtatggcatcaccttctcccacccctcctggacctaggccacccagcctgtgggacctcaggagggtcagaggagaagcagcctccgcccagccgctaggccagggaccatcttctggccaatcaaggcttgctggagtgtctcccagccaatcagggccttgaggaggatgtatcctccagccaatcagggcctggggaatctgttggcgaatcagggatttgggagtctatgtggttaatcaggggtgtctttcttgtgcagtcagggtctgcgcacagtcaatcagggtagagggggtatttctgagtcaatctgaggctaaggacatgtcctttcccatgaggccttggttcagagccccaggaatggaccccccaatcactccccactctgctgggataatggggtcctgtcccaaggagctgggaacttggtgttgccccctcaatttccagcaccagaaagagagattgtgtgggggtagaagctgtctggaggcccggccagagaatttgtggggttgtggaggttgtgggggcggtggggaggtcccagaggtgggaggctggcatccaggtcttggctctgccctgagaccttggacaaacccttccccctctctgggcacccttctgcccacaccagtttccagtgcggagtctgagaccctttccacctcccctacaagtgccctcgggtctgtcctccccgtctggaccctcccagccactatcccttgctggaaggctcagctctttggggggtctggggtgacctccccacctcctggaaaactttagggtatttttgcgcaaactccttcagggttgggggactctgaaggaaacgggacaaaaccttaagctgttttcttagcccctcagccagctgccattagcttggctcttaaagggccaggcctccttttctgccctctagcagggaggttttccaactgttggaggcgcctttggggctgcccctttgtctggagtcactgggggcttccgagggtctccctcgaccctctgtcgtcctgggatggctgtcgggagctgtatcacctgggttctgtcccctggctctgtatcaggcactttattaaagctgggcctcagtggggtgtgtttgtctcctgctcttctggagcctggaaggaaagggcttcaggaggaggctgtgaggctggagggaccagatggaggaggccagcagctagccattgcacactggggtgatgggtgggggcggtgactgccccagacttggttttgtaatgatttgtacaggaataaacacacctacgctccgaaaaaaaaaaa

SEQ ID NO: 89939 - DNA, 4454 bp, Homo sapiens
ttttttttttttagcacaaagcattttaggtttatttaaataaaaattataatttatacaatactttttctttaaacaaacaaagttttcttaaaaaaatgttacaggagaatttttttcatcggttcttaatacagtacaatccttttgttgaacaaaagtcacactggcaatgattatttacagatccaaaatagactcaggcttcagacataaaaaatttaacattcgtctagttcagtgattagtcacagaaattaaacatctgcccagatgtacacaatttggtaaaaactacagcttctctccacggggagcccagagcccgtgccgatccgcgctccgctcccgaggacttccagggaggggcctgtgctggcagcagagccagtcggtggccctcccccgaccccccgctccccgaatgtggccctccctgggggcttcggccacacctggcacgtggtcagttttcatctccctttctccacaaaagggactcgaactaaaccacccgacgctggtaaagccccatctgccccagggacccctcccgctgtgtttggggactgaatcccagcacctaggaagaggcgctcattggccccgaggccccggacccatccttgggcactgccgggccctggggagagaggtgtggccattgtctgcgggcactgcctctgcagccgcccctgggggtgggtcagtgcccaccctgtgttgcctcaggcgccaaggtggggttcactgggatatgtccccctcccctggtgcaccaagagagccagtcccctacaggagccagacccacggctcagagcgggttctgtccccattcgggaaaggccgccgtgtggtcatcctgacgccaacgtccgcgcagtccagagccacgggggctccgctccaccgcctgggataggacatgtgctgaatctggtgatcggcgcagctccccccaaagcacccccggcaccagcgtgtgactctgcggcccctcgtgaagggggtgaaaccagcccatgccgccggatccctcacccacaccagcaaatgaggatcggagcaaagataaaaattacatctgaaaaaggatacaaaaataagaaaaccagcttgctcgctgtaaaaaatagaatcttctgtttcttcaaaaaacaacaatctcaacgacacccaagggactcaggacaagctgagggagctgcgggatccgccccagcagacacgcaggcccgcggggtggccacctccttccaggaggcccaagccgcctttccctcccttcagcccagcgcaggcggccccagcagaccaggcctgcgggcgctccctccacaaatgccaccttgttcccgggaagcccaggcttccctggggcagggcgggggctgggggggtctgtgcccggaccggcaccggctaggcacgcgggggagggaacgctgtcgcatgtcggctgcaggcagtgcaggcccaggcctctgggctcggctcacggttgctccctaaagcacaggggctgccagagcctctcggatggcccaaaggcggctgcagcctgggccaccatggtcccggaacactcctccccacttcctcccccaaccaacccaggcaaccgcagcctgggggccatgtgccagacatgccacagtgctcggagcacctccaacagccttcgcggatgttctcctgggccttccaaagagcaaagtgtgagaaagatgtgcttttacctgcaccatcctgtgcccttactggtccccagctacagacctcctggccggcgtgtcaggccgagagcagcaggcaggcccttacagacacggtgctgagcgccctggaggccagcaaggaaggtgccaccaaagacactgagggcaggtgaggggtgggcccttctcaccctctctgttcccgtggagcgagtgtggagcgcaggcagggtcactgcgcccggccccagcccggcaccaagggcaaatgccacaggagggtctcatgtaagaggaaggagggccgccaggcccgtttctcggtggttggtgaaaggcccccatgtccctccttgacgacatctttctgtccccaggaggaagggccccgcactcttcagctatggctttggtggtggacgagcttctggcctctggagagcgggacacaaggttgcgagaacctcttggggtggctggagaggtttctctgtccaggctggaacggagaagggcagggccaggggtcctgtgtgtcttctccacgggcccccgagggcctctgccccctcccccagtctgcgggtggccctcagaggcacctgacgtgccctgtgggagaggggcacccccgtccctgtgagccctggccccttcttggtcgataaaacgcagaggtcaacacaatagaaccacaggtccaggagaattattgccaaagctcatgaggatgtcccattgttttcccttccaaattgttaaaaaaaaaaaagaaaaagaaaaagaaaaagaaaattccagcaacgtcctgggcaagtcaatactagctgtccccgccagacgctgccgctgaggtgatcttgatgtactggctgagaatggtctcgaaggcctcatccctgtgcaccatggcaccaaacacgagcggtttctgggtggatggcgtcgacacggcaatccccatgcctgagcctgggaggacagacaggaccttgtacttctggatgtccgtgatgtccactagcttgatgactttgttcctctttgaggacccagatttggagctttcgaagcacaagtaattctgccgtgacgtagagcaccccgttcctgatgtagtccgtgggcatcttccggtccctgttgatgaggcagcagcgccagccattctcgcacaccgccagcggacgctcgttttctgtcagattgaagatctcgtggaaattgcccttcttggtgctgtggaagcgaccggcgtcctcctctttacccaggccggccggtgcgctgggtacgtagctccgtgacgaggtcgtctgcagcctgcgtgagactgcggcgctggagcgctccttgagctgcgggtcggtggggagactcctccagatgatatagggcgtgtcgtacttggcgcgcagcctcgggcagcgtttaaagatgaaatcaatgaggaagaacttgataccagcatagagtcccacggcaagccccaccaggcggtaggggaagaagcaggaggccaggaaggcagcccagagcgccacatacagcttctgtgtgatctccggctggacccacatgaacaagttcttgatcttctccaggatgtcagccatcttcccgaaaaggttctgggctttctgggcgacgtccagcaccagctggaacttctcagacacagtcaggtcttcctttggaggttccacgggctcagacacttcgggcacgatgctccactgtatccgccaccccctggcgatgaggtaattgagggataacctcagaattgctagaaataagaacaatgggatggcccagccatgccacacggcattcatgtacacggtgaaggcaatggcagacgtgtagacggagtaccagtcggataaggcagagaggttcttcacaaagttagtgaccggcttggcaccgcgcttgagccgtctcatattttcagttaacctgcgggcgctcaggggttcctctgtctccacagtgttctcctcgggctggaaccggaagtcctccacgtactccccgaaccgctcgtagaaccacttctgcaggcgcgaggacagcccctggctccggcgctctgctccattgctggcctgggcctgcccttttgggggctgctgagccatctgctcctcggttctggccttcagcacctcctgcaccttctgctccagctccatccgccgctgccgctcgcggtccagctcctgccgcagcatctccgcgttggtttcttctcgcagcttccggagctcctcctgtaagaaatgtttttccaataaggcaatttccaggtgacctttgatctcattcagtcgatcaaactctgtccggttaaagtcctggactcctgtggccatgatgagggtccctggaccagcagggtccctcagctcctcgctgtcccggggcgaggtccgcggtaccttcagggggatttcgtcgctgcattcggtgtccgaggcatttggagactccgctagatcgaggaagtcatctctcttgtgacctctgaacctgattttgtccaacctccttagcatgttcagcactgaggtcctctgcttcaccctaacatgacgctcgggttccctccgtctgtctcagatacatccagaaacactctttcactgtggctccttcaggtcctggcccagaaccagaatgtgcttcgaggacccaccaaccatagcctccaagccaccccacaccagc

SEQ ID NO: 89940 - DNA, 911 bp, Homo sapiens
tttcgtggaacatggactctgactcttgcgccgccgccttccacccggaggaatactcccccagttgcaagaggcgcaggaccgtggaagacttcaacaaattctgcacctttgtcttggcctatgctggctacatcccttatccgaaggaggaactccctttaaggagcagccccagccctgctaacagcactgctggtaccattgacagcgacggctgggacgcgggtttctcagacatcgcgtcctcagtgcccttgccagtctctgaccgctgctttagccacctgcagcctactctcttgcagcgagccaagcccagtaacttcctgctggacagaaagaaaacggacaagctgaagaagaagaagaagaggaagcgcagggacagtgatgcgcctgggaaagaggggtacagggggggcttgctgaagctggaagccgctgacccctacgtggagacccccacgagtcccaccttgcaggatatcccccaggctcccagcgacccctgctcgggctgggactccgatactccctcgagtggatcttgtgccactgtgtcacctgatcaggtcaaagaaataaaaactgaaggcaaacggactatcgtccggcggaagcccagctgatggcgaggaatgatgggaatttctcttccctccttgagagtatctttccttccagatgacgattcctgggacctcgtgacctgcttctgcatgaagccatttgccggccgccccatgatcgagtgtaatgagtgccacacctggattcacctgtcctgtgcgaaaatccggaaatccaatgttccagaagtgtttgtctgccaaaagtgccgggactccaagtttgacatccgccgttccaaccgctcgcggacgggctcccggaagctgttcctggac

SEQ ID NO: 89941 - DNA, 2979 bp, Homo sapiens
tcctggaattgcacgcgcttcctgaccaccaggctctggcccttgagaagccagcggggctttgtccctgttgctctccttgccaaacccagtctctctgctagtggtggtttcggttgcgacaccgtccaggttcccaggcaggaaccgctcggcctggctgcttagctacttttcactgaggaggtggtggaaggtgtcgcctgctctggctgagtaagggtggctggctgagccggcagcccccgccctaggcctggctcttcccggcctctgtactttgccctcgctgcctgacaggttctgctgtgggctctgctgaatggaagtcgctggtagtccttttccctttctccagtcggcccaccttgggacaccttgactccaagcccagcagtaagtccaacatgattcggggccgcaactcagccacctctgctgatgagcagccccacattggaaactaccggctcctcaagaccattggcaagggtaattttgccaaggtgaagttggcccgacacatcctgactgggaaagaggtagctgtgaagatcattgacaagactcaactgaactcctccagcctccagaaactattccgcgaagtaagaataatgaaggttttgaatcatcccaacatagttaaattatttgaagtgattgagactgagaaaacgctctaccttgtcatggagtacgctagtggcggagaggtatttgattacctagtggctcatggcaggatgaaagaaaaagaggctcgagccaaattccgccagatagtgtctgctgtgcagtactgtcaccagaagtttattgtccatagagacttaaaggcagaaaacctgctcttggatgctgatatgaacatcaagattgcagactttggcttcagcaatgaattcacctttgggaacaagctggacaccttctgtggcagtcccccttatgctgccccagaactcttccagggcaaaaaatatgatggacccgaggtggatgtgtggagcctaggagttatcctctatacactggtcagcggatccctgccttttgatggacagaacctcaaggagctgcgggaacgggtactgaggggaaaataccgtattccattctacatgtccacggactgtgaaaacctgcttaagaaatttctcattcttaatcccagcaagagaggcactttagagcaaatcatgaaagatcgatggatgaatgtgggtcacgaaggatgatgaactaaagccttacggggagccactcccgtgactacaaggacccccggcggacagagctgatggtgtccatgggttatacacgggaagagatccaggactcgctggtgggccagagatacaacgaggtgatggccacctatctgctcctgggctacaagagctccgagctggaaggcgacaccatcaccctgaaaccccggccttcagctgatctgaccaatagcagcgccccatccccatcccacaaggtacagcgcagcgtgtcggccaatcccaagcagcggcgcttcagcgaccaggctggtcctgccattcccacctctaattcttactctaagaagactcagagtaacaacgcagaaaataagcggcctgaggaggaccgggagtcagggcggaaagccagcagcacagccaaggtgcctgccagccccctgcccggtctggagaggaagaagaccaccccaaccccctccacgaacagcgtcctctccaccagcacaaatcgaagcaggaattccccacttttgggagcgggccagccttcggccagggcttccatccagaatgggcaaagacagccttaaccatgccagggtcccgggcctccacggcttctgcttctgccgcagtctctgcggcccggccccgccagcaccagaaatccatgtcggcctccgtgcaccccaacaaggcctctgggctgccccccacggagagtaactgtgaggtgccgcggcccaggcaagtgtgctggggcagctgcacagccccccagcgtgtccctgttgcctccccatccgcccacaacatcagcagcagtggtggagccccagaccgaactaacttcccccggggtgtgtccagccgaagcaccttccatgctgggcagctccgacaggtgcggggaccagcagaatttgccctacggtgtgaccccagcctctccctctggccacagccagggccggcggggggcctctgggagcatcttcagcaagttcacctccaagtttgtacgcaggaacctgaatgaacctgaaagcaaagaccgacgtggagacgctcagacctcacgtggtgaagcagtggcggcaacgacaaagaaaaggaagaatttcgggaggccaagccccgctccctccgcttcacgtggagtatgaagaccacgagctccatggagcccaacgagatgatgcgggagatccgcaaggtgctggacgcgaacagctgccagagcgagctgcatgagaagtacatgctgctgtgcatgcacggcacgccgggccacgaggacttcgtgcagtgggagatggaggtgtgcaaactgccgcggctctctctcaacggggttcgatttaagcggatatcgggcacctccatggccttcaaaaacattgcctccaaaatagccaacgagctgaagctttaacaggctgccaggagcgggggcggcgggggcgggccagctggacgggctgccggccgctgcgccgccccacctgggcgagactgcagcgatggattggtgtgtctcccctgctggcacttctcccctccctggcccttctcagttttctcccacattcacccctgcccagagattcccccttctcctctcccctactggaggcaaaggaaggggagggtggatgggggggcagggctccccctcggtactgcggttgcacagagtatttcgcctaaaccaagaaattttttattaccaaaaaga

SEQ ID NO: 89942 - DNA, 3634 bp, Homo sapiens
  misc_feature (1)...(3634): n = a,t,c or g
cagcagagcttgagaaaagtacattgttctggaatttcatcattaacattttataatcttacactcacttcttgtctttttgtgggttcaagagccctctgacttgtgaagaatttgctgccctcttaagagcttgctgacttgttttcttgtgaaattttttgcacatctgaatatcgtggaagaaacaataaaactacaccatgaggaaaactaaaggtctttatttaaaatctggcattgtattaacatgtaattttataccatgtggtattttatacatttcctcagtagtgatatttggtaaagcagttcatacagcttttttctaagttccatgaatcttacccagtgtttaccgaagtatttaagcagcatctgaatatttccacccagcaatgttaatttatctaggaaagttcagaatttcatcttcatgttgaatttcccttttaacttccgttcatagacatatatgtgacttccaattcgaccctctggcaagtgagtgtggaagaaaacagcagttcttttataattgcttgaaattaggaaagcgcttatttcctcttccaaaatgctcgaaggtgatcaagtgaagtagggcaatgatgcatcatcatgaaactttctatgtaaccaggtgaagggatttaggtaaaatacatctgcttcatcaagataatgactttttccagtcaggtctggcgggcactggagaaatctcatgggaagtgggcagtgaacatggctgtaataaggagtagagtggcaaggcatcattataaatattgaagctgaagatttattgggattgttgtaacaaactttttgaatatgactcatgacatcaagagtacctcgttgatgaactaaaccagtataaagggcgaggaacaaatttgataaaaacaggaaacttagagctggtttcttccatgttttcaggtgggttaatgagtatccacagaacaccatacagaatggtaaaactggataaataaacctgaattctttgtggctcaacatgctataaacaagcagtgtccacagcacagtcaccaaaagtatccggtatctctttggtgctagatagcagccatgaataaagaagggtaagtgagtacccaagataactggaaatccttgactgaagtaccagtgccatggatgagaaccataaaatgttccccagttctgcagcacgttaaatttcaaaaaattaaattgaaccagagtccattggccaaaaaaaatacgatcaatcatcagagacaaactcaaagtaacaaagcctacaggtaaaaaaatgatgtagaataagatcaagctttcttggttcttgacagaaatgtctgaagagcaaaggtgtccacagaatgacagctgtgggacgaattatgaaggcaagtgccaccagggatgagtatttgacactgttcatagactttgaaccttccaaaggatagtagaaaagagcaattatagtgagaacagtttccatggtgtttgtaagggttctggtacagcaataccatgtgaaccaggagcacaactggcaaaaaaacacccatcttgccacttcctgattttctagttgcttcattaatgagtaaagtctcacatctgctacagcagacagaagtgcttgggcaagtctaggaatccaaatcagcaactgaacactatctttccctaaaagatgaagaatcttgtaaatgcttgcaaagattaagggataagtgtaactcctcagtctctctgtccattcccaagtcaaataaccataattgaaaaccatgtgatgtgaaacttcaagagactgccagtattcatctggaacaaaacttgtctgcactaaaaagcagtttaatattcgtaaagctatggtaaacaagagcagataaatattttctccaagaagatccccgcggcgcctggcgctcttctcctgggtgttgaagtacaaggtagactttctctttcgcagctttatcttgccgtgggagcggttctggagaccatgcaaagtgaggctggcatctccgccccccggctccattccgcacttgcttaggggcctcctcatccctggccgccaccttcctaaggcggaagaaagctgcagtagcgcgctgctcgtccatccattaagtttggcctttgagagcagtcgtcgctcgcaagcccggaagtaaccgggaacgggcaacttcgtagctcccacccgacgtggtggcctccttgcggtttcctttcgccgtttccgaaccgagggattgctactcgcctttggcttggcggtctctgtgctcgggggtccgaaaactgctggaaggcccccggtctctggaggggagcaggcggtagcgagtttagtgacgtggagcaggcgcagaacagtcggaggtgcctgagtggttattaaaaacgatttgaagagatttcctgggtgtggagtgtgactttccaaaaccagcttttccttgagctgtatttgttgcagcaatgtttaggagattgacttttgcacaactgctttttgccactgtccttggaattgctggaggagtatatatttttcaaccagtatttgaacagtatgccaaagatcagaaggaattaaaagaaaagatgcagttggtacaagaatcagaagagaagaaaagttaatactacatggagttaggcctggcgcagtggctcacgcctgtaatcccagcactttgggaggccgaggcgggtggatcatgaggtcaggagttcgagaccagcctgaccaacatagtgaaaccccatctctgctaaagatatnaaaaattanccccggcgtggtggtgcacgcctgtaatcccagctgctcgggaggctgaggcaggagaatcacttgaacctgggtgggagaggttgcagtgagccaaaatcacgccattgcactccagcctgggcatcacagcgagactccgactgttctgcgcctgctccacgtcactaaactcgctaccgcctgctcccctccagagaccgggggccttccagcagttttcggacccccgagcacagagaccgccaagccaaaggcgagtagcaatccctcggttcggaaacggcgaaaggaaaccgcaaggaggccaccacgtcgggtgggagctacgaagttgcccgttcccggttacttccgggcttgcgagcgacgactgctctcaaaggccaaacttaatggatggacgagcagcgcgctactgcagctttcttccgccttaggaaggtggcggccagggatgaggaggcccctaagcaagtgcggaatggagccggggggcggagatgccagcctcactttgcatggtctccagaaccgctcccacggcaagataaagctgcgaaagagaaagtctaccttgtacttcaacacccaggagaagagcgccaggcgccgcggggatttggattcctagacttgcccaagcacttctgtctgctgtagcagatgtgagactttactcattaatgaagcaactagaaaatcaggaagtggcaagatgggtgtttttttgccagttgtgctcctggttcacatggtattgctgtaccagaacccttacaaacaccatggaaactgttctcactataa

SEQ ID NO: 89943 - DNA, 1093 bp, Homo sapiens
acattaatctcccataaccttaggtgcctcactaagtatgattaagtcttacgagtgagaataattttcattattttggtctgcagtcagcttctgatcaccaccacaatttcaaaagatctcgatttagtgtttccctgcttctgaataggccgagggactgccttctttctcctcagtcttatcttgccagcattttaaatgtaattgatatcacctgcaattttatgccgccctaaacaaggagttgcccacattaagtcttttaaaacaccatggcatttattttcacaattggttgtcttttgtttataagtaaagcttttactgcttgcggtctttacttttgccctctggtggtcttcattttcacttttcttgtcctttatttaaaacggccttgaattggttaactgcacttctcagcaacctcctccacttaccaccatttggtgtaggctcaatgaatgttaactgttttttacgctggtttaaactgaatataattaggacagcgaatttgtttcagaacctgatggaaaacaaggattgcatatatatttagtgggtacgttctgccggcttggatgtttggatcctgcttgatccttttctgaacacagatagttatttgagctgaattaactattggttgactgggccttttgcaaggttactgttcttgaaacacagatattaattttatcccaccttactttggtggtgcttgtcccctcttccaaacttggcgcacggtttcctattccattggcgcctactttttatccttaacaacgcgccgcaccgcgatagaaatttcgcctaacgacgcgagacaacgagaatggcaaacgccttcggcgggcaagctgcgtcccgccctttagcccaccccttctcttgtccaaacagaccggtcgcactcctccgccgacgttcaagaccacttgcggatgccccatccgtcattgcccagccacagcggcggcggctgtcgccgcaacttctctcttcgtagcaccgcggacgcggcccgacagcagctacacgtcacgaacgaacgccatcggctccgtctcgcccgtgcactgcc

SEQ ID NO: 89944 - DNA, 4529 bp, Homo sapiens
  misc_feature (1)...(4529): n = a,t,c or g
taggagagccgagctgggtacgagactaaagggcccacatgacccagtgacgccagatttccaccgaggactgagtgagctgctcagacatggctttctgcctcccagcctgtcctccactgtgggcatagcatctgtgcctgcctgcctgcttgagggagaggagtttctgctgctgccttgagctggggggaagagcccaggggcagatcctggcagctgcctggatggggctcctccctgcccttatgagcatgccaggcccagaaaggccgagcctgggctgccttcctgccccagccgagggaggggtcagacggctctaccatgggtaactcaggcaagagctggttttcctctttattctgggtgtgtgcagctgtgaggccccaacccaggagaggccatggcctaggtacctgtgaccaccctgcccccgtgtagagggcatcgnctttcctgctattttattctttcagcttttgtcttaggcccagaatcaaagtgaaaattgagtcgagctgacccttacaacagtaggatttagtagggtagatttcaaatgaggcttcgcttctcccaaagtagccagtccaagttccagtggctgtcgttcagctcatgggagcttcatggggacacagccggcacaggtgcagggcccgagtccgcccacccagcctggcgctgaaactgcacacgtacactatgtggtttaagagcactttattattgttcttaaggctacttttaagtacaaaaaaagatggcctgccaaacctttttttttcttcttccaggaaaaacaggccacagagaatggtatattacagatttacacacatgaagagaaggtcagagcgcactgcaggcagcgcggctctgggaagaacttcacggagccccttcttagagcagggagggggctttctcagtgaaatgtttggttttctgctgcctcctctgccccaggcccccctccagggtactgcctatcccagataggtcagtgcaccagggacccggccgccagcaccgccgacccctcccagagtgacgcccttgttcactgacaaagagacctgtcccaggagtgtcctccaccgagccggtcagctgtgggtggttttcctgttacgacgctcagtagcctgtagcaataacaaactcgtggctatgaatgcagatgcagtgttctcatagaataactgttcctgcacttttacagacaaatctacgacaaaaaaaaagatcaactttttttttccgaacaacaaaaaaaatgaatgattacaataggaaagggaaaaattaaatagctacatatcattaacaaattaatgttcttcaaaaaatacctacaaatttctctgtacattctttacgcacagcgtaacgatggtctcaaaatcacccatatagaaaagtgttctcaacgatttttcctacagaaaatataggggcctgaatgccaaagcttggaagcccagtacagtgggagtgaaatgtgtgcggggcaaggagaagggcttttctttcctccacttttcaaaggcctgcagccactctgtgactacaagagccagtcctccgaccttttcacccagtgccaatttccaaaattcaacagctaaaaactgtaaaaccgggggtcatacggtgtgcagagtccacaaagccttgcaggtgaggtgaccacgcccacgtcacctggtcaggtgccatcgtcgtgagcctctggtgggccaggtgggacacagcacaccccagggggaggggatagaaacgctcattgaccaaaaaggagcagctgtgacctccacagctgtgtctgtcatgcttgcttcatctaatttctagttagtagctattaatatagcaaataataaatgcagtaataacagtataaagtcagaggaatgtatactgccttggccccagcgtacgaggaagcgtataaaacaccatatcacagattgtctgtcagtaatctgctgttcagccaagagagttcaaagggagcagtttctgcatgtagggaagttggaagacacaaaccccacctcccctgggagcttgtaacaaagcagacagggatgcaaaaataaatgatgtcagcctgcagccaaactccagcatcccacaccgcagctgacccactgctcatcgcgagggcctgccaggagctggcctcccgcactacttgtgagtaaagtgaatatcaaataccaatcttagagtacaactgtaccagcagtaagtatatctaggactgtaactgacaaaaataaactaattctgaaaagaagatagtaagtattaaggtttttgtttactgtctatataattaatagaaaccagctattttttctccattaaaacatgcatcacgtttaaagcactatggaatcctccaacctcagctctagtctaacaaactgcagtgttcagagaagataaaatgcccgtgattggtagagtctgcagtccagttgcaagcccctgaaatctagagagagaaagacctataacctgtatgagacttccccttccaaagctgtattgtctacattaaaaaaaacaaaaacagtaacaacaacaaacacacaaatggtcagaaatgtcatccttaaaccctttgtttttcagcagtttgccctcagagttctggcataacacataaagttgtcaggcaactttagtcctcctccaatagtgcaaatcagacacgacagttctcttcaagtatacacacgcacacacatggaccgaaccaaacacgccgtggaagctgagccacacacaccccggtctcaagaagcaaaggaaaaagcacaaagcgtctgagtcaccaattcatcatggcttgtgactgagaaagcgctgtggagtcctggccccgtcggggcagcagacctgcatcagaggtttctttggtaactgaggcaggaagtaaggatgctacattagacagatgttccacgcgtagttcctgctatcatgtttgagggcccccttgtacggataccaagcaagtacaaaaacagaacacaaatcccaacaacatggtttttgcaaataaaccatcccttcccttccccccaccccacccccatgatttttttttttttaagtactgactgttcaaagctcaggcaaaccatgcagatccacgtgttgttggaggaggcgctcccttcaggagaccacagagggggagtgactgtggctgaccatgtgggcagaggggctggcgggctggcccctgcgagaggcggactcagggctgctggatgctccgtccttggccgctttgatctggagccacgtgtcacccagagctttgggcaaagtggtcagtccacggagcccgtgattggacaccggagtttgggtgccggctcgggctcctttgtaattcttgcccagggctcctgcggaaaatgctcctccacccacgggtccacaggtggtggcagctgcaggcaagcagggaaggcaggcagtcagacacaggtggcgctcggtggcctccggtagctggcaggcccgggccgcggcacagccgctgtgcgcgaatggggtagtgcgagaggttgcagttgcgggcgccagccgaggcacaggtgatcacggagggccggttctgctgccgctcccccggggtcagtgtgggcgagaggccggctggcctgctggcgtccaggctgttcttggtcagtgcgaggggctgctccaaggccaaggcttggggagggaggtgtacaggtggctgccgtgcaggctcatggtgggggccacagcgcgctcgatggggctgcggctccgctcccgggggtctctgcggcagtctccattggcagtcttgttcagatgggggttgaagatgcgactcattttggagacgtggtcgttgtcacagtctaggtcctcgtcacctggctccatgctgaacttcctcttgctggggctgattgggggagggccggtgcggtgactgctgagggcagaggccaccggcagggtctgcattctgggttctcccctgagagcagcttcgccttcgtagcacagaatgccgatattgttgttcatcttgtccaagtactgatagttcaacaggtccatcttcataaatagcatttattgggctagcaaaaaaaaccagctctttgcttttgccccaaaagagttaagtttcaaaaatcaattgttgctgagtagctcctggctcttcaacttcccaaaggcaaaggcccagcctcagactatcaaaacaaagtatgcaaaagttaaaaaaaaaaaaatcaggcacaaaaaaatcgagctcacacgaaacccttcaagggcttactggtagacggtgtatgtactgtatccccgatcgagtatgaaaacagcgtttcagaagtccttacaagtccttcctggaaatggaaaagagtgaaaaagagaaacgcgcagcccgtttcctaggacaaagcggcgccggcccctctcacagcccgctgcaagccggcagcgctgac

SEQ ID NO: 89945 - DNA, 1323 bp, Homo sapiens
tgagatcacttcccttgcacagtttggaagggagagcactttattacagaccttggaagcaagaggattgcattcagcctagttcctggttgctggccaaagggatcatggacattgaagcatattttgaaagaattggctataagaactctaggaacaaattggacttggaaacattaactgacattcttgagcaccagatccgggctgttccctttgagaaccttaacatgcattgtgggcaagccatggagttgggcttagaggctatttttgatcacattgtaagaagaaaccggggtgggtggtgtctccaggtcaatcaacttctgtactgggctctgaccacaatcggttttcagaccacaatgttaggagggtatttttatatccctccagttaacaaatacagcactggcatggttcaccttctcctgcaggtgaccattgacggcaggaattacattgtcgatgctgggtctggaagctcctcccagatgtggcagcctctagaattaatttctgggaaggatcagcctcaggtgccttgcattttctgcttgacagaagagagaggaatctggtacctggaccaaatcaggagagagcagtatattacaaacaaagaatgttcttaattctcatctcctgccgaagaaagaacaccgaaaaaatatacttatttacgcttgaacctcgaacaattgaagattttgagtctatgaatacatacctgcagacgtctccaacatcttcatttataaccacatcattttgttccttgcagaccccagaaggggtttactgtttggtgggcttcatcctcacctatagaaaattcaattataaagacaatacagatctggtcgagtttaaaactctcactgaggaagaggttgaagaagtgctgaaaaatatatttaagatttccttggggagaaatctcgtgcccaaacctggtgatggatcccttactatttagaataaggaacaaaataaacccttgtgtatgtatcacccaactcactaattatcaacttatgtgctatcagatatcctctctaccctcacgttattttgaagaaaatcctaaacatcaaatactttcatccataaaaatgtcagcatttattaaaaaacaataactttttaaagaaacataaggacacattttcaaattaataaaaataaaggcattttaaggatggcctgtgattatcttgggaagcagagtgattcatgctagaaaacatttaatattgatttattgttgaattcatagtaaatttttactggtaaatgaataaagaatattgtggaaaa

SEQ ID NO: 89946 - DNA, 1092 bp, Homo sapiens
gtgaggattccctgccaaaatgcctgagggcttccctgcctaccacagccctctgtgttcttaaatcctcctgtctgaacagaggccagactctggtttcccccacagcctgtctgtgtctgtcctctgcaaagccatgtggctctacctggcggttttcgtgggcctgtactaccttctgcactggtaccgggagaggcaggtgctgagccacctgagagataagtatgtgttcatcacgggctgtgactctggcttcgggaaactgctggccagacagctggatgcacgaggcttgcgggtgctggctgcatgtctgacggagaaaggagccgagcagctgaggggccagacttcagacaggctggagacggtgaccctggatgttaccaagacagagagcgttgctgcagccgcccagtgggtgaaggagtgcgtgagagacaaaggactctggggcctggtgaataatgctggcatctccttgcccacggctcccaatgagttgctcaccaagcaggacttcgtgaccatactggacgtgaacttgttgggggtgattgatgtgactctgagcctgctgcccttagtgaggagggccaggggccgtgtggtcaacgtctccagtgtcatgggccgggtgtcactttttggtggaggctactgcatctccaagtatggcgtggaagccttctctgactccctcaggagggaactctcctactttggggtgaaggtggctatgattgaacctggctatttcaagactgctgtgaccagtaaggagagattcttaaagagcttcctggagatttgggaccggtccagtccagaggtcaaggaggcctatggcgagaagtttgttgcagattgtgaataagaaatcagctgaacaaatggagcagaagtgcacacaggatctgtcgttggtgaccaactgcatggagcatgcgctgattgcctggccacccccgtactcgctactcagctggctgggatgccaagcttctctacctccccatgagctacatgcccaccttcctggtggatgccattatgtactgggtctctccaagcccggccaaggctcta

SEQ ID NO: 89947 - DNA, 2372 bp, Homo sapiens
  misc_feature (1)...(2372): n = a,t,c or g
ttttttttttttactcaacaagatgtgaatatttattcaaagtggaaattaaaaaccccgtaaataacttcaggtaaggtagaattttgccgccaagtgagttttatgaaaaaactttgtgtttgagccaggcatggtggcacgttcctgcagtcccagcagctactccggaggctgaggcaggaggatcgcttgagcctaggagttgagccatgatcacaccactgcactccagtctagacgacacagcgagacactcttgtggaacgtgcaaagcctgtcccaggacctctttacactctgggggtctctgcccaggcacgcttgctgcttccggacacagctgtgggcggagctagtaggggcggggctacgtgattgacacttctctcctcagacttcaagggctaccactggacccttcccctgtcttgaaccctgagccggcaccatgcacggacgcctgaaggtgaagacgtcagaagagcaggcggaggccaaaaggctagagcgagagcagaagctgaagctataccagtcagccacccaggccgtattccagaagcgccaggctggtgagctggatgagtccgtgctggaactgacaagccagattctgggagccaaccctgattttgccaccctctggaactgccgacgagaggtgctccagcagctggagactcagaagtctcctgaagagttggctgctctggtgaaggcagaactgggcttcctggagagctgcctgcgggtgaaccccaagtcttatggtacctggcaccaccgatgctggctgctaggccgcctgcctgagcccaactggacccgagagctggagctctgtgcccgtttcctggaggtggatgagcggaactttcactgctgggactatcggcggtttgtggccacacaggcagccgtgccccctgcagaagagctagccttcactgacagcctcatcacccgaaacttctccaactactcttcctggcattaccgctcctgtctcttgccccagctgcacccccagccggattctggaccacaggggcgcctccctgaggatgtgctgctcaaagagctggagctggtgcagaatgccttcttcactgaccccaatgaccagagtgcctggttttatcaccgttggctcctaggccgagctgacccccaggatgcactgcgctgcctgcatgtgagccgggacgaggcctgtctgactgtctccttctctcggcccctcttagtgggctccaggatggagatcttgctgctcatggttgatgattctcccctgattgtggagtggaggaccccagatggcaggaaccggcccagccatgtctggctctgtgacctgcctgctgcctccctcaacgaccagttgccccaacatacatttcgcgtcatttggacagcaggcgatgtccagaaagaatgcgtgcttttaaaaggccgccaggagggctggtgccgggactccacgacagacgagcagctattcaggtgtgagctgtcagtggagaagtccacagtgctgcagtctgagctggaatcctgtaaggagctgcaggagctggagcctgagaataaatggtgcctggcttaccatcatcctgctgatgcgggcactggaccccctgctgtatgagaaggagaccctgcagtacttccagaccctcaagggccgtggaccccatgcgggcaacgtattcttgatgacctgcgcagcaagttcttgctggagaatagcgtgctcaagatggagtatgccgaggtgcgtgtgctgcacctggctcacaaggatctgacagtgctctgccatctggaacagctgctcttggtcacccatcttgacttgtcacacaatcgcctccgaaccctgccacctgcactggctgccctgcgctgccttgaggaccctccaccccgaacaggtgctgcaggccagtgataatgccatagagtccctggacggcgtcaccaacctaccccggctgcaggagctgctactgtgcaacaaccgcctccagcagcctgcagtgctccagcctcttgcctcctgccccaggctggtcctcctcaacctgcagggtaacccgctgtgccaagcggtgggcatcttggagcaactggctgaactgctgccttcagttagcagcgtcctcacctaagaggccctgccccctacccttgccctttaacttattgggactgaataaagaatggagaggccctctcaggctaccaaaaaaaaaaagaagaaatttaagcaacttattaaacaaaananggggggcctctctatactgagggggccgacaaaaacccctataaaacccggggggctctacttttgcaccgccctt

SEQ ID NO: 89948 - DNA, 5729 bp, Homo sapiens
cttttttccccaagctctttaatttggtgtgccccgggtttttcccctttcacatttttaaaaacccggcccctggatttttttttggggccccctaaaaaaaatattttttctcccacccccgggaattaaaatttttttctttaaaagggccccccctttttttttttttgaattttaatatgatattttattatgggtgtctgtaaggaaaaaaagatcaacaaccacatacaagcttacaaagttaaatttcaacacattctctatgctagtgtgacaaaagcagccccataatttggtttttattgttgacctttacaggatgaaggaggagaatcccctgtggcatgccaatgaatctttctgatgggagacatgtacagattttgtgcatttatgttctgaatgcaagtcaacaattctgatctagagtttaaaagtgaaagtacattagcaccataacatgcgtctttaaagccttcccaaatattagtaatcttggaccagcaatggacaaggaaaaaagggggggcaccttttacaagcagtttggatatcccaatattaaaaataatttgtgggcctttaaaaatatttcctttaaaattcttggcattacaccttttccttttaaacccaatcttcccaggagattaatccaatgaaatttataaggttttatccaccgtataaaatttttttccatcttctgggactccatagaatacaatctgtgtttctgaccgagttgaggtagttcaaaatagggagggcttttctaatttcgtatttgactatttcagaaagaaaggttatcttttactggtgagcacagtcattgctctgcagatgggctaggattcaaagaatataacacagtgttgttatcataaagagtgttgaagtttatttattatagcaccattgagacattttgaaattggaattggtaaaaaaataaaaccaaaaagcatttgaattgtatttgggtggaaccagcaaaaaaaagagaagtatccatttctcctttgtccaaattatactgtttcccaaacattttggaaataaataactggaattttgtcggtccaccttgcactggttgacaagattagaacaagaggaaccacatatgggagttaaatttttttttgttgggatttcagatagagtttggtttataaaaagcaaacagggccaacgtccacaccaaattcttgatcaggaccaccaatgtcatagggtgcaatatctacaataggtagtctcacagccttgcgtgttcgatattcaaagactgttttgctccattccccagtgtgtttcgtgcaaccatcctccagaactgtgtaggtgaatttgctatttccttcagccttgaattcaccttcatttgaccccatcagcttcagggcccttctttacatttccactggcctgatccatgtatgcaatgctatttttgcagtgatatgtgatgttctgggaagctcgggctggagagaagtcgaaggaatgccagctgcacatcaaggacatcttcaggaagttcaggattgccgtagctaaactggaaaccacccatcccatggggcttttccaaaccaaacgtgtttcttctcagcactagaatctgtccaccagtgtttccgtggaacattcaaaggattggcacttatgcaatgtttccccagtttccatattacagaataccttgatagcaatccaattggcatccctgggttagggtcaaccccagtattctccactcttgagttcaggatggcagaatttcaggtctctgcagtttctagcggggtttttacgagaaccatcaggactaatgaggctttctatttgtccattaacagacttgagtgaagtcataatctcatcggtgttgattttgaaatccattggttcatctccataatacggggcaaaaccgccagctttttcacctccaatcccagcaatggcagcggctccaacaccaccacagcaaggaccaggggcaccaggaggtccaggagggcctggttgccctgggtggcctggggagccctcagatcctctttcacctctgttacctcgaggccctggtggtccaatgggacctggatgtccactggttccatctttgccaggaggtccactgggtccaacaggtcctctggggcctgcaggtcctggactgccgattgcaccctgctgaccagcagggcctggagaacctggggcacctggattaccagggaatcctcgatgtcctttgatgccagcagctccacgttcacctgtttcacctttgtcaccacgtgggccttgaggaccaggagcacctcgggaaccagcaggaccgggagcaccagcagggccagcagggccactttctcctctgtcaccactctttccagctggaccgacaggaccaggtgggcctggatgaccaggagcgccaggggcaccaggagagccattttcaccacgatcacccttgccaccaggagatccatctcggcctggaagaccatctgatccagggtttccatctcttccaggttcaccagctgtaccagccagaccaggaagaccctggggtccagggggaccacgttctccactgagaccgttagctcctggtttcccactttcacccttgacaccctgagggccagggcttcccctaggacctggcatgcctggtggtcctgcaagaccccgtgctccagtgatcccagcaatcccaagtgggcctggagctcctggtgggccctgggcaccaggcgatcccttctctcctggttggccagcatcaccttttggtccagacactccagggctgccaggagcaccagtgttacccgcaggacctgggggcccatccttgcctggagaaccgctgggacctgggggtcctgggttaccattactaccaggaggaccaggaagaccacgagcaccagggaagccagcagcaccaggtccaccaggactgccacgttcacctttgacaccttggggaccaggaggaccagcaggtccagaacctccagggggtcctgcaactccaggagggcctccttcacctttctcacccggagcccctctttctcctttaccaccaggttcaccattctgtccaggagcaccagggaaaccagcaggtcctggagggccagtttcacctctctcaccagggctaccacgaggtccagctatacctggaagtccgggggcaccaccttcacccttatctccaggctggccagctgggccaggaggaccaataggaccagtaggaccccttgggccatctttccctgggacaccatcagcacctgggccgcctggttcacccttgtcaccctttggaccaggacttccaagacctcctctttctccaggcattccttgcagaccaggagtaccagcagcaccaggtggcccaggaggaccagcagcaccctttcctccttcgggaccagggggaccagctccacctctaagtcctggggcccctgccaatccaggaggtccacgttcaccaggggcaccagcatcacccttgcctcctggagctccaggtgcaccggcatcaccctttggacctggttccccaggttttccattttctcctggaggaccacctgtaccaggcaagccttgtaatccttgtggaccagggggtcctgtgtctcctttgtcaccaccaggcccagtaggccctgggggtccctgaggtccagtttcaccattctttccaggaggaccctgagggccaggtcctccagggccacctcgttctccattcttaccaggagcaccatcatttcctttaggaccggggaagcccatgacaccaggctgacctcggggaccagatggcccaggaggacctggtcgaccactttctccttgacttccgggaggccctggtttcccatcacttcctggtcctcctggacttccgggcatgcccctcattcctggacctccagggacgccatctctgccaggttctccagcagctcctctgggccctgcagggcctggagcaccacgctctccagcaggacccttttctcctgggatgccatttggtccagcaggtcctcggaacccaggggcacccctttctcctgcagctcctggaagcccatttgcaccaggttctccaggtgatccatccttgccatcttcgcctttagctcctggaacacctggaataccagcctcaccgcgttcaccacgtggtccgggctctcctttggcaccattcttaccaggctcacctgcaccacctcgcagtccaggagcaccattagcaccggctggtcctggaggaccccgggctcccatcagtccaggagctccaggaatgccagcgggacccatttcgcctttaccaccaggactaccattaatcccaggagggccaggaggaccttgagcaccagcgtgtccctgaggtccaggttctcctctttgtccaggggcaccatttgaaccaggagaccctgcaggtccaacttcacccttagcaccaggggatccagggaatccggcagttccaggaggaccaggagggcctggttgaccatcactgcctcgagcaccgtcattaccccgagcacctgcagccccaggaagtcctggccgtcctcgctcaccaggagcccctcttggacccatgggtccaggagctccattttcgcctggaagaccattttcaccctttaatccaggagcacctgtttcacccttttctccatttcgtccatcgaagcctctgtgtcctttcataccagggaatccaggtatcccagctggacctttgatacctggaggtccaggcaatcctcgctctccaggtcgtccgggtctacctgattctccatcttttccagcaggaccagatggacctatagcaccaggaggtcctggagggcctgaaggaccagcttgcccaggttcaccagggggtccttggtatcctggagatccaggggaaccaggatgaccagatgtaccagggggaccgggagggcctggggggccagctggtccaggatagcctgcgagtcctcctactgctactccgcccgacttgacatcatatgaatcatactggggagaatagttctgaggaccagtagggcgtgattcacagattccaggggggccaggagaaccaggggaccctggttgtcctggaataccagggtcaccatttctcccaggaataccaggagggcctggatctcccttggggccttgaggtccttgaccattaggagggcgagtaggagcagttggaggctgtgggcaaactgcacaacattctccaaatggaatttctgggttggggcagtctaattcttgatcgtcacatattatgtcatcgcagagaacggatcctgagtcacagacacatatttggcatggttctggcttccagacatctctatccgcataggactgaccaagatgggaacatcctccttcaacagcttcctgttgtgccaaaataatagtgggatgaagcagagcgagaagtagccagctccccttttgcacaaagctcatcatgtctaaatatcagacatgagactctttgtgcaaaaaggagaaaagaaaagcagttcaaagtagcaccatcaagttgttccctgcccttcagcaccgggcccgtcatcccacgcgtccgcgtacgcgtgggtcga

SEQ ID NO: 89949 - DNA, 4578 bp, Homo sapiens
aaaggcaaatctaatggtacctggctgttcttaagaatgcatagagaggcttagcaggctgggattgattgaagcttatttcctgcttgaaactgacagtgtttatggccccaacttaaaactgcctattacttcaggccaaagggttccatggcgaaattgaggatttgcagcagtggctgactgacacggagcgtcatctgttggcatctaaaccgctgggaggtttaccggaaacagccaaggagcagcttaatgtccatatggaagtctgtgctgcctttgaagctaaagaagaaacatataagagtctgatgcagaaaggccagcagatgcttgcaagatgcccaaaatctgcagagacaaatattgaccaagacataaataacttgaaagaaaaatgggaatcggtggaaaccaaactcaatgaaagggaaaacttaaactggaagaggctctcaacttggccattggagttccacaattctcttccaagacttcatcaactggcttactcaggctgaacagaccctaaatgtagcttctcggccaagtctcatcttggacacagtcttatttcaaattgacgaacacaaggtttttgccaatgaagtaaattctcatcgtgagcagataatagagctggacaaaactggaacccacctaaaatattttagtcagaaacaagatgttgttctaatcaagaatctacttatcagtgtacaaagtcgatgggaaaaagtggttcaacggttggtagagagaggaagatctttggatgatgcaaggaagagagccaagcagttccatgaagcttggagtaaacttatggagtggctagaagagtcagaaaagtctttggattctgaactggaaatcgcaaatgatccagacaaaataaaaacacaacttgcacaacataaggagtttcagaaatcactcggagccaagcattctgtctacgacaccaccaacaggactggacgttctctgaaggagaaaacctccctggctgatgacaacctgaaactggatgacatgctgagtgaactcagagacaaatgggataccatatgtggaaaatctgtggaaagacaaaacaaattggaggaagcccctgttattttctggacaattcacagatgccctacaggctctcattgattggttatatagagttgaaccccagctggcagaagaccagcctgttcatggagacattgatttggtgatgaatctgatcgataatcacaaggccttccaaaaagagttggggaagaggaccagcagtgtgcaggccctgaagcgctcagcccgagaactcatagaaggcagtcgggatgactcctcctgggtcaaggtccagatgcaggaattaagcacacgctgggagaccgtgtgtgcactttctatatcaaagcaaacacggttagaagcagccctgcgtcaggcagaggaattccactcggtggtacatgccctcttggagtggctggctgaggcggagcaaaccctgcgtttccatggtgtcctcccagatgatgaggatgctctccggactctcattgatcagcataaagaattcatgaagaaactggaagaaaagagagctgaactaaataaagccaccactatgggcgacaccgttttggctatctgccaccccgactccatcactaccattaagcactggataacaatcatccgggcgaggtttgaggaggtgctggcctgggcaaagcaacatcagcagagattagcaagtgctctggctgggcttattgccaaacaggaattgttggaagctttgctggcttggttgcaatgggctgaaactacacttactgataaggataaagaagtcatcccccaggagatcgaagaggtgaaagcactcattgcagaacaccagaccttcatggaggaaatgaccagaaaacagcctgatgttgataaagtaacgaagacctataagaggagagctgctgatccttcctcattacaatcccatattccagtcttggataagggacgagcaggaagaaaacgctttccagcatcaagcttgtatccctctgggtcacagacacaaattgaaaccaaaaatcctagggtaaacttactggtgagcaaatggcagcaagtctggctcctggcgttggaaagaaggaggaaactcaatgatgccttggacagactagaggagctgagggaatttgctaactttgattttgatatctggcgcaaaaaatacatgcgatggatgaatcacaagaaatctcgagtgatggacttcttcaggagaattgataaagaccaggatgggaaaataacgcggcaggaatttattgatggaattctttcctcaaagtttccaaccagtcgcttggagatgagcgcagttgcagacatctttgacagagatggcgatggatatattgactactatgaatttgtagcagcccttcacccaaataaagatgcatataaacctatcacagatgccgacaaaatcgaagatgaggtgacaaggcaggtagctaagtgtaaatgtgcaaagcgatttcaagttgagcagattggtgataataaatacaggttcttcctgggaaatcagtttggagactcccagcaactgcgactggtccggatcctgcggagtactgtgatggttcgtgttggaggtggatggatggcacttgatgagttcttagtgaaaaatgatccttgcagggccaaaggaaggacaaacatggaactgcgtgagaagttcattttagcagatggtgccagccagggtatggctgctttccgaccccgaggccgaagatcccggccatcatcacgaggcgcttcacccaacagatccacttctgtgtccagtcaggctgcgcaggcggcctccccacaggtccctgccaccaccacacccaagattctccatcctttaacacgcaattatggtaaaccatggttgacaaacagcaaaatgtcaactccttgtaaagcagcagagtgctcagactttcccgtgccatctgcagagggaacgccaatacaaggaagcaagcttcgacttccaggatatttatcagggaaaggcttccactctggggaggacagtggcttgataacaactgcagctgccagagtccgaacacagtttgctgattccaagaagactcccagccgaccaggaagtcgagctggaagcaaagctggcagcagggccagcagccgccgaggcagtgatgcatcagactttgacatttcagaaatccagtccgtgtgctcagatgtggaaactgtcccccagacacacagacctacaccccgagcaggttctcggccatccacagcgaagccttcaaaaatccccacgccccagaggaaatcacctgccagcaaattggacaagtcctcaaagagatagtgcaattggttctaccaaggcccttccttgagcatttattatttaagtttgaacgatgtaaaatatggtgtagaaattcttgtgaaatattgcaagaggcgagtttaaaattctgcagatggccttatttgtgtatttgtctttttattttatctgtataattttttttgtcagatattctggggttaaagtcacatcatatgtgaggaggaaaagtttaacatgaactaacatttctgcactgtaacgtgccgggcacacactaaactcagttactgtacctacaggtaagtctacatcctctctgacagccacagcactacatcaatccctgacgttagggatacctcatgacattttcctgtttttatggaaactctgagaagctgaatgatacatgcaggggatattttttgagatgatttaaatgtaaaccaaaagatggaagacaaaaagacaaacacacccacacgcagtctttgcagtatctgacagagaactcacaggaagttacttcaagcacttgccagtactatgatattcaagtaccttgcagcatttctctgccattgctttcaatgaggccagaggcatcctggatattagacctattatactgtaagaatataagtataaagtgcgttcatatacatgtgaggttttcttttgcttgagtggacagtagcacctgtatcattgaactcattttgtatcagagcaattttgcttgcagaaagctatgaaataaaacacgtcccttaactgcattgctatggaattaattttttttccccagggaaaactagtgtatttttttatgagcaatatcaatttggagtgaccaaaagatacttaaaaatgggtttattttgatttctcatctgaaataatcatgttctggatattagacctattatactgtaagaatataagtataaagtgcgttcatatacatgtgaggttttcttttgcttgagtggacagtagcacctgtatcattgaactcattttgtatcagagcaattttgcttgcagaaagctatgaaataaaacacgtcccttaacacgcaattatggtaaaccatggttgacaaacagcaaaatgtcaactccttgtaaagcagcagagtgctcagactttcccg

SEQ ID NO: 89950 - DNA, 2895 bp, Homo sapiens; identical to SEQ ID NO: 61342

SEQ ID NO: 89951 - DNA, 1483 bp, Homo sapiens; identical to SEQ ID NO: 61064

SEQ ID NO: 89952 - DNA, 494 bp, Homo sapiens
  misc_feature (1)...(494): n = a,t,c or g
ggaggccgagnnnnnnnacctcgaanactgacgaactatccagagnggcggaattcttcaatagcccgtcttcaagctgctcactaattctttcttccacatagacagttctgctgttgagaggctccaatgcattcttcagtgtgctaattccttttttctacgccagaatttctgctagatgctttttaattatttcaatatctgttaatttctctgataggattctgaattctttctccatgttatcatggattttgctgggctctctcagataactattttgagttatctgtctgaaagggcacgctatccctgccaccccaggattggccaccggctccttatttacttcacttggtgaggacatgtgttactggatgctcctaacgcttgaggctgctgcattatcttgctacgtatttactgtcatctttgcagactgggctagtttgcacccatccgtcttgagaaggcttctaatccatttattt

SEQ ID NO: 89953 - DNA, 3080 bp, Homo sapiens
ggcgaggggatagctggttaccagaaggacttctttgcagggccagtggtttctgtcagattttcgccggtcacgactgctgaatatgagacgatctgcagcaccaagtcagttgcaggggaattccttcaaaaaaccaaaatttatacctccaggaagaagtaatccaggtctgaatgaagagattacaaaactgaatccagatataaaattatttgagggtgttgcaattaataacacctttctcccgtcacaaaatgatcttagaatatgcagtttaaatctgcctagtgaagaaagtactagagaaatcaataacagagataattgcagtggaaaatattgttttgaagcacctacactggcaacattagatccacctcatacagtgcaaacttggatgaggaggcacaggctggtaccagttcactacagttcattcggctcctaaagaagtagcagtgtccaaggaacaagaagagaaatctgatagcctagttaaatatttcagtgttgtttggtgtaagccttcaaagaaaaaacataaaaagtgggaaggtgatgctgttcttattgtaaaaggaaagtcatttatattaaagaatttggaaggcaaagacattggaagaggcattggttataaattcaaagagcttgaaaagattgaagagggccaaacactgatgatttgtggaaaagaaatagaagtcatgggtgtaatctctccagatgacttcagcagtggcaggtgttttcagcttggaggaggaagtactgctatctcgcattcttctcaggttgccaggaaatgtttctctaaccctttcaaaagtgtttgtaaaccaagttcaaaggaaaatagacagaatgatttccaaaactgcaaaccacgccatgacccatatacgccaaattccctcgttatgccacgaccagataagaatcaccagtgggtattcaataagaactgtttccctcttgtggatgtagtgattgatccttaccttgtatatcatcttcgaccacatcagaaagaaggaatcatattcctttatgaatgtgtaatgggaatgagaatgaatggcagatgtggagctattcttgctgattgaaatgggtttagggaagacattgcaatgtatttcgctcatctggaccctgcagtgtcagggaccctatggaggcaagccagtaataaagaagacactaattgtcacacctggaagcttggtgaataattggaagaaagaatttcaaaaatggctaggaagtgaaaggatcaagatatttactgttgatcaggaccacaaagttgaagaattcatcaagtctatattttattctgttcttattatcagttatgaaatgttacttcgttccctggatcaaattaagaatataaaatttgatcttctaatctgtgacgaggggcatcgtttgaagaacagtgccattaagacaactacagccctcattagcctttcttgtgagaaaagaataattctaactggtactccaattcagaatgatctgcaagaattttttgcattaattgattttgtaaatccaggaatattaggctctttgtcatcttataggaaaatatatgaagaacccatcattttatcgagagaaccttctgcttctgaggaagaaaaggagttaggagaaagaagagcagctgaacttacttgcctcactggactctttatccttagaagaacccaagaaattataaataaatatctcccacctaaaatagagaatgttgtcttttgccgaccaggagcactacagattgagctttatcgaaagctgttaaattctcaggttgtcaggttctgccttcaagggttgttggaaaatagtccccatctaatatgtataggagctcttaaaaaactgtgcaatcacccctgccttttgttcaactctataaaggaaaaggaatgtagctcaacttgtgataaaaatgaagaaaagagtctatacaaaggcttgctaagtgtgtttcctgctgactacaaccctctcctgtttactgaaaaggagtcaggaaaactacaggtgttgtccaagctcttagcggttatccacgaacttcgacctactgaaaaggtggtgttggtatccaactatacacaaaccttgaacattttacaagaagtatgtaagcgtcatggatatgcttatacaagacttgatggacaaacaccaatctctcaaaggcagcagattgttgatggctttaacagtcaacactcttctttttttatttttttgttaagttcaaaagctggtggtgtaggacttaacctcattggaggatctcacttaattctctatgacattgattggaatccagccactgacattcaggcaatgtctagagtatggagagatggtcagaaatatcctgtacatatttacagactcctaactacaggtacaatagaagaaaagatctatcaaaggcagatcagtaagcaaggtctttgtggggcagttgtcgacctcaccaagacatctgaacatattcagttttcagtagaagaacttaaaaatttgttcacattacatgaaagttcagattgtgttactcatgatctgcttgactgtgagtgtacaggagaagaagttcatacaggtgattcgttggaaaaattcattgtctctagagattgtcagcttggtccacatcaccagaaatctaactccctgaaacctctttctatgtcccagctgaagcaatggaaacatttttctggagatcatttaaatcttacagatccttttcttgaaagaataacagaaaatgtgtcattcatttttcagaatataaccactcaagctactggcacatagtgaaagattacttctgacattccattgctcttcttttgaaaattagtatggtaattaaatgtactttttgaaaattaatagaattatttaaattacagtatatgttgcaaaatatatcacttttgatacaatagtcaaaattgagtggtttaatgttttgtaaatattaagtgtttaaatgaaaaataaagatgtgcttatatcattgaaaaaaa

SEQ ID NO: 89954 - DNA, 1229 bp, Homo sapiens
tacggctgcgagaagacgacagaagggggcagcagcggcagccgagactcacggtcaagctaaggcgaagagtgggtggctgaagccatactattttatagaattaatggaaagcagaaaagacatcacaaaccaagaagaactttggaaaatgaagcctaggagaaatttagaagaagacgattatttgcataaggacacgggagagaccagcatgctaaaaagacctgtgcttttgcatttgcaccaaacagcccatgctgatgaatttgactgcccttcagaacttcagcacacacaggaactctttccacagtggcacttgccaattaaaatagctgctattatagcatctctgacttttctttacactcttctgagggaagtaattcaccctttagcaacttcccatcaacaatatttttataaaattccaatcctggtcatcaacaaagtcttgccaatggtttccatcactctcttggcattggtttacctgccaggtgtgatagcagcaattgtccaacttcataatggaaccaagtataagaagtttccacattggttggataagtggatgttaacaagaaagcagtttgggcttctcagtttcttttttgctgtactgcatgcaatttatagtctgtcttacccaatgaggcgatcctacagatacaagttgctaaactgggcatatcaacaggtccaacaaaataaagaagatgccttgaattgagcatgatgtttggagaatggagatttatgtgtctctgggaattgtgggattggcaatactggctctgttggctgtgacatctattccatctgtgagtgactctttgacatggagagaatttcactatattcagagcaagctaggaattgtttcccttctactgggcacaatacacgcattgatttttgcctggaataagtggatagatataaaacaatttgtatggtatacacctccaacttttatgatagctgttttccttccaattgttgtcctgatatttaaaagcatactattcctgccatgcttgaggaagaagatactgaagattagacatggttgggaagacgtcaccaaaattaacaaaactgagatatgttcccagttgtagaattactgtttacacacatttttgttcaatattgatatattttatcaccaacatttcaagtttgtatttgttaataaaatgattattcaaggaaaaaaaaaa

SEQ ID NO: 89955 - DNA, 2113 bp, Homo sapiens; identical to SEQ ID NO: 60851

SEQ ID NO: 89956 - DNA, 3690 bp, Homo sapiens
ccttgcagggtgctgtgggcatgtaaatcctccagcgcagcccttggcaggtaagaggtgcttcataagtgtcgtcccccttctcttttctgtggaagctgtgtgttcacctcccatgggaagacattcctagtcccctcccgtgggctcctcctccagtgggctcctcctccagtgctccgcagtggagtagccagcggggcgtcccgaaagagcatggtgcattcattccgtgagtgccagccacactgcatgttccaaataacacgcctctctctctcctcaggtgcctgagatcatcagctccatccgtcaggcggggaagatcgcccggcaggaggagaagcactgcccgtccgagttcgacgacacgttttccaagaagttcgaggtgctcttctgcggccgcgtgacggtggcgcacaagaaggctccgccggccctgatcgacgagtgcatcgagaagttcaatcacgtcagcggcagccgggggtccgagagcccccgccccaacccgccccatgccgcgcccacagggagccaggagcctgtgcgcaggcccatgcgcaagtccttctcccagcccggcctgcgctcgctggcctttaggaaggagctgcaggatgggggcctccgaagcagcggcttcttcagctccttcgaggagagcgacattgagaaccacctcattagcggacacaatattgtgcagcccacagatattcgaggaaaattcgaactattgctctttaacgattgggccagtctgaagtttacctcatcagtcctgacaccaaaaaaattaggcattgggagaaaaatttttaagggagatatccttttgctctcagggcatcagacaccgtggaccacttttggttttatctgtcgggagtcttccggaggtggcggctttcattttgtctgttacgtgtttcagtgcacaaatgaggctctggttgatgaaattatgatgaccctgaaacaggccttcacggtggccgcagtgcagcagacagctaaggcgccagcccagctgtgtgagggctgccccccctgcaaagccctgccacaagctctgtgagaggatagagggaatgaattcctcccaaaacaaaactagaactgcaaaagcaccctgacgacattaacccaatcaggagcaggcgactatttttgaagaggttcagaaattgagaccgagaaatgagcagcgagagaatgaattgattatttcttttttgagatgtttatttgaagagaaacagaaagaacacatccatattggggagatgaagcagacatcgcagatggcagcagagaatattggaagtgaattaccacccagtgccactcgatttaggctagatatgctgaaaaacaaagcaaagagatctttaacagagtctttagaaagtattttgtcccggggtaataaagccagaggcctgcaggaacactccatcagtgtggatctggatagctccctgtctagtacattaagtaacaccagcaaagagccatctgtgtgtgaaaaggaggccttgcccatctctgagagctcctttaagctcctcggctcctcggaggacctgtccagtgactcggagagtcatctcccagaagagccagctccgctgtcgccccagcaggccttcaggaggcgagcaaacaccctgagtcacttccccatcgaatgccaggaacctccacaacctgcccgggggtccccgggggtttcgcaaaggaaacttatgaggtatcactcagtgagcacagagacgcctcatgaacgaaaggactttgaatccaaagcaaaccatcttggtgattctggtgggactcctgtgaagacccggaggcattcctggaggcagcagatattcctccgagtagccaccccgcagaaggcgtgcgattcttccagcagatatgaagattattcagagctgggagagcttcccccacgatctcctttagaaccagtttgtgaagatgggccctttggccccccaccagaggaaaagaaaaggacatctcgtgagctccgagagctgtggcaaaaggctattcttcaacagatactgctgcttagaatggagaaggaaaatcagaagctccaagcctctgaaaatgatttgctgaacaagcgcctgaagctcgattatgaagaaattactccctgtcttaaagaagtaactacagtgtgggaaaagatgcttagcactccaggaagatcaaaaattaagtttgacatggaaaaaatgcactcggctgttgggcaaggtgtgcccacgtcatcaccgaggtgaaatctggaaatttctagctgagcaattccaccttaaacaccagtttcccagcaaacagcagccaaaggatgtgccatacaaagaactcttaaagcagctgacttcccagcagcatgcgattcttattgaccttgggcgaacctttcctacacacccatacttctctgcccagcttggagcaggacagctatcgctttacaacattttgaaggcctactcacttctagaccaggaagtgggatattgccaaggtctcagctttgtagcaggcattttgcttcttcatatgagtgaggaagaggcgtttaaaatgctcaagtttctgatgtttgacatggggctgcggaaacagtatcggccagacatgattattttacagatccagatgtaccagctctcgaggttgcttcatgattaccacagagacctctacaatcacctggaggagcacgagatcggccccagcctctacgctgccccctggttcctcaccatgtttgcctcacagttcccgctgggattcgtagccagagtctttgatatgatttttcttcagggaacagaggtcatatttaaagtggctttaagtctgttgggaagccataagcccttgattctgcagcatgaaaacctagaaaccatagttgactttataaaaagcacgctacccaaccttggcttggtacagatggaaaagaccatcaatcaggtatttgaaatggacatcgctaaacagttacaagcttatgaagttgagtaccacgtccttcaagaagaacttatcgattcctctcctctcagtgacaaccaaagaatggataaattagagaaaaccaacagcagcttacgcaaacagaaccttgacctccttgaacagttgcaggtggcaaatggtaggatccaaagccttgaggccaccattgagaagctcctgagcagtgagagcaagctgaagcaggccatgcttaccttagaactggagcggtcggccctgctgcagacggtggaggagctgcggcggcggagcgcaaagcccagcgaccgggagcctgagtgcacgcagcccgagcccacgggcgactgacagctctgcaggagagattgcaacaccatcccacactgtccaggccttaactgagagggacagaagacgctggaaggagagaaggaagcgggaagtgtgcttctcagggaggaaaccggcttgccagcaagtagattcttacgaactccaacttgcaattcagggggcatgtcccagtgttttttttgttgtttttagatactaaatcgtcccttctccagtcctgattactgtacacagtagctttagatggcgtggacgtgaataaatgcaacttatgttttaaaaaaaaaa

SEQ ID NO: 89957 - DNA, 3033 bp, Homo sapiens
ctctgactcagtatgtcacatttaacaagaggccagagcttgtccaaaatggctgtccaaaaacgaccccacacttgcgttagaagatgatacctttttcagggacagttttctctcttggctcctgtcccgctggccctctgtctgcctgtgtccctgaccatggctccctgcagtaccctttaacgatttatcagcaagactgttgaacgcataactgcccaagatgcctgtccctccccctccagcacccccgccgcccccgacgtttgcactggccaatacagagaagcctaccttgaataagacagagcaggctgggagaaatgctctcctttctgatatcagcaaagggaagaaactaaagaagacggtcaccaatgacagaagtgcaccaatactggacaaacctaaaggagctggtgctggaggcggtggtggtggctttggtggaggcggcggatttggcggaggaggtggtggcggaggcggtggaagttttggagggggcggacctccaggtctgggaggattgttccaggctggaatgccgaagctgagatccacggccaacagggataatgattctggaggaagccgaccaccattgttgccaccgggaggaagatccacatctgcgaaacccttttcacccccaagtggcccagggaggtttcctgtgccttctccaggccacagaagtggtcccccagagcctcagaggaaccgaatgccgcccccaaggcccgacgtgggctcaaagcctgatagcattcctcctccagtacctagtactccaagacccattcaatcaagtctgcacaaccgggggtccccaccagtgcccggaggccccaggcagcccagccccgggcccactcctccccctttccctggaaaccgcggcactgctttgggaggaggctcaatacgtcagtcccccttgagctcctcctcgcccttctccaaccggcctcccctgccgcctacccccagcagggccttggatgacaaaccccctccaccacctcctccagtgggcaacaggccctccatccacagggaagcggttccccctcctcctcctcagaacaacaagcctccagtgccttccactccgcggccttcggcctcctcacaggccccacctccgccgccacctcccagcaggcccgggccgcctcctctgcctccaagttccagcggcaatgacgaaaccccaagactcccacagcggaatctgtccctcagttcgtccacgcccccgttaccttcgccaggacgttcaggtcctcttcctcccccgcccagtgagagacccccacctccagtgagggacccgccaggccgatcaggccccctcccaccacctcctccagtaagcagaaacggcagcacatctcgggccctgcctgctacccctcagttgccatccaggagtggagtagacagtcccaggagtggacccaggcctccccttcctcctgataggcccagtgctggggcacctcccccacctccaccatcaacatctattagaaatggcttccaagactctccatgtgaagatgagtgggaaagcagattctacttccatccgatttccgatttgccacctccagagccatatgtacaaacgaccaaaagttatcccagcaaactggcaagaaacgaaagccggagtggatccaaccgaagagaaaggggtgctccaccactccctcccatcccgaggtgatctttgcctgctcttctctacccaagctcaagagctgcttctgttgctatctaagaactgcataccctcctccctgcttcttcccttgtgcctcatgtatgggcaggaggaaaggtgggagggggagtgggaatatgcgtgtgtgggtgggaatcggtaagaaatgcacctagcttttcatattgtgtttattctccaggctattgcttgcttcagctgcagcctgcctgtgctggctgctggggtcgataggcttttgtcgtaataggcagagatgacttgcatcccagctttccaccaaccaaattcaaacattcactgcttatttgttacagactgtaattattaaagtccctgagagctgttttctcccgttcctttttcgcatgcttggcctcctctctgtttctatgaaccacagaccacctaagcaagctgctgagtaagggctcactggaaacttgcagtcacaggatgtccaatctttggcagtccgagcttggctctaggacagagctgtccaatagaaatataatgtgagccccatatacaatttttacatttctaatatattttaaacaagtgaagttaatatgcatccaaaatatttcaacctgtaatcaacataaaattttaatgagatattttatattattttttggtactgaatcttcaaaatccagagtgtattttacacttaccgcacatctccattcagactagtcacatttttaagtgctcagtagccacatgtggctggtggctactggattagacagcacgagtctggaagatggaagctagtgcagaaacctcttgtttaaaaaacaaaaaaggcaagatgggcttgagcgattcaagaggcaactaaaaataaaattaggacccagcaccttgtttgacacacagtttgaccttcgattttcctcccttaacttccctcttcccttaatatctgtatacaagtgttgcttcaaagtaccaaggtcagaaattgattcagtacggtttactaaagtcatgtggaataaagccattggaaacaaatggaaagcctgtcgggacttctgggctcagaaccagctggctcacgcactccacttgtcagctggacttctgccttgtgaaatggaagcagcctttgttcctttctggctgagcaagctcctgaggctgggagagactaggaaggcttggtaggaggggaaaaaagtcaggaaaagatatcaaatcagaaacatggaagaagaagggaaccgatttgagttgggggcaaaactctaaaaattaaatct

SEQ ID NO: 89958 - DNA, 999 bp, Homo sapiens
cccacgcgtgggggcgtctcagctccagaaccgactccgctccgcactggccttggtcacaggtgcggggagcggcatcggccgagcggtcagtgtacgcctggccggagagggggccaccgtagctgcctgcgacctggaccgggcagcggcacaggagacggtgcggctgctgggcgggccagggagcaaggaggggccgccccgagggaaccatgctgccttccaggctgacgtgtctgaggccagggccgccaggtgcctgctggaacaagtgcaggcctgcttttctcgcccaccatctgtcgttgtgtcctgtgcgggcatcacccaggatgagtttctgctgcacatgtctgaggatgactgggacaaagtcatagctgtcaacctcaagggcaccttcctagtcactcaggctgcagcacaagccctggtgtccaatggttgtcgtggttccatcatcaacatcagtagcatcgtagaaaaggtgggaaacgtggggcagacaaaaatatgcagcatccaaggctggagtgattgggctgacccagaccgcagcccgggagcttggacgacatgggatccgctgtaactctgtcctcccagggttcattgcaacacccatgacacagaaagtgccacagaaagtggtggacaagattactgaaatgatcccgatgggacacttgggggaccctgaggatgtggcagatgtggtcgcattcttggcatctgaagatagtggatacatcacagggacctcagtggaagtcactggaggtcttttcatgtaactgcctcaaggaccctggactctgctcacccccccaccactctgcctggcctcctgctgaaatgatcccgatgggacacttgggggaccctgaggatgtggcagatgtggtcgcattcttggcagtgtatggttcaggaatgctgaatatgggaagcaggggtgcttgtgaccctaataaattccaagtcctcttccctgcc

SEQ ID NO: 89959 - DNA, 396 bp, Homo sapiens
cccttacagaaaatgtttgctaatatctggtctaaatatatcaattaaaatatagaaataatcatattggatagaaaagcaagacccgactactatatacagtctataaaaatctactttaaatatgaagatacaggtagcttagaaatagaaggatgggaaaaggtatattttgcaaagactaatcaaaagaaagttgaagtaactatattaacatgagaaacaaggaattttgtagcgataagggaggacattacatattgatcaaagggtcagttcacaaaaaggtataacaattctaaatgtatataaacgcagcagaacttgcacaaagcaaaaactgatagaacagaaaggttaaatagacaaacctaccattgaatctgagatttcaac

SEQ ID NO: 89960 - DNA, 1586 bp, Homo sapiens
ttttttttttttggggattataaagacatttatttaatctatgaaaataatgtacaataaatactttccccttttcctattattaaagaattttaataaataatctacagtctaaaacataaaaaaagaggaaaataggtccctctagttatttttaagaaagtccccctagagtttaattattcctgagatttcattggaaggagtctaccaaacggaatttttctgtgtgaatttttaaaagataaccgagtgcccaatatttttagaagaagaagaaaagggaggtggattaaacgctaattcagtaatacctgaatttttagcaaaacacataagtctatgcgactgagggtgggagaggctcgactttttccaagtagacggccaaggagcgcgggggggtccgaaggacggggagggagaaccaggttatggaactgccagggtcgatggcacagagcgtactggtgaaaaaatccagctcttcctcggaaaaagggaccgggctgtcgagagaaccctgtaggctaggggagaggcctccggatagctggagacaggagtcggccgcgaagaagttgaggtcggggaaggaaaggtgaatcctggcgccccgagaagacgtcttcctggcatgggcccgggctccatcccgccggccccgcgcagcgcgcatccgggactcgacgcgctttcgccctcttaagcgaacggctaaaggccgggggtccgcgcttaaggcccccggcaccacctccggcgggtgacagcaggcttcccacgccgcccgcgaggcggaggggccgcccgggctggccgcgggttcctcggcagggtcgcagatgtcctccagggctcccgggcaggcaggctccccatccggcggctctcggtgctgcgtctgccgcttgtgcttcatgcgccggttctgaaaccagactttgacctgcctttcggtgaggtccagcaaggccgcgatctcgacgcggcgtggccggcacaggtacttattaaagtggaattccttctccagttccagcagctgcgtgttggtgtaagccgtgcgcagcctgcgcgccccgccgccaccaagcctccggcagtcccaggccatctgcaggcgatccgaccccggaggccggaacggcggaggcggccggagaaggagacgtggcggattggctgggtttcttggcggatttcttctctttcatccaagggaactcgggggccgggggggcagcggggagtggcggcggcggtggcggcggcagagcaggcccatcttcggctcgcttttggctcctgggtctctgaagggtggaggcgccgggctggaggctggggaaggtttgctcgaaaggaggaggaggaggaattaatgtcgactccttgattgatgaagtttgaaatgtctccaagacagcggggaaggaagtcagacactcggcgagcgacggctggctgtttataaacccaatctccctctcaaattcaaaattcatggctttcaatggtgggggagggggctgctggggggggcgtcaggagggaggatcggaagggacccccccccggaattc

SEQ ID NO: 89961 - DNA, 7290 bp, Homo sapiens
cccaggagaggctgcggagccgcagccgcccagaccgcgcagcgcgggaggcaggttccgcacgtgggaggcagcccaagcgcactgagcgcgtggagcagttcctgaccattgcgcggcgccgcggcaggaggagcatgcctgtctccctggaggattctggtgagcccacgtcctgccccgccacagacgccgagacagcctccgagggcagcgtggaaagcgcttctgagaccagaagcggcccccagtctgcttccacagctgtgaaggaacgaccagcctcttctgaaaaggtgaaaggaggggatgaccacgatgacacctccgatagtgacagcgatggcctgaccttgaaagagcttcagaatcgccttcgcaggaagcgggaacaggagcccactgagaggcccctgaaagggatccagagtcgcctgcggaagaagcgccgggaggagggtcccgccgagactgtgggctccgaggccagtgacactgtggagggcgtcctgcccagtaagcaggagcccgagaacgatcagggggttgtgtcccaggctgggaaagatgacagagagagtaagttggagggaaaggcggctcaggacatcaaagatgaggagcctggagacttgggccgaccgaagcctgaatgtgagggttacgaccccaacgccctgtattgcatttgccgccagcctcacaacaacaggtttatgatttgctgtgaccgctgtgaagaatggtttcatggcgattgtgtgggcatttctgaggctcgagggaggcttttggaaaggaatggggaagactatatctgcccaaactgcaccattctgcaagtgcaggatgagactcattcagaaacggcagatcagcaggaagctaaatggagacctggagatgctgatggcaccgattgtacaagtataggaacaatagagcagaagtctagcgaagaccaagggataaagggtagaattgagaaagctgcaaatccaagtggcaagaagaaactcaagatcttccagcctggtcccgggcctgtccccacccagctgcctgtcctctggcaggtattggaaattgctgtgtctagaagcatctctgccttcacactcttgcactgcattagctgcaaggtgatagaggcgcctggtgcctcaaaatgtattggccccgggtgctgtcacgtggcgcagcccgactcggtgtactgcagtaatgactgtatcctcaaacacgccgcagcgacaatgaagtttctaagctcaggtaaagaacagaagccaaagcctaaagaaaagatgaagatgaagccagagaagcccagtcttccgaaatgcggtgctcaggcaggtattaaaatctcttctgtgcacaagagaccagctccagaaaaaaaagagaccacagtgaagaaggcagtggtggtccctgcgcggagtgaagcactcgggaaggaagcagcttgtgagagcagcacgccgtcgtgggcgagcgatcacaattacaatgcagtaaagccagaaaagactgctgctccctcgccgtcactgttgtataaatccacgaaggaagacaggaggtccgaggagaaagcggcagccacggcagcctcaaagaaaacagcccctccaggctccacggtgggcaagcagcctgcacctagaaacctcgtgccaaagaagtcttcttttgctaatgtggcagcagccacaccagccattaaaaagccaccctcaggtttcaagggcaccatccccaagaggccatggctctccgctaccccatcgagtggtgcttcagctgccaggcaggccggaccggcacctgcagcggcgacggctgcctccaagaagttccctggctccgctgctttggtgggagccgtaaggaagccagtggtaccttctgttccaatggcctcgccagccccaggacgccttggggctatgagtgctgcaccatcgcagccaaattcacaaattcggcaaaatatcagacgctccttaaaagagattttgtggaaaagttccttttttttattctgttcagagtcaatgacagcgatgacttaatcatgacagaaaacgaagtaggaaaaattgccctccatattgagaaggagatgtttaacttgtttcaagttacagataatcggcttacaagagtaaatatcgcagcatcatgttcaacttgaaggaccctaaaaatcagggactcttccatcgtgttctgcgtgaggaaatctctttggcgaaacttgtgagactgaagccagaagaacttgtatctaaagagctttccacgtggaaagagaggccagcgagatctgtgatggagtccagaactaaactgcacaatgaaagcaagaagacggcccccaggcaggaggccatccccgatctggaggactctccgccagtgtcggattcagaggaacagcaagagtcagcacgtgctgtccctgagaagagcacagcgccgcttctcgacgtcttcagcagcatgttgaaagacaccaccagtcagcaccgcgcacacctcttcgatctcaactgtaaaatttgcacaggccaggttccctccgcagaagatgagccagctccgaaaaaacaaaaattgtcagcttctgttaagaaagaagacttaaaatcaaagcatgacagctctgcacctgacccagctccggattcagctgatgaggtgatgccggaggctgtgcctgaagttgcctctgagccaggcctagaaagtgcttctcatccaaatgtggacagaacgtatttccctgggcctccaggagatggccatcccgagccctccccgctggaagacctgtccccctgcccagcctcctgtgggagcggggtggtcaccaccgtcacagtgtccggccgggaccccaggaccgctccaagcagttcatgcacagccgtggcctccgcagcatcccgcccagacagcacccacatggtggaagccagacaggatgtgccgaagcctgtcttgacttctgtgatggtgcccaagtccatactagctaagccatcctcatctcctgacccaagatacctgtcagttcctccgtcaccaaatatcagcacttcagaatcacgttcccctccagagggagacacgaccctctttttgtctcgactcagcaccatttggaaaggatttattaacatgcagagtgtggcaaaatttgtcactaaggcgtatcctgtctctgggtgttttgattacctcagtgaggatttgcctgacacaattcacattggtgggaggatcgcaccgaagacagtttgggattatgttggcaaactcaagtcttctgtgtctaaggagctctgtctgatccgcttccaccccgccacagaggaagaggaggtcgcctatatctctctctactcctatttcagcagccgtggccgctttggtgttgtagctaataacaacaggcacgtcaaggacctctacctgatcccgctgagcgcccaggaccctgttccatccaaactcttgccctttgagggaccaggtaagcgccggctttctgggtggaggtgaggcccacctgcacctgcacccctcctcccactgacatgccctgctgagtcctgaccagcccagggctctctgggagcaggagttaggagcacagacgcagcggttagcaataggattcatctttgagggcgtaggactgtggcacgagaagtacccctgattcacagcataaattgtcttaggagagttttttagagagggaaaaacccacagcctgcaaccagctcatcttggcctcaggtcagagaagactcagtgcccaggagcccaaggctcagccagaaagggaggtgacactcccagcggccctgctctttcctctagacagactcgggagccagcacacaccgggaagtggctccatcagggatcacttctctaacagggatggatttccaggagacttaacaataatgacatagaaaactatttctagaaataattattttaaaatctgcagctcaaattgtaatagttcattcatctttggcaagctattttgtgtttgcacgttccttggaaagtactgtatttaaacgattatttacaaatagcctaaaatacatctttgtcaagggttgagggtgattccaggggccacgtgctctgttagtgaccagctctttcatagccccttagaagaagctgatgtgacttcagttaggggttagtatctgatgcccaactgaagtgtctccgtggccatgcagtccccagaggattggtgttctctcaaagcgggtgtgtggatcacacagtgtcctctaaagtgcttcgtcataaaggcaggtgctgtctggaccctgtgcctcagtgccctctgtccctgtcaccaggcctcggcgggtgttcctgccatagctgtgcagggtgttcccacccacacccctcatgccgcaccctagctagctggggtcctgtaggggccactccacatcttgggcgggacttctgtcgccccaggcacagcccacgttcctactggagcccattcttcacagctggagtgggctcagcctatgcctgtgttgtggaattatatgtccataaagggattggttggtatcagtaatttcagggttaaatatttgctggcgtagtgcattaaattattttagtgccagataaatttttaaaagcaaagtgctttagtgtgtcccctcaaatcctacttgggataaagagatgccacctaatgggtggcagaaaggaccctggtagaggttcttggtgttgcttgtgaagagctctggccagctccacgtgaccagggagaggaaaagcccggccctcctggaggtgaagaccgagaagctggcctctccgcacctgtgaagacccactggtcagttgcaagtgcgacagtgtgtgcactcagtgcagacactgcagcacctcagcacctccctaccggggtggaaagagcactttttctttacagaaacatgattcttagatagcgagcctcccctttttaaaacaattgaagcgatatttcatcctttcttgagcttctctccctgctcatctccaaacttggagctgtcaggtgagcacaggttgtagggtgttgagcgagccccggcgcatgccgggcaccgggttccccacactgggcagtgacggggcccagggaggccaccagaggagcggcgcctccattctccccacagcaagggctggctgtgcaggtgcagccccggggcagagggaaaggacaggtctcccagcacctcccggatggcaccgggacaaggagggctgggctggggtcactcaccttgtctgctgagtgcgatggcaccaaccacccacactgtcagctccgcgaccagctgggggaacgtcacactcgcccaccaaggcacttgctgaggccacgacgccgcctgacggggacacacaaaagccccagggactttgatccacgataaagagcagaggcgtctgggtaaagtaacacagggcaagggactttagaaaagtaacagctagtgaaacctttccatacacttcagaaatgttttaacttaagacttcagtataatgttaacttctcctgatgtccttgttgacatgaatgcgtgtgcgtgaaatctcacacacttccatggtcactaaacagccttcaccccgggccaggccatcgggtactcggcccgcttcacgtactgattacttgacttggcgttttctagatataaacatgtacatgtgtgtcctggctttgtggtgtaaatgtgtagtgcgtgtgcatgtgcgcgcgtgtgtgtgtgtaaggctaggtcctggcacgtttcccctgtctcagcggaccctgtcctcacggagatagcccagaagcccttggacagcacaggccacacctgagggtgctgatggtggtgactccacagagctgtggtcaggggtgagcatgtgctgcgcagcttggagtcacgcccccagaagtgctgggtgagggtctgcaggacccagctccattccacagcctcagttctctgcggcacatgcagcacaggcctgaaggagacctggcgccccagccttgagctgcccgtctgcatcagggcactgatgtgggagcatcttcccctggggatgttaaggagaaggtcctgttgggggtagagattcacgcagaaaagagtgactgactcgtccgtgtgcctcagtttataccacacaattgcaggtgtccatgcctcccacacatggggacctagtgggttttgacagcgtggtgtccagtcctagccccctcagtgcttgctgttcacacttaagcaagtgaaggcctgaaggtgcccagctgtgccctcaggggaaacttaagtcacccgccctgtcagcacttggcccttgtcgggcagtgagagtggagctgcccccgcagcaccctcaggagccatgcagttcacagcagtagctggatctccctgaggacatttgtccttgcatatcttaatgatttgtccacagaaacaccgggttgtcttcctctgcccctctgccccgcagtgggggcactctctgtaactcagcatcacagtggggggcagctgggaggcctggttccaggtgaccttctccacctagatgttcaccccactcagttccagctttaccaacagggccccccgcaggaacttggggtcgcagagtcccggcctgtctcagggccttgttcatggaagggagatgagtcaggttgaaagctcatcgtgtagggttctgtgcggggcccttacaggactggaccgcagccaagatgcctgcctgttaaccatgcccagcccccgtcatttccgcgtgaagccgcaggcctcggagccttggtctgaaatgcctgtggagtaacctcggtccataaacatgggtgcacagtctgttctccccaagtacagggcaggaggaaacaccgccctctgtagctgctcgaatggaaagggctcttttctctgaggtctttatacattagaaagctcttctgggaagaatgtttgaatccatagtgtctttctgtattcacttttaattgctttctaaattagctgagaaattctgacttgaaatattgtcaggtaagcatttcttcagttttcatgtgtgtatgtaacagtagctttgcatggaaattgtaatcagagtcaaatacagtattgaatggaatgtactgccttctcctcctaaatcaataaacatctttcatgg

SEQ ID NO: 89962 - DNA, 2178 bp, Homo sapiens; identical to SEQ ID NO: 61076

SEQ ID NO: 89963 - DNA, 4563 bp, Homo sapiens
gctctggagttcccgggtcgacgatttcgtagggccggtggcggcggcggctgcggctacggccggagacggcagtgttggcggtagtggtgggtggcaggggcctgtgaccgggagctgcccccggacccgggcaccatgagccaaggccccccccacaggggagagcagcgagcccgaagcaaaagtcctccacactaagcggctttaccgggctgtggtggaggctgtgcatcgacttgacctcatcctttgcaacaaaactgcttatcaagaagtattcaaaccagaaaacattagcctgaggaacaagctgcgtgagctctgcgtcaagcttatgttcctgcacccagtggactatgggagaaaggctgaggagctgctgtggagaaaggtatactatgaagttatccagcttatcaagactaacaaaaagcacatccacagccggagcactttggaatgtgcctacaggacgcacctggttgctggtattggcttctaccagcatctccttctctatatccagtcccactaccagctggaactgcagtgctgcatcgactggacccatgtcactgaccccctcataggatgcaagaagccagtgtctgcctcagggaaggagatggattgggcacagatggcatgtcaccgatgtctggtgtatctgggggatttgtcccgatatcagaatgaattagctggcgtagataccgagctgctagccgagagattttactaccaagccctgtcagtagctcctcagattggaatgcccttcaatcagctgggcaccctggcaggcagcaagtactataatgtggaagccatgtattgctacctgcgctgcatccagtcagaagtgtcctttgagggagcctatgggaacctcaagcggctgtatgacaaggcagccaaaatgtaccaccaactgaagaagtgtgagactcggaaactgtctcctggcaaaaagcgatgtaaagacattaaaaggttgctagtgaactttatgtatctgcaaagcctcctacagcccaaaagcagctccgtggactcagagctgacctcactttgccagtcagtcctggaggacttcaacctctgcctcttctacctgccctcctcacccaacctcagcctggccagtgaggatgaggaggagtatgagagtggatatgctttcctcccggaccttctcatctttcaaatggtcatcatctgccttatgtgtgtgcacagcttggagagagcaggatccaagcagtacagtgcagccattgccttcaccctggccctcttttcccacctcgtcaatcatgtcaacatacggctgcaggctgagctggaagagggcgagaatcccgtcccggcattccagagtgatggcacagatgaaccagagtccaaggaacctgtggagaaagaggaggagccagatcctgagcctcctcctgtaacaccccaagtgggtgagggcagaaagagccgtaagttctctcgcctctcctgtctccgccgtcgccgccacccacccaaagttggtgatgacagtgacctgagtgaaggctttgaatcggactcaagccatgactcagcccgggccagtgagggctcagacagtggctctgacaagagtcttgaaggtgggggaacggcctttgatgctgaaacagactcggaaatgaatagccaggagtcccgatcagacttggaagatatggaggaagaggaggggacacggtcaccaaccctggagccccctcggggcagatcagaggctcccgattccctcaatggcccactgggccccagtgaggctagcattgccagcaatctacaagccatgtccacccagatgttccagactaagcgctgcttccgactggcccccacctttagcaacctgctcctccagcccaccaccaaccctcatacctcggccagccacaggccttgcgtcaatggggatgtagacaagccttcagagccagcctctgaggagggctctgagtcggaggggagtgagtccagtggacgctcctgtcggaatgagcgcagcatccaggagaagcttcaggtcctgatggccgaaggtctgcttcctgctgtgaaagtcttcctggactggcttcggaccaaccccgacctcatcatcgtgtgtgcacagagctctcaaagtctgtggaaccgcctgtctgtgttgctgaatctgttgcctgctgctggtgaactccaagagtctggcctggccttgtgtcctgaggtccaagatcttcttgaaggttgtgaactgcctgacctcccctctagccttctgctcccagaggacatggctcttcgtaacctgcccccgctccgagctgcccacagacgctttaactttgacacggatcggcccctgctcagcaccttagaggagtcagtggtgcgcatctgctgcatccgcagctttggtcatttcatcgcccgcctgcaaggcagcatcctgcagttcaacccagaggttggcatcttcgtcagcattgcccagtctgagcaggagagcctgctgcagcaggcccaggcacagttccgaatggcacaggaggaagctcgtcggaacaggctcatgagagacatggctcagctacgacttcagctcgaagtgtctcagctggagggcagcctgcagcagcccaaggcccagtcagccatgtctccctacctcgtccctgacacccaggccctctgccaccatctccctgtcatccgccaactggccaccagtggccgcttcattgtcatcatcccaaggacagtgatcgatggcctggatttgctgaagaaggaacacccaggggcccgggatgggattcggtacctggaggcagagtttaaaaaaggaaacaggtacattcgctgccagaaagaggtgggaaagagctttgagcggcataagctgaagaggcaggatgcagatgcctggactctctataagatcctagacagctgcaaacagctgacttttggcccagggggcaggtgaggaggatccgagtggcatggtgaccatcatcacaggccttccactggacaaccccagcgtgctttcaggccccatgcaggcagccctgcaggccgctgcccacgccagtgtggacatcaagaatgttctggacttctacaagcagtggaaggaaattggttgatactgacccccaggccctgcagtggggctgactccagatctctcctgccctccctggcagccaggaccagcacctgtagtcaccccaccacacgcagactcatgcacgcacacaggagggaggcctagctgctcagaggctgcagggagggcccaggagccggctgggagggtggggtccctttgttgccaagacgttaggaaagcgaggaaagtgcttggattaggagggtcttgtgggcccctggccagccttcctgcctcagctcccctgctgtctccaggggcaggtggtaggcatgggtacctgcatttcactggagtgggttcttggatctctgaggggaaggaacagcaaaagaggcccttcttcctcacccaagatgcagggtggttggggccaggagtttggaccctctaggtcttgggggaagagctgggtaatacctggtgtctgagtgattctctgcagacccttcccctcctcaaggatcacccatcctcctttcagccccctttatggggaccaggcagctctggagccagccacaggggctgttagagaagcaaggcctggagtggcctgcaccgagtagcagggtcagggttcgtgtgctcctcctcctgctgcaggggctgcacatcccattgccccacttctgctttgtgtctccctctgtctagcttccagggcagggagcaggccccacctagggctgcaggcagtctggcctgtgccagcacggtctcctgtgcccaccagccccacaggtgctgtgctttgtgctcttggctgctgtgctgggacagaatgggatgccaggaagagaagaaagggggtgcagtctgaggccaccaccccccttcctatctaagggagggctgaagacaaggggccggcattcagtgggcagcagaaaggagaggctccttgaagctgctcagtcagaggcccccgtccctccttttgccttccgcaggactgaagacctgaaggggctggcttttggagtgttgaggtgaatatctgggagcagagatcatgaatagctcagggcagtgaatggcgcaccaagagcagggctgtgtgtgggaggctgcagccaggattgcctcagctcctccccctcaggctgggaggatagcacaggctaggggctcggggtggagggtctcagctctgctgcccccaccccagtactagcctagcttcccaagctgtggcttagaggatagttggcttcctgcctctctcctctaaaatagcaagtctgggaaatcctggggtgagtggagtcaccccactcccagttgctggcagagactgagactaaagcatcacttaataaaccccccaagccccaaaaaaaaaa

SEQ ID NO: 89964 - DNA, 1887 bp, Homo sapiens
aaggttggggtgaaaggacgtatttcacttcttccccatttttccccaagtcagaaatcatcagaagccacaagaacaagcccagatccaaaactgaacccaaacaagtatttttgttttctaagatatataaccttgaatatacccccaggcttttcaactatctttcacctatctcttcaaacaaatatgtccacctaatattgttaaccgtttatatatagcttttaatttgttatttcttcaaaccaggaattattttaaatctttttttttccaaaaggatagttttatttttgggatacccttttactttgttgtcatttttattctattgcattataagaaaagtgtgagaccttatggcttctgcttattgggcaatatgcaatataatattgtgtgttgttaaaatttatgcatagtatattatattacatttgccatctactatttgcttttcatgttccttattttgtcctctaaatttatctatctaatgtgtgtatgtctgatttgttttaccttctatttaatatttttatttataaatataccacagggtggattcactcattctattgggtgggacattttgggtaatttctcatgatctctctcctattttcaatggcccaaacaatggattccctggaacaggatttacgtgtacctactttttctatgaattcaagttttctctaggatgggtgcctaaaattattattgcttgaccacaggttgtacaattttctgctttgccagtatccccagattgaacccaaaggtgtcataataatttataaattctcatcagtagcttatgagaattttccccacatctttgccaatacttgattttttttatttttgccactttgatgggttgtataacatctttttttttttccacatgtccccggaagaaagacatgtatccttcagattgaagaaacttgagtcccgtggaaggataagcagactgacagcagatctctcagtggcaattatagaggtcagaagacaatgggatgacatcttcaaagtactcccaggcaggctgccctgaggcccccatgcccatggggaccatgagcatcagcagttgcccacatcagcagggtgtttgccccctgccataaataatttgaaagccaagaataacttccatcccaggggtagaatgggttgtgaagccaatgaagtcccaggagccgaaggttgttcattcaagtttaaactcctccttggtcacttcttctttggggttggcctgatcttccttttcaatcttagggctggggaacaaaagggaagagatggtgttaccagaacctagaagctttgacgggggaccccccacggctggcgcctggccctctgagggggctgctgcgcggctgttgcttggacttctgagggggacgctgcttggctggcggtgggccggacctctgggcggggacgtggctgacgctcagacctcggaggggaccgtggctgacgctcagacctcggaggggaccgtggctgacgctcagacctcggaggggaccgtggctgacgctcagacctcggaggggaccgtggcttggctggcgctctgaccaccgcggggggcgcagctgggctgttgcttgggcctctgagggggcttggcacggcggctggttctggtcttctggcaggcgcagcagatccagtcctcctctttcttctggtagaagcagccgctcttacagatgctgtatttccgatccactatctccttcttggaattgaggaaggtgaacggcgggcagcagtgtatgctgaagtgttcggagtacttctggtttttggagagtctgggaccctccttggccggtttctgactcatctcactgt

SEQ ID NO: 89965 - DNA, 6191 bp, Homo sapiens; identical to SEQ ID NO: 60890

SEQ ID NO: 89966 - DNA, 3309 bp, Homo sapiens
atggcggcgggcggcgcggagggcggctcgggccccggcgccgccatgggggactgcgcggagattaagtcgcaattccgcacgcgcgagggtttctacaagctactcccgggcgacggcgccgctcgcaggtcgggtccggcttccgcccagactccggtgccgcctcagccaccgcagcccccgcccggccctgcctccgcctccggtcccggcgctgcaggccccgcgtcgtccccgccgcccgcaggccccggacccgggcccgccctgcccgccgtgcgcctcagcctcgtgcgcctcggggagccggacagcgccggggccggggagccgcccgccacgcccgcggggctgggctcggggggagaccgcgtctgcttcaacttgggccgtgagctctatttctacccaggctgctgtcgtcgtgggagccaacggtggcatacaccattaactccttttctcccacccctcaagtccattgacctcaacaagccaattgacaagcggatctacaagggcacccagcccacctgccacgatttcaaccagttcactgctgccaccgagaccatctcgctgctggtgggcttctcagcgggtcaagtgcagtacctggatctcatcaaaaaggacaccagcaagctgttcaatgaggagcggttgatcgacaagaccaaggtgacatatctgaagtggctgcctgagtcggagagcctgttcctggcatcacacgccagtggccacctgtacctgtacaacgtcagccacccctgcgcctcggccccgccccagtacagcctgctgaagcaggtcatggggcttctctttctatgctgccaagagcaaggcaccccgcaacccgctggccaagtgggcggtgggtgaggggcccctcaacgagttcgccttctcgcccgatggccggcacctggcctgtgtgagccaggatggctgcctgcgcgtcttccacttcgactccatgctcctgcgtgggctcatgaagagctactttgggggcctgctgtgtgtgtgctggagccctgacggccgctacgtggtgacgggtggcgaagatgacctggtcaccgtgtggtccttcaccgagggccgcgtggtggctcgaggccatggccacaagtcctgggtcaacgctgtggcctttgacccctacaccacaagggcagaggaggcggcgacagcagccggtgctgatggggagcggagcggcgaagaggaggaggaggagcccgaggctgcgggcacaggctcggccgggggcgccccgctctctccactgcccaaggctggctccattacttaccgctttggctcggcgggccaggacacgcagttctgcctgtgggacctcactgaagacgtgctctacccgcacccccccctggcccgcacccgcaccctccctggcacacctggcaccacgccaccggccgccagcagctcgaggggtggcgagcctggcccaggccccctgcctcgctcgctgtcccgctccaacagtctcccgcacccagctggcgggggcaaggcgggcggcccgggtgtggcggcagagcctggcacaccattcagcattggccgcttcgccacgctcacactgcaggagcggcgggaccggggggcagagaaggagcacaagcgctaccacagcctgggcaacatcagccggggtggcagtggcggcagtggcagtggtggggagaagcccagcggccctgttccccgcagccgcctggaccccgccaaggtgctgggcactgcgctgtgcccgcgcatccacgaggtgcccctgctggagccccttgtgtgcaagaagatcgcccaggagcggctcacagtcctcctgttcctggaggactgcatcatcactgcctgccaggagggcctcatctgcacctgggcccggccgggcaaggcgttcacagacgaggagaccgaggcccagacaggggaaggaagttggcccaggtcacccagcaagtcagtggtagagggcatctcctcccaaccaggcaactccccgagtggcacagtggtgtgaagccatggatatcgggcccccccaaccccatgcccccagcctcctagccataaccctccctgctgacctcacagatcaacgtattaacaagactaaccatgatggatggactgctccagtccccccacctgcacaaaatttgggggccccccagactggcccggacacgggcgatgtaatagcccttgtggcctcagccttgtcccccacccactgccaagtacaatgacctcttcctctgaaacatcagtgttaccctcatccctgtccccagcatgtgactggtcactcctggggagacactccccgcccctgccacaagagccccaggtctgcagtgtgcccctcagttgagtgggcagggccgggggtggtccagccctcgcccggcccccaccccagctgcccttgctattgtctgtgcttttgaagagtgttaaattatggaagcccctcaggttcctccctgtcccgcaggacctcttatttatactaaagttccctgttttctcagcgggtctgtccccttcggaggagatgatgtagaggacctgtgtgtgtactctgtggttctaggcagtccgctttccccagaggaggagtgcaggcctgctcccagcccagcgcctcccaccccttttcatagcaggaaaagccggagcccagggagggaacggacctgcgagtcacacaactggtgacccacaccagcggctggagcaggaccctcttggggagaagagcatcctgcccgcagccagggcccctcatcaaagtcctcggtgttttttaaattatcagaactgcccaggaccacgtttcccaggccctgcccagctgggactcctcggtccttgcctcctagtttctcaggcctggccctctcaaggcccaggcaccccaggccggttggaggccccgacttccactctggagaaccgtccaccctggaaaggagagctcagattcctcttggctctcggagccgcagggagtgtgtcttcccgcgccaccctccaccccccgaaatgtttctgtttctaatcccagcctgggcaggaatgtggctccccggccaggggccaaggagctattttggggtctcgtttgcccagggagggcttggctccaccactttcctcccccagcctttgggcagcaggtcacccctgttcaggctctgagggtgccccctcctggtcctgtcctcaccaccccttccccacctcctgggaaaaaaaaaa

SEQ ID NO: 89967 - DNA, 3509 bp, Homo sapiens
ttttttttttttgacagatcttgacaatgtccttttaattgtactcttttcaaaaaatctcctttctcagttaaaaaaggacaaggcatgatgaagacctgctctgagcccattactgggcggtgatctcggtcctgggggaggccaggccgggactcttccaaggcctcctccctgggcagtcccagcaatggggccagtggcagggcaggttctccctgccagaacccgatcctagcccttcagaaggactggacctctgtgtcccttcagtgggaagccaccttggacacacgcagtcattcaggtggacataaggccactcttctcgcccttgaccttgaggaactcagccatgctggagaaatacttctggttggcctcagccaccttcttctctgccgcctgtgggttcacaatctccaggccctggagtggggtgaaggccacgctggaggccgtgcccgaggagcggtcgcggatggtggacttcccgccatatacgacgctctgcttctgcagggtccgctgcagcgtcttggagatcctggccttggtggcctcgtttacctgtgtctgccgcacacgcccactgcccgacttgcccaggtggcccaggctgaatcccaggtcctcctggtaggcgtcctcctcgatctctccgaagctcatacggttggcctgcttccggatctccgtcagccccagccgctccttcatcttgcggtacctgcggccgcctcgcttcttccgctgtccatccaggggcgcaggcagcggcttcacctgcttcacaggcggcggctcctgccacttgtcgaatttgcgctcgatctcatccttcagttcgtagcccaccttcccttctgtgctctcgtggaaactgtccacacgggctgccagtgtgcacttggcggccaccagccgggccgctttccgccgcagatcctggagcaacggaaaacgggggtggaatcggtggcagggactgcacgatgtcactgtggtagatgtagccggtgtggggcagcactgaggtagacgagaagcccgacagcgtcttgcgctgggccccgagcagcatgatgttgcaggcgggcatcttggagaggttggtcaggccgccggccacacccatgatcttggcggccgtggatgccccgataatgatggacaggttgggtgcgatgaaggacatccgggactccacatactcgtagatgcggtgcttggaggcgttcagctccagcgccatgtcgcaggcctcctccagccgctccagctcctcctccgacagctgctgcccctgggtggtggaggcggtgacgctgacgaccatgatggtggcattggtgaggatctgctgcaggttctcattgttcttgcacttgtccaggctgttgcccagctccttgaccgtgcggatgtaatccagtgcattggggaccaaggactccagttcagggaatctctttgagtacttatcccggatgaacttatggatgatgttcagctcgttttcgatctccacggtcaggttgttggcatccacgatgacgcggtattcaggcgcggcctccactggtcccatcacttctgaagctttggcttgcttgctgatatactcctcaatcttcatcataatctcagcaaacatcttactatcccatagcttggcgatggtcttgactgaatccccggaaagatccagctgtgtctcctcctgcacatcctcgatcgctggctcctcttcttcctccccatagcttcctccttcctcctcttctgctgcctcttcgagatcagctaagagctcatctgccagagacatcccgaggcctctcctctccgcgcaccactgtttctagcgttagtcgctcaccgatgacgtctcactctcgcgccgttatagaggcaaagctcactctctgattggtccccgctcgcgatgttcctggccgcatttgaaacaacaactttattagcacctggcactaggcggagagaagcggtaagccgcgaggaggaaagggactcacgtcccgctgtggaccgatcctgctaagcagagaatcgctgtggccggacgacggggcgtcgagacaagaagaaagacgttggcaactcagaggactggttgcggcgttagacaagaaagcaaggcctttaagcagggattcggggtggacgtgggggtgggccgaagcgaagccggaaacaggaaactacaactcccacaaggcctagggccacgtcccgccgtcctcggctgctgagcctgatgggacaagtagttttgcgaacggcttaacctacagattgaagaggtcggaagctctgaggcccggggcttccggaggtcgcggagatggaattggagcagagagaagggaccatggcagccgtgggctttgaggagttctcagcgccgccaggctcagagttggcgttgcctcccctatttggtggccacatcctggagagcgagctggagacggaagtggagtttgtgtcaggtggtctgggcggctcagggctccgggagcgagatgaagaggaagaggcagcccggggtcggcggcggcgccagcgggaattaaatcgcagaaagtaccaggcactaggtcggcgctgccgggagatcgagcaggtgaacgagcgggtcctgaacaggctccatcaggtgcagaggataactcggaggctgcagcaggaacggaggttcctcatgagagtgctggactcctacggggatgactaccgggccagccagttcaccattgtgctggaggatgagggcagccagggcacggatgcccccaccccaggcaatgcggagaatgagcctccagagaaagagacactgtccccgcccagaaggactcctgcacccccagaacccggcagcccagcccccggtgaggggcccagtgggcggaagaggcggcgagtgccacgggatggacgccgagcaggaaatgcgctgactccagagctggccccggtgcagattaaggttgaggaagactttggctttgaagcagatgaggccctggattccagttgggtttctcggggtccagacaaactgctgccctacccgaccctggccagcccagcctctgactgacgcatgcccaataaactgaccccacactcaccccggccactgtgtacttgttcccacctctgatcacacacatgctcacgttcgggggttggttttcacatttttattgggagccgtgggagggcccgcctctgtcagtggaggtgctcacagtttcttcagccactccaggctggggccctgagggtcctgggggtggctgggcacgtcgggcatgttcccatcatcacggacgggcactgtaatcccagcactttgggaggccgaggtgagtggatcacaaggtcaggagatcgagacaatcctggctaactcggtgaaacgccgcctctactgggtagttgtaggcgacaatcgtcgacacgggaataccggactg

SEQ ID NO: 89968 - DNA, 4398 bp, Homo sapiens
gcaactacaaccagttttatgaaaaagctttataaaaataagctttaagaaacctcatttcttctatttaaaaaaaaagcctctttcagtgcaagtggggtgccaaggatgtagaataaataagagggggccaggatcagtgcacagggaggaagcgctcacggacgctccgctccagcccgggcatcctggccacgcgcagcgcctggcagcagccgcaccagcagcgccccgtcctgcgcccccaggagctccgtgagcccgccgacgcaagtttcagctgcaaggccgcgcggcccgccttttggtgtcggaccccagccctccggggcctcgagggcctgcagcagccgctgcagccctcttgatggagatgtcctggaaagccacaaagtcgatgacggcacgctcacacttccttcagctcctggtacccttggttgcttgagggggaagccagtgcaacttggtgcacagggtgtcatgggaggaagagccttggcacatttgagggccaggcccagggccgtgcaagttgcggtggggctggcactgcttctgagctggagcttgcttggctgagaaaggtgcctggggggcacggctggcactgcgtgttctggactgggggtgcccggggcaatcacgccggcaccaggtggacacgatgcgtgctccaagcagaaaccagcgtgcgcgaagaagccggtgcggcagcggcaggcacggttgtgggtggcgtggcaagcccgtgcctcctcctcacgctccccgcagaggacgttgcagtagcggcagcgctccaggtagttccagaactgcgtgtagtggcgcggtggacacgggccacacgtcgtggggctgtctcggcggcacggccgctgcacaaaggtgcctggggggcactgggcgcacaccagccgctcccctgtctctgcgtcccgccaggggtaggtgggtgtttctgccactccgcgtacagccggcaccggcagcagggcaggcagcgccaacaccaggcacagcagcgacaggcctggcccctccagcgccctcatggtccttgtggggctctggccagaagacctgcatgacgctctgcttcctggaggcggtgtggcaggctgggcacatcctagaggcctgaaggtgccgttgccagcaggcttggcagcgctggaagtcacaggcagggcactggaagggcaccacgtcctctgccccacagccctggcacacacagcctgctgagaggggcccgcccggagctcccgtggcctgctgcccagcgatgtctctcccatgaggctcaccccactcagatgctgcaggcccgtggggaggtcctgaggactggctgggacctgcatcctcaccgcccgcccccacagtccctgctggcctctgtctaaggaaggacgagatcttgctctgggtcttcccggtcttctcggaccgtgaggggcctggttggggagccctgtgggtaagcacaggaggcacggcaagcctctcctcctggggtcccggtggctccatgcccgggtagggccggccggtcaggtctgtgcacgtctgtgagaagcgctgcttgtggtgtggacgcacaaacatgctgaacctgtgcagcagggggaagtcctctggctttgcagtggtcagggcggccaacacagccagcaccttgtcgaggtcgtcgtcttgcttataggctgtcagcgctgccaagagttggctacagcccgcggaccccagggccctgcgggcatcagccaggtaggcgctcacggcgtgctggccctgcttccctgctctgggcactccagacccccactgtggttggctgccagggtctcctgttgggggtggcctgggcgacaggtggggcctgccctggttcaggtgctcttgggggtccagctgctgggctgcagccgtggacacggtcagcttgggatccggcgccgttcttccagtggggtccaggaccggctgtgcccgctgccttcggggaatgctgtgctcaggccgatagccacagcctcgtcctgtcagctggatacagacctcctcaaactgctgcttatggtggggccgcacaaactggtagaagccttggagcaggttgtgcttcttggggtcctcagcaaagagggggccgagacaggcggccagggcggtgaagtcatcggaacccttgtagtcctgcagggcctgggtgaaggtggcaaagttggcttggctcaactcctgcttcacggccaccatgaagagcttggccctgtccgtctgtgcaccagccacgggctcctccgggtggctgaccagccggatcttcttcctccctcctcgcggttcttctgccggcctcttctcagacaggagggacagggtggagcagctgtgggcctgctcctcgccggggctccccgcccgctgttcgctgtgctccagggcggccagcagccccctgggcctctgccgggcaggaactggctcctgctcatactccacacacaggctactctcggggtccccggcagctggtgaccctgaggacctctgcttcaggctggggacatgcaggtccagactcttagctttcctggtggagaagaaggggccaggcgacttggcctcgctgacagcatcttctccacgcacactgggtgctgtagcccggggggccggtgctggcatagttcgctcggcaacacggaagaactgggccacgtctcggatgacatggccaaagttgtcatacaccctgacgtggggacgcacccaggagggcagttgggctcttgcgtcggcaaaggcgaacctgtggtcacagaggaagacagctccgtagtcctggcggtgccggatcactcgcccgatggcctggttcacagccctggacgcctgctgccggtaccactcctgcccagagaggaactggcccccagccccaccctggcccttcatctcgtccaggaactgcatcttgaggacaacccgggggtccatgcgtggggggtacgggaggcccgtgacaatcacaccacggccattcgtgtctgagaagtccagcccctcgctggccttgccccggcagaccgccaggaaggtggcgccggtggacccaggggcggcaacccttgcatagtaagcactgatggtctcggagaagctgcctttgctcctgggctccacaaacagcggcttcagcgcctccatcttcctggccaagtcgcgggcccgccagaactccaggctcttctccatgacaggataggaagggaagaagatcaggagcccatagggcaccacgcgggcgatgttgcccagagccttccccagggaggataagcactcctcggaaaaccgtctgtcaaacgcggagctcaactgggctccatcggggcctctggggacgacccccacccagatctggtgcttgtcgatgatgtgtgggttctccaggcagactgggaaagggatctgcatctccagagcaaaggaggacaccggggccagcgtgccgctggtaaggatgagggagcggacgccctggcggaccagctcgtgcatgctgtggccgggactgaagcaccagtagctcagcaccttccctcgctttctggctgcagtggtgctccaggcatcagaccgctgagccgtcctccggtgaccagcatcaggatggatgtgcaccttataggactgtaaggcccccagccctgctggggaaccagggctgccctcggaggggtccacactgaacacaatctggataatgtccgccagcttctgcagtccggccgtgttggtgaacactccagcacgtcctgccaggtgctggatgatctggtccagcgagtccaggatgcagcccttggtctgaaacgtgatctgggcttcagcaaacagctcaaagatgtagctccctggcttggtgacaccgctgtcgtctccaggcagacctcctaaccgcatcgatggccccctccaggcgcagcaggatcatcttcagctttgcaatgtcttccagctccatgttcagccctgggctgggggagtccgcgctgaactccgggtggggctcaccctgctgcgctgccttggtctgctcctccagcacctggtctatgacgtccagtcctgaagccaggtcatggggagtcaggtcaaaggatgccgattcttcacacatcttctcctagagcccaagcacacccgaatctccacagaacaggacaggatcgggggttccagaaagcagaaatggggtgggggtgcagaaggcacaggaggctgacagccaagttcccaaagccttggcctggggtctgtaaaaggccacaagtaggtccaaacatgactgtgtggcccacaccaatatttagaaacgat

SEQ ID NO: 89969 - DNA, 411 bp, Homo sapiens
cagggtcagagtcttggagacattttggaggtcaggaaagaaagtcgcggagagggacccttcgaatgggagcccaccctgtcctccccaagtccggccacagacgtcggcatctggggggctccttcggctggtctggggtgacctctctccgcttcacctggagcattctcaggggctgtcgtgatgattgcgtggcgggactctgtcccgctccaaggcacccgctctctgggacgggtgccccccggggtttttggactcctgggggtgacttaccagccgtctgcttgcagttggacttcccaggccgacagtggtctggcttctgaggggtcacgccacaatgtggggtacgtgggaggccagcagagggctccatgagaagggcaggacagggccacggacagt

SEQ ID NO: 89970 - DNA, 4565 bp, Homo sapiens
  misc_feature (1)...(4565): n = a,t,c or g
cagaattctcaaagctgacggatcggtggcagaatgctgtccagggtgttcggcagaggaagggtgacgttgatgggctggtgaggcagtggcaagatttcactacttctgtggagaacttgtttcgcttcctcactgacaccagccacctgctatctgcagtgaagggccaggagcgcttcagcctataccaaaccagaagtctgatccatgagctgaagaataaagaaattcattttcaaaggaggcgaactacctgtgccctaaccttggaagctggagaaaagttactgctcacaactgacctgaaaactaaagagtctgtgggtaggagaatcagtcaacttcaggacagctggaaagacatggagccccagctggcagagatgattaagcagttccagagcactgtagagacctgggaccagtgtgaaaagaaaatcaaggagttgaaaagcaggctgcaagttttaaaggcacaaagtgaagatcctcttccagagcttcacgaggacctccataacgaaaaagagctgattaaggaactagaacagtctttggctagctggactcagaacttgaaagaacttcaaactatgaaggcggacttaacccggcacgttctcgtggaagatgtgatggttttgaaggagcaaatagagcatttgcacagacaatgggaggacctctgcttaagggtggccatacgtaaacaggagattgaagacagactcaatacatgggttgtattcaatgaaaaaaataaagagttgtgtgcctggctggtgcagatggaaaacaaagttctacagacagcggacattagtattgaagaaatgattgaaaagttacagaaggactgcatggaagaaataaacttgtttagtgaaaacaagttacagttaaagcagatgggtgaccagttgatcaaggccagcaacaaatcaagagcagctgagatcgatgacaagctcaacaaaattaacgatcgttggcaacatctttttgatgtcatcggatcaagggtgaagaagctgaaggagacctttgcttttattcagcagttggacaaaaacatgagcaaccttcgcacctggttggctcgaattgagtctgagctttccaagcctgttgtttatgatgtctgcgatgatcaagagatccagaagaggctcgctgagcagcaggatctacagcgagatattgaacaacacagcgcaggggtggagtccgtgtttaacatctgtgacgtcctactgcacgactccgatgcctgtgcaaatgagaccgagtgtgactcgatccagcagaccaccaggagcctggacagacgctggaggaacatttgtgccatgtccatggagcggcgcatgaaaatcgaggagacgtggcgcctgtggcagaagtttttagacgactattctcgctttgaggactggctcaagtcagctgagaggacggcagcctgcccaaattcctcagaggtgttgtacacgagtgccaaagaggaactgaagaggtttgaggcctttcagcggcagattcatgagcggctcactcagctggagctcatcaacaagcagtaccggcggctggcccgggagaaccgcacagacacggccagcaggctgaagcagatggtccacgagggcaaccagcgctgggacaaccttcagaggcgggtcacagccgtcctgcggagactcaggcatttcaccaaccagagggaagaatttgagggcaccagggagagcattctggtgtggctcacagagatggacctgcagctgaccaacgtggagcacttctcagagagtgacgccgatgacaagatgcgccaactgaatggcttccaacaggaaattacattaaataccaacaagattgatcagctcattgtgtttggggagcagctgattcagaagagcgagccccctggatgctgtgctgattgaggatgagctggaggaactccaccgctactgccaggaggtgtttggaagggtctcccggttccaccggcggctcacctcctgcactccgggcttggaagatgaaaaggaggcctctgagaatgaaacagacatggaagaccccagagaaatccagactgattcttggcgtaaacggggagagagcgaggaaccgtcatctcctcagtccctgtgtcatctagtggccccagggcacgagcggtctggctgcgagacccctgtcagcgtggactcccatccccctggagtgggaccacacaggcgacgtggggggncctcctcctctcacggaagaggacgaggagggcccatactacagcgcactgtcaggtaaatccatttcggatggccactcgtggcatgttcccgacagcccttcctgtcccgagcatcactacaagcaaatggaaggtgacaggaatgttccacctgttccccctgcgtccagcaccccttataaaccaccctatggaaagctactattacctccaggcacggatggtggcaaagaaggcccgcgagtcctgaatggcaacccacagcaggaagacgggggactggccggtatcacagagcagcagtcaggtgccttcgacagatgggagatgattcaagcacaggagcttcacaataagctcaaaataaaacaaaatttgcaacagctgaactctgatatcagcgccatcactacttggctgaaaaaaactgaagcagagctggaaatgttaaagatggcaaagcctccctctgatatccaggaaatagaactgagagtgaagagactgcaggagatactgaaagcctttgacacttacaaggcattagtggtctctgtcaacgtgagcagcaaggaatttctgcaaaccgagagccccgaatccacagagctccaaagtagactccgccagctgagcctgctctgggaagcagcacagggcgcagtggacagctggagagggggcttacgacagtcgctcatgcagtgccaggacttccaccagttgagtcaaaatctgctgctgtggttagcgagtgccaagaaccggaggcagaaggctcatgtcaccgatccaaaggcagacccccgggctctcctagagtgtcggagggaactaatgcaactggaaaaggagctggtagaacgtcaacctcaagtggacatgttacaggagatttcaaacagccttctcattaagggacatggagaagactgtattgaagctgaagaaaaggtgcatgttattgagaagaaactcaaacagttacgggagcaagtgtcccaagatttaatggccttgcagggaacccagaacccagcctcacccctgcccagcttcgacgaggtagactcgggggaccagcctcctgcaacatccgtgccagctccccgagcaaagcagttcagagcagtgagaactacagaaggcgaggaggagacagagagcagggtccccggcagcacacggccacagcgctccttcctctcaagggtggtccgggcagccctacccctgcagctgctcctcctgctgctgctgctcctggcctgcctgctgccctcctccgaagaagactacagctgcactcaggccaacaactttgcccggtccttttaccccatgctgaggtacaccaatgggccaccccccacatagagggcatagctggccacagtgctacaccacctgcctgattgccaagggtgcccagcacgtggccccagaccaatctgagtgacttagtgttggcaaggtcccgggacctgtgcagacttcttctgggcttacccagcacgggctccctggagcccagggcagctttcagattgtgttcctccccaggagcagggaacctgtgtggcaggtgccccgggtattttggcagaactagttgattagtttagggatctctggaaatgtcagtttcctgaagagccaagcactttgtgaattctggtttgtttgtaaaacagcattattataatgtaggtatggtcaatgagcagtggtgtccatcacatatattatagaagcaagcgaggacattccaccctagaaatggttcagaaactcataggcacccttagctgatggaaacaatcaatcatatttaatacgcttagaatcagttttactccaatcagctggcaattttgagctgccggttatacaccaaaatgttctgttcagtacctagctctgctcttttatattgctttaaatttttaaagaaattgtattgcatggatgtggttatttgtgcatattttttaacaatgcccaatctgtatgaataatgtaaacttcgatttttttttaaaaaaattagattttagctggagcttttgactaatgtaaagtaaatgccaaactaccgacttgatagggatgtttttgtaagttaattttctaagactttttcacatccaaagtgatgctttgctttgggttttaactgtttggccacggcgggggtgggggcggggggttggtacaaaaacttgaagctgtttgtgatatgtacaactcagatgtttctcattaaaaaacaaaattagccagaaaaaaaaaa

SEQ ID NO: 89971 - DNA, 2180 bp, Homo sapiens
atttgtctggactgattacttggtagaaagccccggagcgctgggtcagcatcatccgtgactgactgaaaaggcgcgagaggagtcttccccgctgcacagaggcgtggctgaggctcggcggcgcccagggtacccaggcccggcccggaataaggacatcctctctggccccgctccgctcacggagtcagatggcggcggccgagctgacggccccggcccagggcattgtgacctttgaggacgtggctgtttacttctcctggaaggaatggggtcttcttgatgaggctcagaaatgcctgtaccacgatgtgatgctggagaacttgacacttacaacctccctgggtggttctggagcaggggatgaggaggcaccttatcagcagagcacttctccacagcgggtgtcacaggttaggattcctaaggcccttccttctccccagaagaccaacccctgtgagatatgtggcccagtcttgagacagattttgcacttggttgaacaccaaggaacacaccatggtcagaaactgtatacagacggggcatgtaggaaacaattacaatttactgcataccttcatcagcaccagaagcagcatgttggacagaaacacttcagaagcaatgggggcagagacatgtttttgagcagctgcacatttgaagtatctgggaagcccttcacttgcaaggaggttgggaaggatttcctggtgagatcaagatttcttcagcaacaggctgctcacaccagaaagaagtcaaacagaaccaagagtgcagtggcctttcacagtgtaaaaaatcattacaactggggagaatgtgtgaaagctttcagctacaaacatgtacgtgttcagcaccagggagacctcattagggaaagatcttacatgtgcagtgaatgtgggaaatcttttagcacaagctgtagcctcagtgatcatttgagagttcacacttcagaaaagccttatacatgtggagaatgtgggaaatcctataggcagagctctagccttattacgcaccgaagaattcacactggagtaagacctcatcaatgtgatgaatgtggaaaattatttaacaggaagtatgaccttcttatacatcagagagttcatactggagaaaggccttacaagtgcagtgaatgtgggaaatcctttagccatagctctagcctcattacacaccagagaattcatactggaatgaggccttatgagtgcagtgaatgtgggaaatcttttatccatagttctagccttattacacaccagagagttcacactggtacaaggccttatatgtgcagtgaatgtgggaaatcctttagccagagctgtcacctcattaaacaccggagacttcacattggagaagggccttatgagtgtagtgaatgtgggaaattgtttacttatagatctcgtttcttccaacaccagagagttcatactggagtaagatctcatgaatgtcatgaatgtggaaaattatttagcaggaaatttgacctcattgtacatgagagagttcacacaggagaaaggccatatgagtgcagtgaatgtggaaaatcctttacctgtaaatcctacctcatctcacactggaaagttcatactggagcaaggccttatgaatgtggggagtgtgggaaatcatttactcatagctctacgctccttcaacaccagagagttcacactggagaaaggccttatgagtgcaatgaatgtgggaagttttttagccagagctccagcctcattagacataggagaagtcacaccggagaaaggccttatgagtgcagtgagtgttggaaatcctttagtaaccactctagcctcgttaaacaccgaagagttcataccggagaaagggccttatgaatgcagtgaatgtggaaaatcctttagccagagctctaacctcactaatcaccagcgaattcacagtggggaaaggccttatgagtgtagtgactgtggaaaattttttaccttcaactccaacctcctaaaacatcagaacgttcacaagggataaaggttaggtaacacacatagggctgttacggactgagaagtgtccctgcaaaattcacagacataaataaataaataagtattttcaataaaaaaaaaaaa

SEQ ID NO: 89972 - DNA, 3904 bp, Homo sapiens
atgacggagcctagggagaggagaggttacagtgtaccacctagaccagaggtcgggacccaggccacggagtggagagtagaagaatctaacttcaacaagatcttcctgaaaaaagacgctgagcttggacggtccaaccacctccctacctgggataagccggaggatgcttcttggcttccccaaagctgtcttggtggtgatgctgtggcaaccacaggggagattcacgaggagaaagcctggaagaccagagccctggaagtggggcagccagcccagcgggacattcgtaggggcgagctctgggggaaggagcacggggctgatcaagccatccaggaaacactggaggacttgtccagccttgaaagaactctagtggtttctgaatctagcccacttggcggggattgtcaggaggtgaccactctcacggtgaaataccaagtgtcagaggaagtgccatctggtacagtgatcgggaagctgtcccaggaactgggccgggaggagaggcggaggcaagctggggctgccttccaggtgttgcagctgcctcaggcgctccccattcaggtggactctgaggaaggcttgctcagcacaggcaggcggctggatcgagagcagctgtgccgacagtgggatccctgcctggtttcctttgatgtgcttgccacaggggatttggctctgatccatgtggagatccaagtgctggacatcaatgaccaccagccacggtttcccaaaggcgagcaggagctggaaatctctgagagcgcctctctgcgaacccggatccccctggacagagctcttgacccagacacaggccctaacaccctgcacacctacactctgtctcccagtgagcactttgccttggatgtcattgtgggccctgatgagaccaaacatgcagaactcatagtggtgaaggagctggacagggaaatccattcattttttgatctggtgttaactgcctatgacaatgggaacccccccaagtcaggtaccagcttggtcaaggtcaacgtcttggactccaatgacaatagccctgcgtttgctgagagttcactggcactggaaatccaagaagatgctgcacctggtacgcttctcataaaactgaccgccacagaccctgaccaaggccccaatggggaggtggagttcttcctcagtaagcacatgcctccagaaggtgctggacaccttcagtattgatgccaagacaggccaggtcattctgcgtcgacctctagactatgaaaagaaccctgcctacgaggtggatgttcaggcaagggacctgggtcccaatcctatcccagcccattgcaaagttctcatcaaggttctggatgtcaatgacaacatcccaagcatccacgtcacatgggcctcccagccatcactggtgtcagaagctcttcccaaggacagttttattgctcttgtcatggcagatgacttggattcaggaaacaatggtttggtccactgctggctgagccaagagctgggccacttcaggctgaaaagaactaatggcaacacatacatgttgctaaccaatgccacactggacagagagcagtggcccaaatataccctcactctgttagcccaagaccaaggactccagcccttatcagccaagaaacagctcagcattcagatcagtgacatcaacgacaatgcacctgtgtttgagaaaagcaggtatgaagtctccacgcgggaaaacaacttaccctctcttcacctcattaccatcaaggctcatgatgcagacttgggcattaatggaaaagtctcataccgcatccaggactccccagttgctcacttagtagctattgactccaacacaggagaggtcactgctcagaggtcactgaactatgaagagatggccggctttgagttccaggtgatcgcagaggacagcgggcaacccatgcttgcatccagtgtctctgtgtgggtcagcctcttggatgccaatgataatgccccagaggtggtccagcctgtgctcagcgatggaaaagccagcctctccgtgcttgtgaatgcctccacaggccacctgctggtgcccatcgagactcccaatggcttgggcccagcgggcactgacacacctccactggccactcacagctcccggccattccttttgacaaccattgtggcaagagatgcagactcgggggcaaatggagagcccctctacagcatccgcagtggaaatgaagcccacctcttcatcctcaaccctcatacggggcagctgttcgtcaatgtcaccaatgccagcagcctcattgggagtgagtgggagctggagatagtagtagaggaccagggaagcccccccttacagacccgagccctgttgagggtcatgtttgtcaccagtgtggaccacctgagggactcagcccgcaagcctggggccttgagcatgtcgatgctgacggtgatctgcctggctgtactgttgggcatcttcgggttgatcctggctttgttcatgtccatctgccggacagaaaagaaggacaacagggcctacaactgtcgggaggccgagtccacctaccgccagcagcccaagaggccccagaaacacattcagaaggcagacatccacctcgtgcctgtgctcaggggtcaggcaggtgagccttgtgaagtcgggcagtcccacaaagatgtggacaaggaggcgatgatggaagcaggctgggacccctgcctgcaggcccccttccacctcaccccgaccctgtacaggacgctgcgtaatcaaggcaaccagggagcaccggcggagagccgagaggtgctgcaagacacggtcaacctccttttcaaccatcccaggcagaggaatgcctcccgggagaacctgaaccttcccgagccccagcctgccacaggccagccacgttccaggcctctgaaggttgcaggcagccccacagggaggctggctggagaccagggcagtgaggaagccccacagaggccaccagcctcctctgcaaccctgagacggcagcgacatctcaatggcaaagtgtcccctgagaaagaatcagggccccgtcagatcctgcggagcctggtccggctgtctgtggctgccttcgccgagcggaaccccgtggaggagctcactgtggattctcctcctgttcagcaaatctcccagctgctgtccttgctgcatcagggccaattccagcccaaaccaaaccaccgaggaaataagtacttggccaagccaggaggcagcaggagtgcaatcccagacacagatggcccaagtgcaagggctggaggccagacagacccagaacaggaggaagggcctttggatcctgaagaggacctctctgtgaagcaactgctagaagaagagctgtcaagtctgctggaccccagcacaggtctggccctggaccggctgagcgcccctgacccggcctggatggcgagactctctttgcccctcaccaccaactaccgtgacaatgtgatctccccggatgctgcagccacggaggagccaaggaccttccagacgttcggcaaggcagaggcaccagagctgagcccaacaggcacgaggctggccagcacctttgtctcggagatgagctcactgctggagatgctgctggaacagcgctccagcatgcccgtggaggccgcctccgaggcgctgcggcggctctcggtctgcgggaggaccctcagtttagacttggccaccagtgcagcctcaggcatgaaagtgcaaggggacccaggtggaaagacggggactgagggcaagagcagaggcagcagcagcagcagcaggtgcctgtga

SEQ ID NO: 89973 - DNA, 2577 bp, Homo sapiens
gccacggcgcggacgccatgcacacggaccctgactactcggctgcctatgtcgtcatagaaactgatgcagaagatggaatcaaggggtgtggaattaccttcactctgggaaaaggcactgaagttgattggtccagaaaagggcgtggtgcacctggcgacagcggccgtcctaaacgcggtgtgggacttgtgggccaagcaggagggaaagcctgtctggaagttacttgtggacatggatcccaggatgctggtatcctgcatagatttcaggtacatcactgatgtcctgactgaggaggatgccctaaaaatactgcagaaaggtcaaattggtaaaaaagaaagagagaagcaaatgctggcacaaggataccctgcttacacgacatcgtgcgcctggctggggtactcaaatgacacgttgaagcagctctgtgcccaggcgctgaaggatggctggaccaggtttaaagtaaaggtgggtgctgatctccaggatgacatgcgaagatgccaaatcatccgagacatgattggaccggaaaagactttgatgatggatgccaaccagcgctgggatgtgcctgaggcggtggagtggatgtccaagctggccaagttcaagccattgtggattgaggagccaacctcccctgatgacattctggggcacgccaccatttccaaggcactggtcccattaggaattggcattgccacaggagaacagtgccacaatagagtgatatttaagcaactcctacaggcgaaggccctgcagttcctccagattgacagttgcagactgggcagtgtcaatgagaacctctcagtattgctgatggccaaaaagtttgaaattcctgtttgcccccatgctggtggagttggcctctgtgaactggtgcagcacctgattatatttgactacatatcagtttctgcaagccttgaaaatagggtgtgtgagtatgttgaccacctgcatgagcatctcaagtatcccgtgatgatccagcgggcttcctacatgcctcccaaggatcccggctactcaacagaaatgaaggaggaatctgtaaagaaacaccagtatccagatggtgaagtttggaagaaactccttcctgctcaagaaaattaagtgctcagccccaacaacttttttctttctgaagtgaaagggcttaaaatttcttggaaatagttttacaaaaatggatttaaaaaatcctaccgatcaagatgagttcagctagaagtcataccaccctcaggaatcagctaaagcaaaaagaacttttacctcggcatccagcccaacccctaaagactgacaatatccttcgagctcctttgaaagcaccctaaacagccatttccattttaatagttggatgcggattgtacccttcaatctgaaagtcttcagctttgaagtcatcaattttctcaacttttcgaagaatcctgagctttgggaaaggtctgggttctcgctgaagctaaaaacaaaataaggccattattttgccataattgtacgacctgttgtaattgctcctcatgtccatgaaacaagtacacaggatgtgatcaacaaagttctattttacaggagtatgatcctgtcgataccttgccgtaggttatgtaacatgattggagcgcaaccagctgttctcttgcacagatcgagagtgaggggtattttgtgacattacacagcatcaggagcctggtgcctcatcaggtgtaagttcttataaccactcttggcaaatttattaaagacaggaacacagtcaatctgtaactcatagtagctctacgtttacttgaattccacaatccctaacccatctgtccctggcagaaagaaggaaagatgacatgcatggacagtgaacagaaagggatgaaagccaggattcctgggatgaacagacagtggcaattaggatgtgaagacaggtcacaacctattactatgtctaaaaatgaccagagcagagagccagagagaataagcctgaagtcacctccactcaaaagcagccaaactccctcaaaggaataacttttaaaacctggatctaacctggaaggggctaaaaagtgtctggttctgagtttttttccttaaggctcatgaagcagatgaacttacatttttattgccatttcatatcaattgttggctgctataacttagggatttcaacagacttttgaagtttggacctaaatattgtacttaatgtaaaattaacaaaaaatatttatggccagggtggtggcttatgcctgtgattccagaactttcggaggctgaggcaggtggatcacttgaagtcaggagtttgagactagcctggccaacatgacgaaaccccatctctactaataatacaaaaattagctgggtgtggtggcatgtgcctgtaatcccagctacctgggaggctgaggcagaagaattgcttgaacccgggaggtggaggttgcagtgagctgagatcgcaccacggcacactccagcctggccgacagagaaagactccatctc

SEQ ID NO: 89974 - DNA, 2314 bp, Homo sapiens; identical to SEQ ID NO: 61261

SEQ ID NO: 89975 - DNA, 1665 bp, Homo sapiens
ttttttttttttggcgctgccaaaactcatttttcattaacacggggtggggtcccaggctcaggcccccgggcccgatcatggccccagtccgcacagagcgcccggccctggccgcccgcagctccaccgctcagccagtgatgcgcacatccgtgcggcggcggatccgccgggcccgagccgcctcgggcaggatggcgagcagctgctcttgcaccagcatctccacgatcttgctccttggtgcgggatgtcaggccgcagccactggcggggacaagctcccgcagctgccggaaagcctcccggggacccgccgcatcctggtagcggaactgccggaaacgctggcggaacgtctcgggaccgagtctagagccggcggggcctggtgtggagcgcgcttcagcttcggcctgaggcgctacgctcacgggtgcgggcccgagaggcagctccagggccgcggaggccgcagctcggggcgtagggatggcttcagggaccgcggcgttgggactggaaggctcaggggcaggcggtgaggcctctggcagcgaggagcccacacagttacgctcaggggctgagctcgaaccggctccttccagtttctccggtggcaccgccgcgggactcccagtggccgccaagatcggctccgtagccgccataactccagctccgggcgtcactctttgtccggtagctgtgtgctcagcactgcgtctgcaccagcgaagcgcctgcggcagccggaagcgaaagtctctggcttctctgcgtccaggtcggcgcgcgagcacccggaagccgcttgcgggctcccggaagcggcgccctctagcgttctcgagtcgcatgaggcggctgctgccctcgcggtgcgggagggcgagctgcgcgtggcctgggctccttccgaatggtggcgcctctgagcgccagttcgaggaggagtcggaggaggagcctgaatgtttggagatagacttcaagtcccggaccttatccgtgcgccgcttcggtttgcaggtgacctttgcgtgcgggcgccccttctgattgaccctgatgagctgtagctctgatggcccctccttcgggaatgattagggtgacggctggccggggctcgttcgagtggcgcccggccggtggtgacccgaacaggagagcgggacggcgaccattctctcgggaggggcccatctggagaaagtcctctcgcttggtcaaactaggagggcgatagcaccggccttactgcgacgatgacaaagtacaacacaccgtctggcgcgaaggagatgctcgagaaccctttgctgttgttatttttcgcgtgtcctccgaaaccaagggaaatgcggctctgtgggttctgttaacgtcagcatttaataagtgaactctaaatgcatttgccccttatgggtcgcgctggcctcctgagttgactcagctcttgcaacgtagctagttgataaccctcgaaatatagcgaattgagatgtgctatattgtaaaatacgggacttagtacgaaaaaactgatgtaaaaattatctcaatactttttaatactgattacatgttggaatataatgttttgcatatattgggtcaaataaaaatgttattaatttcaaaaaaaaaaaa

SEQ ID NO: 89976 - DNA, 523 bp, Homo sapiens
ggcacgaggcgcggccgttccgaggggcggtccctgggctcccgctcgccgccgctgccgctcctcgttctgctcctcactccccagcggctggaggccggtaccggcgggcaggaggcgcccgaggatgtgctgctggccgctgctcctgctgtgggggctgcttcccgggacggcggcggggggctcgggccgaacctatccgcaccggaccctcctggactcggagggcaagtactggctgggctggagccagcggggcagccagatcgccttccgcctccaggtgcgcactgcaggctacgtgggcttcggcttctcgcccaccggggccatggcgtccgccgacatcgtcgtgggcggggtggcccacgggcggccctacctccaggattattttacaaatgcaaatagagaagttgaaaaaagatgctcagcaagattaccatctagaataagccatggaaaataacacacacccaataattgaatttaccagagagctgcatacatgtgacataaa

SEQ ID NO: 89977 - DNA, 3481 bp, Homo sapiens; identical to SEQ ID NO: 60822

SEQ ID NO: 89978 - DNA, 1356 bp, Homo sapiens
gcggccgcggggtcagcggagggcgccggcactccggtccccgccgctccccgtccccgctgctcctatcccctgccgcgtccccggcggagcgggctatgggcgccacccgcggcgcctggcacgggaccgtgtgggccgtgaggatgaggacggctgggagacgcgaggggaccgcaaggcccggaagcccctggtggagaagaagcggcgcgcgcggatcaacgagagcctgcaggagctgcgggttgctgctgggcgggcgccgagggtgcaggccaagcttgaaaaacgccgaactgctggagctgacggtgcggcgggtccagtgtgtgctgcggggccgggcgcgcgagcgcgagcagctgcaggcggaagcgagcgagcgcttcgctgccggctacatccagtgcatgcacgaggtgcacacgttcgtgtccacgtgccaggccatcgacgctaccgtcgctgccgagctcctgaaccatctgctcgagtccatgccgctgcgtgagggcagcagcttccaggatctgctgggggacgccctggcggggccacctagagcccctggacggagtggctggcctgcggggggcgctccgggatccccaatacccagccccccgggtcctggggacgacctgtgctccgacctggaggaggcccctgaggctgaactgagtcaggctcctgctgaggggcccgacttggtgcccgcagccctgggcagcctgaccacagcccaaattgcccggagtgtctggaggccttggtgaccaatgccagccagagtcctgcgggggtgggcccggccctccctggatctcctccctcctcccaggggttcagatgtggtggggtagggccctggaagtctcccaggtcttccctccctcctctgatggatggcttgcagggcagcccctggtaaccagcccagtcaggccccagccccgtttcttaagaaacttttagggaccctgcagctctggagtgggtggagggagggagctacgggcaggaggaagaattttgtagagctgccagcgctctcccaggttcacccacccaggcttcaccagccctgtgcgggctctgggggcagaggtggcaggaatggtgctgggcactagtgttccaggcagccctgggctaaacaaaagcttgaacttgccacttcagcggggagatgagaggcaggtgcactgagctgcactgcccagagctgtgatgctctgtacatcttgtttgtagcacacttaagtttgtgtattccattgacatcaaatgtgacaattttactaaataaagaattttggagttagttacccttgaaaaaaaaaaaagtcgacg

SEQ ID NO: 89979 - DNA, 3707 bp, Homo sapiens; identical to SEQ ID NO: 61247

SEQ ID NO: 89980 - DNA, 1179 bp, Homo sapiens
cgctcaggaagtacgacaccggaaggggtgggctttgcgcaagatggcggcgctgggggtgctggagtccgacctgccaagtgccgtgacacttctgaaaaatctccaggagcaagtgatggctgtaactgcacaagtgaaatcactgacacaaaaagttcaagctggtgcctatcctacagaaaagggtctcagcttcttggaagtgaaagaccagctgctgctcatgtaccttatggatttgacccacctcattctggacaaagcctcaggaggatctcttcagggacatgatgcagttttgagactggtagagattcgaacggttttggaaaagcttcgtcccttggaccaaaagctgaagtatcaaattgacaagctgatcaagactgcagtgacaggcagccttagtgagaatgacccacttcgttttaagcctcatcccagcaatatgatgagcaagttgagctctgaggatgaggaggaagatgaagcagaagatgaccagtctgaggcttcagggaagaaatctgtgaagggagtgtctaagaaatatgttcctccacgcttggttccagtacattatgatgaaacagaagctgagcgggagaagaagcgtctagaacgagccaagagacgggcattgagcagctctgtcattcgtgaacttaaggagcagtactcagatgctccagaggaaatccgtgatgctcggcatccccatgttacccgccagagtcaggaggaccaacacaggattaactatgaggagagcatgatggtgcgtttgagcgtcagtaagcgagagaaaggacggcgaaaacgagcaaatgtcatgagctcacaacttcattcccttacacacttcagtgacatcagtgctttgacagggggaactgttcatcttgatgaggatcagaatcctattaagaagcggaagaagatacctcagaaaggtcggaagaaaaaaggttttcggaggcggcggtgattatgggtgtacatatttgtatattttttgtcatcctgagatacttctaatttccattgtattattaggtggttttccctgggaattccatttaattgttttgctttgggacatgtgggaaagagccttactaataaaattgattttacttatgaattaaggcccctttttgcacaaaaaaaaagaag

SEQ ID NO: 89981 - DNA, 2432 bp, Homo sapiens
atgcggtgtgaaataccgcacagatgcgtaaggagaaaataccgcatcaggcgccattcgccattcaggctgcgcaactgttgggaagggcgatcggtgcgggcctcttcgctattacgccagctggcgaaagggggatgtgctgcaaggcgattaagttgggtaacgccagggttttcccagtcacgacgttgtaaaacgacggccagtgaattcgagctcggtacccggggatctagagtactgggtttaaacccggatccttctatagtgtcacctaaatgtcgacggcccagggggccgccaggcctaccccaaaggcaaatcgggaggatcgaaacgccagatcgcaaaaaccagtccatccagaaggagacatgaacatgaacatcaaaaaaattgttaatcaagcccccaggttcgtacttttacggctgccacttctggcaggagaagcgactcaagggccttcgcggaaagaaattacccaaaggccatacaaagaaacgtacggcgtctctcatattacacgccatgatatgctgcagatccttaaacagcagcaaaacgaaaaataccaaagtgcctcaattcgatcaatcaacgattataaatattgagtctgcaaaaggacttgatgtgtgggacagctggccgctgcaaaacgctgacggaacagtagctgaatacaacggctatcacgttgtgtttgctcttgcgggaagcccgaaagacgctgatgacacatcaatctacatgttttatcaaaagggtcggcgccaactcaatcgacagctggaaaaacgcggggccgtgtctttaaagacagcgataagttcgacgccaacgatcccgatcctgaaagatcagacgcaaagaaaggtccggtttctgcaacctttacatctgacgggaaaaatccggtttattctacactgactattccggtaagcattaccggcaaacaaagcctgacaacagcgcaggtaaatggggtcaaaatttgatgacacactcaaaatcaacggagtgggaagatcacaaaacgatttttgacggagaccggaaaaacatatcaagaacgttcagcagtttatcgatgaaggcaattatacatccgggggacaaccctaccctggaaagaccctcactactttgaaaacaaaggccataaataccttgtattcgaagcccaacacggggaacagaaaacggattcccaaggcgaagaactctttatttaacaaagccgtactacggcggcggcacgaacttcttccgtaaagaaagccagaagcttcagcagagcgctaaaaaacgcgatgctgagttagcgaacggcgccctcgggtatcatagagttaaataatgattacacatctgaaaaaagtaatgaagccgctgatcacttcaaacacggtatttattcgcgataagctcatggagcggcgtaaccgtcgcacaggaaggacagagaaagcgcggatctgggaagtgacggacagaacggtcaggacctggattggggaggcggttgccgccgctgctgctgacggtgtgacgttctctgttccggtcacaccacatacgttccgccattcctatgcgatgcacatgctgtatgccggtataccgctgaaagttctgcaaagccccgccgtccggctctaggagataaccatcgataaactgctgaacgttctgatatgtttttccgtctccgtcaaaaatcgttttgtgatcttccactccgttgattttgagtgtgtcatcagattttgacacatttacctgcgctgttgtcaggctttgtttgccgtaatgtttaccggaatagtcagtgtagaataaacggatttttccgtcagatgtaaaggttgcagaaccggaccattcttgcgtctgatctttcaggatcggatcgttggcgtcgaacttatcgctgtctttaaagacacggcccgcgtttttccagctgtcgattgagttgtcgccgaccttttgataaaacatgtagattgatgtgtcatcagcgtctttcgggcttcccgcaagagcaaacacaacgtgatagccgttgtattcagctactgttccgtcagcgttttgcagcggccagctgtcccacacatcaagtccttttgcagactcaatatttttaatcgttgattgatcgaattgaggcacttggtatttttcgttttgctgctgtttagggatctgcagcatatcatggcgtgtaatatgagagacgccgtacgtttctttgtatgcctttttggttattttctttcgcgaaggcttgagtcgctcctccgacgatacgagtgggaccgtggttccggggtgataatcagaccgacgatacgagtgggaccgtggtcccagactaatgatcagaccgacgatacgagtgggaccatggtcccaga

SEQ ID NO: 89982 - DNA, 3160 bp, Homo sapiens
ttttttttttatattacttttgtttaaaattggttttgattcatattttattatatacacaatttattagcttcataatttaccatgcaagattttagactgattaggaaattcactaggaagagtagcaggtataatgtttgtatcatattaattttattattgtcttttatttttattaaaaattttatttcagtagtctttttttattttattaaagtatatactggtttttggttacatggatgaattgtctaatggtgaagtctgagattttagtgtacccatcacctgagtagtgtacattgtacccaaacttgtaggctttttatcccttaccctaccttccaccctccccattttgagtctgcatagtccattatatcactctgtatgcctttgcatacccatagcttaactcccacttataagtgaaaacacggtatttggttttccattcctgagttacttcacttaggaataatagcctccagctccatccaagttgctgcaaaagacattatttcatttttttatggctgaataggtattccctggtgaatatataccatattttctttatccactcattggttgatgggcacttaggttggttccatatctttgaaattgtgaattgtgctgtaataaatataggcatgcaggtgtccttttgatgtaaggacttcttttcctttgggtagatagtagtgggattgctggatcaaatggtagatccacttttagttctttagagaatctccatctgtatttcatagaggttgtactaatttaccttcacaccagcagtgtataggcgtttcttttcaccacacccatgtcaacatctattgtttttcgtcttttatttctatcaagtattttacatatgatacttggtttagttcgaaattggcctcatccaaaccaaagattatggtgcacttgaaaaatacaaactgaatgttgtctatactcatgagagtttcctgccatggcctaagtgaaatcttgataacactgaacaaaggcttcacttgtcctcatcttttaattctgtattctgataggagacaagatccaaactgagatggagactgtttcagaagcaggaacacatcaagagtggtccttccagcaaatctgggaaaaaaattgccagtggatttaaccaggtctcaagacttggtgataaatagctctcagttctccaaagaaggtgatttcccctgccagactgaggcaggactatctgtaattcacacaagacagaaatcttcccagggcaatggatataaaccatccttcagtgatgtctccctctttgattttcatcaacaattacactcaggagagaaatctcatacgtgtgatgagtgtggaaagaacttttgttacatctcagcccttcgtattcatcagagagtccacatgggagagaaatgctataagtgtgacgtgtgtggtaaggaattcagtcagagttcacatctgcaaactcatcagagagtccacactggagagaaaccgttcaaatgtgtggaatgtgggaaaggcttcagtcgtagatcagcacttaatgttcatcacaaattacacacaggagagaaaccttataattgtgaggaatgcgggaaggccttcattcacgattcccagcttcaagaacatcagagaatccatacgggggagaagccattcaaatgtgatatatgtggtaagagcttctgtggtagatcaagacttaataggcattccatggttcacacggcagagaaaccattccgatgtgatacgtgtgataagagctttcgtcagagatcagcacttaatagtcatcgcatgatccacacaggagagaaaccatacaaatgtgaggagtgtggaaaaggctttatttgtaggcgagatctttatacgcatcatatggtccacacgggagagaagccatataattgtaaagagtgtgggaagagcttcagatgggcctcgtgtcttttgaaacatcagcgagtccacagtggagaaaaaccattcaaatgtgaagaatgtgggaaaggattttacacaaattcacaatgctattcccaccagagatcccatagtggagaaaaaccatacaaatgtgtggagtgtgggaagggctacaaaaggaggttggatcttgactttcaccagcgcgtccatacaggagagaaactgtataattgtaaggaatgtgggaagagctttagtcgggccccatgtcttttgaaacatgagagactccacagtggagaaaaaccattccaatgtgaagagtgtgggaagagatttactcaaaattcacatcttcattcccatcagagaggttcacactggagaaaagccatacaaatgtgagaagtgtggaaagggctacaatagtaagtttattctttatatgcaccaggagggtccacacaggagagagaccatacaattgtaaggaatgtgggaagagttttggctgggcctcgtgtcttttgaaacatcagagactgcacagtggggaaaaccctttcaaatgtgaagagtgtgggaaaagatttactcagaattcacagcttcattctcatcaaagagtgcacactggagaaaagccatacaaatgtgatgagtgtgggaagggcttcagctggtcctcaactcgtctgacccatcagagacgccacagcagagaaacacctctcaaatgtgagcagcatgggaagaacattgtacagaattcattctctaaagtgcaagaaaaagttcacagtgtagaaaagccatacaaatgtgaggactgtgggaagggctacaacaggcgcttgaatcttgatatgcatcagagggtccacatgggagagaaaacatggaagtgtagggagtgtgatatgtgctttagtcaggcctcaagccttcgacttcatcagaatgttcatgttggagaaaaaccttagtgatgtgatggtgcaataaagtcttcactcagtcttcatgaatgcagtctcatctgaaagttcacaaaggagagacacattaaaatatgaggcacatagtaagcacttccctttgagtattttatctctgaatccatgctggtgataaatttcacccattcttggaagagggaaaacatttgtttaagataacatca

SEQ ID NO: 89983 - DNA, 1816 bp, Homo sapiens
ttttttttttttagacctgtacagtttttattacataaaatatcacaaaattcacaagtacaacactgcttattttcttgcttgaagatcagatctctggtttatttaatatcaacattcaccacagctgaaggaaattaaactgaacctttaaaaggtaccgcatacggacctgggttggggttatatacaatatattcattgtagttgagggtataacatctgggattcagaattcctgtgtcacttgctgggcctaatgggcactgtactcccattcaggggtgacgagtgggggcaggaactggggaggccatcttgcccagccccttggtgctatgtttaccttgaagcaatccttcggccttaggattggcctctagtagttcattacactgacctagagctacctctgataagagcagcagtcctgtattctttaggcgagaggcaaagcagtaattggcactcttggaagacatgtcagcaaagtagattcctttcccaaacatgtaacctgtgatgggagcttcaggtggggcaattcgaagcccatggctcaagattcccacccagttactcatcctggaaccatgccatagaagcatcctgttatgaaggtcctctctgaaggcttctttctcaccatccttctccacttcaaacaaatccagcaaggtcatggtatagtcgctgtgtgtgggagcatgggtagattgtaggtactgggaaatcactttgaactcataactttcatggtcaagggggcgcaaggcacaatgtaggtttctatagtgttggtccaatgggtgttctgggctttgtagctctgttttcaccagcttaatagcaatttcaatgtctcccaaagcctctagtaattgtattttttctgacagttccttctgtgtccggattagtggaggagtacggagtccaaagtcatgcgggatcctggtgtagaattcattgcatgcttccatgagagctcgtccatgctggccagcccgaatacaatcctcaatcttcttaagagactggtaacctgccttgatttgtgccactgtcagcttcccaagtggggctttcttggtattatacttcatttccatcatcatttcttccatggcctgaacattacagatcaactttattaactcctgtacccgaagatctagctgtgactctggcttcaagggagatttaagagattcctctttctttgtttcctcttcatcctgagtattggtggcatagtccatctgtagcatatcatattttccaggcaccttctcaaacttttctcgatcttcccaattgtttttcgttttgtcaaggaatttcttctgaaagatttccttggccttgttgagattgcctgaacaagccaccaggctgtgctgtcccattttcccaactcggccccatctcatccaaacactgaagttcctctgggcatcatcttctaatagctgaatcagatagtacttgttgttgttgaactggagattggtctgatttagcatgacatcatagacatcatttccttcacaatacacatgagccttccccaccttggctgtacactctgggtccacaggagctttgccctttaacagcaaggccttcacagattcagagacccttttgctggcccatgaccttcctggcataccatcttgcttgtcttctgtcctgtccttattagcttttcctccagccacaggcatctttttcgactcctgtctctggcatctacgagttttcttggcaggggaagagtcttctggagccgtgttgccattattaactcttt

SEQ ID NO: 89984 - DNA, 1635 bp, Homo sapiens
cgttgctgtcggcctctgagtagggcgggcgaggaggcagccaaggcggagctgatggctgcgccgagggcggggcggggtgcaggctggagccttcgggcatggcgggctttggggggcattcgctgggggaggagaccccgtttgacccctgacctccgggccctgctgacgtcaggaacttctgacccccgggcccgagtgacttatgggacccccagtctctgggcccggttgtctgttggggtcactgaaccccgagcatgcctgacgtctgggaccccgggtccccgggcacaactgactgcggtgaccccagataccaggacccgggaggcctcagagaactctggaacccgttcgcgcgcgtggctggcggtggcgctgggcgctgggggggcagtgctgttgttgttgtggggcgggggtcggggtcctccggccgtcctcggccgccgtccctagcccgccgcccgcttctccccggagtcagtacaacttcatcgcagatgtggtggagaagacagcacctgccgtggtctatatcgagatcctggaccggcaccctttcttgggccgcgaggtccctatctcgaacggctcaggattcgtggtggctgccgatgggctcattgtcaccaacgcccatgtggtggctgatcggcgcagagtccgtgtgagactgctaagcggcgacacgtatgaggccgtggtcacagctgtggatcccgtggcagacatcgcaacgctgaggattcagactaaggagcctctccccacgctgcctctgggacgctcagctgatgtccggcaaggggagtttgttgttgccatgggaagtccctttgcactgcagaacacgatcacatccggcattgttagctctgctcagcgtccagccagagacctgggactcccccaaaccaatgtggaatacattcaaactgatgcagctattgattttggaaactctggaggtcccctggttaacctggatggggaggtgattggagtgaacaccatgaaggtcacagctggaatctcctttgccatcccttctgatcgtcttcgagagtttctgcatcgtggggaaaagaagaattcctcctccggaatcagtgggtcccagcggcgctacattggggtgatgatgctgaccctgagtcccagcatccttgctgaactacagcttcgagaaccaagctttcccgatgttcagcatggtgtactcatccataaagtcatcctgggctcccctgcacaccgggctggtctgcggcctggtgatgtgattttggccattggggagcagatggtacaaaatgctgaagatgtttatgaagctgttcgaacccaatcccagttggcagtgcagatccggcggggacgagaaacactgaccttatatgtgacccctgaggtcacagaatgaatagatcaccaagagtatgaggctcctgctctgatttcctccttgcctttctggctgaggttctgagggcaccgagacagagggttaaatgaaccagtgggggcaggtccctccaaccaccagcactgactcctgggctctgaagaatcacagaaacactttttatataaaataaaattatacctagccccccaaaaaaaaaa

SEQ ID NO: 89985 - DNA, 1044 bp, Homo sapiens
ctgtggtggaattctgtgcccgtagagccttaggcatgataatttttgctatcgtttccttggtcacactaataacttctgttgtgatgtcctctgtaactttgcatagttctgttcaaacggctcagtacgtagagaattggacacgtacagccaaccaagcgaggctacttcagaataaaattaacactgagttacaaactgaagtggcaatgttgaaatccatggttctgtggttaggggaacaagtataaagcttgcagttgcagcggcaattgcgctgtcattttaatcacactcgtatttgtgtaaccaacttagaatataacaaaagtgagtatccgtgggaccttgtgaaagcccatttgcaaggagctttcacatccaacatcacctttgatattagtgaattacaaaacaaaattcttgatttaaataggcacactcaagaatttcagccttctttagaagactggactgaattccaggaaggcctggagagcctcaacccttggacctatctaaagtaccacagtaacatcttatatgtagttcttggagtaatgttgttttgtctctgtcttctgtttatagtctgtaaaatcggatggaccgccaatcggagaatgagagctgcccagcctggtcttacattctttcaattaattcataaacagggggatatgccagggaagccgaaggcccatgggacgtgaccaactcagcattcccactggaggctatatgatcaaacagcaaactgtttatcatgaatacaggatgtgagcaaactcaggactgctcctgccaacataaggtttgctgagggcaatcgcttcctgacgccaagctctttgaagttatctactggaacatctagagaatgcagtcttgcaagcctactctggaccaaccaactgacctcttcttccaccccccttctcactatcgcttttctctaataaatacagagggccgtgtaaagctcagggccttgtccactagaggcaaggtgcccccggaccccttcttccaaatataaaa

SEQ ID NO: 89986 - DNA, 2383 bp, Homo sapiens
ttcccgggtcgacgatttcgtaacgcggtgtcgctggttcagatctcgcagagctcagagtcctgcatgcctcagtcctcgcctcgctcctcctcgcggaggattctgggaggtgacgtcgcgggtctcggtcgcggggcccgtttgcagagcccgcggcgccgggaggactttgttcttcttcagaagagaaaactgaagaaggaggaatggctgtggggctttgtaaagccatgtcccaggggttggtgaccttcagagatgtggcgctagacttttcccaagaagagtgggaatggctgaagccatctcagaaggatttatacagagatgtcatgttggagaactacaggaacttggtatggcttggactctccatttctaagcccaacatgatctccttactggagcaagggaaggaaccgtggatggtggagagaaagatgtcacagggtcactgtgcagactgggagtcttggtgtgaaattgaggaattatctccaaaatggttcattgatgaagatgaaatatcccaggagatggtaatggaaaggctagcaagtcatggccttgaatgctccagtttcagagaagcctggaaatataagggtgaatttgagctacatcagggaaatgcggagaggcatttcatgcaagtgacagctgttaaggaaatctctactgggaaaagagacaatgaatttagtaattctgggagaagcatacccctgaaatcagtatttttaacacaacagaaagttcctaccatacagcaagtacataaatttgatatttatgataaactcttcccccaaaattcagtcataattgaatataaaagactccatgctgagaaggaatctttgataggtaatgaatgtgaagaattcaaccagagtacgtaccttagtaaagatataggaattcctcctggggagaaaccttatgaaagtcatgatttttcaaagctcttaagtttccactcattatttactcaacatcagaccactcattttggaaaattaccccatggatacgatgaatgtggtgatgcctttagctgttactcattctttactcaacctcagagaattcacagtggagaaaaaccatatgcatgcaatgactgtggaaaagcctttagccacgacttctttctcagtgaacatcaaagaactcatattggggagaaaccttatgaatgtaaggaatgtaacaaagctttcagacagagtgctcaccttgctcaacatcagaggatccacactggagagaaaccgtttgcgtgcaatgaatgtgggaaggcctttagccgttatgccttccttgttgaacatcagagaattcacacaggtgagaaaccatatgaatgtaaagaatgtaataaagccttcagacagagtgctcaccttaatcaacatcagaggattcacactggagagaaaccctatgaatgtaatcagtgtggaaaagccttcagcagacgcatagcccttactctacatcaaagaattcacacaggagagaaacccttcaaatgtagtgaatgtgggaagacctttggctatcgctcacacctgaatcaacatcagagaattcataccggagaaaagccctatgaatgcatcaaatgtgggaagttttttaggactgactcacaacttaatcgacatcatagaattcacactggagagagaccatttgaatgcagtaaatgtgggaaagccttcagtgatgctttagttctaattcaccataagagaagtcatgcaggagagaaaccctatgaatgtaacaaatgtggaaaggccttcagttgtggctcatatcttaatcaacatcaaagaattcatactggagagaaaccctatgaatgtagtgaatgtgggaaggcttttcatcagatcttgtccctaagactacaccagagaattcacgctggagaaaaaccttataaatgtaacgaatcacaaagagtccggcgctcagagctagcggtttcccgaggactcaccaccaagcccgcggacacaggccccgattccacacttaacgctgccaaagtggcagagccggcgcgggctgggacagaggcggcactgaggccggcgctgtcggtggctgagagcgccacaagtctcggtccgttacaccaggggcgacgcttcccagaggcccccgcggctcacccgggcgggactggcttcactgtttgcgcgtcctgagaagcagaccacggtgttccagggctcacagctccgcgcaggggagctcagcctaggttttgcacgagcggcctcccgcgagcccagctctgagagattgggagcgcaacttggtgctgagaagaatcgaatcgttacgaaatcgtcgacccgggaat

SEQ ID NO: 89987 - DNA, 1652 bp, Homo sapiens
agcgagccgccacggtatgaccccaggggctctgctgatgctgctgggggcgctggggccgccgctcgccccaggcgtccgcggctcggaggcggagggtcgactccgggagaaacttttctctggctatgatagctccgtgcggccagcgcgggaggtgggagaccgtgtcagggtcagcgttggtctcatcctggcgcaactcatcagcctgaacgagaaggatgaagagatgagcacaaaggtgtacttagacctggagtggactgactacaggctgagctgggaccctgcggagcacgacggcatcgattcgctccgcatcacggcggaatccgtgtggctccctgacgtggtgctactgaacaacaatgatgggaattttgacgtggctctggacattagcgtcgtggtgtcctccgacggctccgtgcgttggcaacccccgggcatctatcgcagcagctgcagcatccaggtcacctacttccccttcgactggcagaattgcactatggtgttcagctcctacagctacgacagctcggaggtcagcctgcagacaggcctgggtcctgacgggcaagggcatcaggaaatccacattcatgaagggactttcattgagaatggccagtgggagaatatccacaagccctctcggctaatccagcctccaggcgatcctaggggagggagggaaggacagcgccaggaagtcatcttctacctcatcatccgccgcaagcctctcttctacctggtcaacgtcattgccccatgcatcctcatcactcttctggccatcttcgtcttctacctgccaccagatgcaggagagaagatggggctctcaatctttgccctgctgacccttactgtgttcctgctgctgctggctgacaaagtacctgagacctcactatcagtacccattattatcaagtacctcatgtttaccatggtcctcgtcaccttctcagtcatccttagtgtcgtggttctcaacctgcaccaccgctcaccccacacccaccaaatgcccctttgggtccgtcagatcttcattcacaaacttccgctgtacctgcgtctaaaaaggcccaaacccgagagagacctgatgccggagccccctcactgttcttctccaggaagtggctggggtcggggaacagatgaatatttcatccggaagccgccaagtgattttctcttccccaaacccaataggttccagcctgaactgtctgcccctgatctgcggcgatttatcgatggtccaaaccgggctgtggccctgcttccggagctacgggaggtcgtctcctctatcagctacatcgctcgacagctgcaggaacaggaggaccacgatgcgctgaaggaggactggcagtttgtggccatggtagtggaccgcctcttcctgtggactttcatcatcttcaccagcgttgggaccctagatcatcttcctggacgccacgtaccacttgccccctccagacccctttccttgaagactggagggttgagacccatgccccctgccagttgaagtgagagagtttggtgatactgtcaagccctatccttctctgcctcttaactccttcacgaggaatctgggcctcttatttcgttctggg

SEQ ID NO: 89988 - DNA, 1311 bp, Homo sapiens
aatacacggcctccaatatagtgaattgagagtatacatgggctaccctgcaacaggtcaaggcagctacccctcattgataagggtgatgatttgcagattcttttgtctttttgctcagtacacacttcagagccacaaagcacatacatttactcaatgtttatgtcattcagcctttactgtaaaaaaggaaacaataaaaacaaaaccctattaataaacacaatgcaaacaatgcccgagattatcataaaaacatactagcaagccacaagtaccagagaggggtgaacaggcatatctgctagctctcctcttgcagtcctcagcctcccacaggaggcacaaggtccaaactattcctcaaaaaaaaggacagcctcccacaggaggaacacaggtccaaactattcccctagccccagcccctcagctgtggggagaggccacctcctctgatggggtctcgatgctgctgctctgttcctggtctggcacgtcctcctcttcctgctccaagctgaagttctcgagctcctgaaaaatctcatccatgaagtcctgggagttctgtttgtaagacacagctaatcgaattgcatcattgaagagcttcacaacattgggtaccatcagcaggccgagacgaaatacaggggcagggagaacttcttggcaaaattgaagcttttttgggtcacgtttatgtcatcaattttattggccaccacgatgcatgggatctctggcctgaactcccgaagctctgtataccaggtgctcaggttcctataggtgactttcctctgtatatcaaacaccacgatgcaggcatgggccttgtggtagtaggaggcatgcatgctctggaaccgctcctggcctgccgtgtcccaaaagtccacaaggatggtcttgccatctaccgtggctgtgtgcttgtacagggtcagggcgtacgtggacagctgctgtggctgaaagccatccatgagaaatctctccatgagtttggatttgcccactgcgctgtctcccaggcagatgatcttcacgttgtcatcagcatcatacttcccttggtccaactcactcggtttggttttgtcttctgccattggctcctagctgtagagaggggtccagcccaagggaggggagggtattgtcactgtgtgcggttccgagtgagggctggagagaccagggacgctgcgggtcggcccctcgggccctgccgccagtctggactctgcgcgctctcgaaccacgcccgccggcccagctcgcgccgcagcgcacacgaaa

SEQ ID NO: 89989 - DNA, 1905 bp, Homo sapiens
ggcgagagggccagaggggcagcacgaaaaaaaaattttgtaaattaattattttttttaaagctaaggcttaaagactcagactttttattgtactcaagtaaaaacctgctggacccacagcaggtggcacagaaaagaggtaggagggggtaaggacactgaggatcaggtctccagcaggtctgtccagtgtgcctcttctaattctgagtcttctacttctttctcagtgtccatctggcacagccagatcaggtctccccaaagcagtgacttctcacagcaagggcattggccctctaggggcagaagctgccctggttcttcctgaagaaactcctctgccaggcagatcacatgggcccttagcaggcagccagggtgggggcaacacaagggcccctcttcatcctggatggtctgggcgcacagggagcagcaggcccctggatccccctggtctggctcaggctccgcgtcatcaaagggacctgcgcggcgcctttggggccgcgggacctgggccggtggaggcccaaaggccaaaagcacgtgcggcggcggcgggaggcaaaggtcctggcggaggtctgggcgcacccagcgcagcgtgagcgggaggcgagcccagggcggtgcgcgcagcatgtgcgccagcacgcgcaggtggaaagcgaaggctgtctctcctcgcaggcgaggccccacgtgcgccaggcggcgcgaggcgtgcgggtgctgccaagcccactcaaaccgaagggcggccacggaggacgggaagccgtgcacgacgagcaccatctcccatggccctcgcccgctggtccgcccaggccccgccttttttgcggcccccattgtgctgctggacccgacgagcagtgttgacagtgaaccccacgtagacgtcggacccggtaccgggggttcaggcagtagagcaggtagacgccgaaaaagcgccctggcctcgccgcgacccccgcgggacccatcgggccttggggttcgggaaccacagcagggggttgattgccgtgacctagggtccaggggagggctggatcgctagggctgcagggtgcttgcttcggaacaagctctcggggactatccggaggcatgcctgcaggaagccgtagcgccggtacgtgcccctctcctgtctggaggcgggtgtagaagtccgaccgcggaagccagactgctgtccagtcggcgagcgcgtaccattcagcatcggctccgcccgagtcccacctttctcaggctctgattggctgacacatggcaagcgcgaaaagcctggaccgctggaaagcccggttgcttgagggcggaagtactgcgttgacgtacgccttagtaagggcggaagtgagttttccagcggaagtggctcctgtaaggcagcaaggtagcgtggccggcgcccgagctggggttgtgtccctgctgggctgccgttccagctggactgccgccatggaactcagcgccgaatacctccgcgagaagctgcagcgggacctggaggcggagcatgtggaggtggaggacacgaccctcaaccgttgctcctgtagcttccgagtcctggtggtgtcggccaagttcgaggggaaaccgctgcttcagagacacaggctggtgaacgcgtgcctagcagaagagctcccgcacatccatgcctttgaacagaaaaccctgaccccagaccagtgggcacgtgagcgacagaaatgagggactgggatctgcacagccattaaattataaatctggtgccttcaagatcatacacctgctcacaggcgagaaccctctgcaagtcctggtgaacgccgtggggggcggcggccccgggaggactccacacgcattgggcgcgccgggact

SEQ ID NO: 89990 - DNA, 872 bp, Homo sapiens
tttcgtctttttggtttcctgtcggcagtaattcaaatctgtgtcatcttgactcgcctgaagggtggataaattggtaactgcactgagaaggggatattctcacagtctgatttgagcataaggcatcagattgaatttgtgaaagctttcaagacagcttttctcctgtgactttgactttcttcattatatttgtggatttttgtttctggaagaatccgtcatgactctactggaacctgagatgttaatgatggcagtacagtcagtgctacagttgaaactccagcagcgccggacccgggaagaactggtgagccaagggatcatgccgcctttgaaaagtccagccgcatttcatgagcagagaaggagcttggagcgggccaggacagaggactatctcaaacggaagattcgttcccggccggagagatcggagctggtcaggatgcacattttggaagagacctcggctgagccatccctccaggccaagcagctgaagctgaagagagccagactagccgatgacctcaatgagaagattgcacagaggcctggccccatggagctggtggagaagaacatccttcctgttgagtccagcctgaaggaagccatcattggtgaggaggacccagccacccctgtgtgagaggcagctgagatgcagaggggagggaagtgccaggctaaagcaaaaattgggttaaggttcttgccttcttattctttgacttccggctaacccttggaagaaccaaggcccaaagtttgaaaccttcatgcccaggtggtatgaacttggaatagtgcctgttgctttaagaaccagggacatccaccaattaataataacaaaggcc

SEQ ID NO: 89991 - DNA, 6726 bp, Homo sapiens
tttcgtgaagaaggcggctcccggaagggggagagacaaactgccgtaacctctgccgttcaggaacccggttacttatttattcgttaccctttttcttcttcctcccccaaaaaccttttccttttcccttctttttttttcctttttgggagctgaaaaatttccggtaagggaaagaagggctcctttcgctccttatttccccgcctccttcccttccccaccttcccctcctccggctttttcctcccaactcggggaggtccttcccggtggccgccctgacgaggtctgagcacctaggcggaggcggcgcaggctttttgtagtgaggtttgcgcctgcgcagcgcgcctgcctccgccatgcacgggggtggccccccctcgggggacagcgcatgcccgctgcgcaccatcaagagagtccagttcggagtcctgagtccggatgaactgaagcgaatgtctgtgacggagggtggcatcaaatacccagagacgactgagggaggccgccccaagcttggggggctgatggacccgaggcagggggtgattgagcggactggccgctgccaaacatgtgcaggaaacatgacagagtgtcctggccactttggccacattgaactggccaagcctgtgtttcacgtgggcttcctggtgaagacaatgaaagttttgcgctgtgtctgcttcttctgctccaaactgcttgtggactctaacaacccaaagatcaaggatatcctggctaagtccaagggacagcccaagaagcggctcacacatgtctacgacctttgcaagggcaaaaacatatgcgagggtggggaggagatggacaacaagttcggtgtggaacaacctgagggtgacgaggatctgaccaaagaaaagggccatggtggctgtgggcggtaccagcccaggatccggcgttctggcctagagctgtatgcggaatggaagcacgttaatgaggactctcaggagaagaagatcctgctgagtccagagcgagtgcatgagatcttcaaacgcatctcagatgaggagtgttttgtgctgggcatggagccccgctatgcacggccagagtggatgattgtcacagtgctgcctgtgcccccgctctccgtgcggcctgctgttgtgatgcagggctctgcccgtaaccaggatgacctgactcacaaactggctgacatcgtgaagatcaacaatcagctgcggcgcaatgagcagaacggcgcagcggcccatgtcattgcagaggatgtgaagctcctccagttccatgtggccaccatggtggacaacgagctgcctggcttgccccgtgccatgcagaagtctgggcgtcccctcaagtccctaaagcagtggttaaagggcaaggaaggccgggtgcgagggaacttgatgggcaaaagagtggacttctcgggccgcactgtcatcaccgccgaccccaacctctccattgaccaggttggcgtgccccgctccattgctgccaacatgacctttgcggagattgtcacccccttcaacattgacagacttcaagaactagtgcgcagggggaacagccagtacccaggcgccaagtacatcatccgagacaatggtgatcgcattgacttgcgtttccaccccaagcccagtgaccttcacctgcagaccggctataaggtgaaacggcacatgtgtgatggggacattgttatcttcaaccggcagccaactctgcacaaaatgtccatgatggggcatcgggtccgcattctcccatggtctacctttcgcttgaatcttagcgtgacaactccgtacaatgcagactttgacggggatgagatgaacttgcacctgccacagtctctggagacgcgagcagagatccaggagctggccatggttcctcgcatgattgtcaccccccagagcaatcggcctgtcatgggtattgtgcaggacacactcacagcagtgcgcaaattcaccaagagagacgtcttcctggagcggggtgaagtgatgaacctcctgatgttcctgtcgacgtgggatgggaaggtcccacagccggccatcctaaagccccggcccctgtggacaggcaagcaaatcttctccctcatcatacctggtcacatcaattgtatccgtacccacagcacccatcccgatgatgaagacagtggcccttacaagcacatctctcctggggacaccaaggtggtggtggagaatggggagctgatcatgggcatcctgtgtaagaagtctctgggcacgtcagctggctccctggtccacatctcctacctagagatgggtcatgacatcactcgcctcttctactccaacattcagactgtcattaacaactggctcctcatcgagggtcatactattggcattgggggctccattgctgattctaagacttaccaggacattcagaacactattaagaaggccaagcaggacgtaatagaggtcatcgagaaggcacacaacaatgagctggagcccaccccagggaacactctgcggcagacgtttgagaatcaggtgaaccgcattcttaacgatgcccgagacaagactggctcctctgctcagaaatccctgtctgaatacaacaacttcaagtctatggtcgtgtccggagctaaaggttccaagattaacatctcccaggtcattgctgtcgttggacagcagaacgtcgagggcaagcggattccatttggcttcaagcaccggactctgcctcacttcatcaaggatgactacgggcctgagagccgtggctttgtggagaactcctacctagccggcctcacacccactgagttctttttccacgccatggggggtcgtgaggggctcattgacacggctgtcaagactgctgagactggatacatccagcggcggctgatcaagtccatggagtcagtgatggtgaagtacgacgcgactgtgcggaactccatcaaccaggtggtgcagctgcgctacggcgaagacggcctggcaggcgagagcgttgagttccagaacctggctacgcttaagccttccaacaaggcttttgagaagaagttccgctttgattataccaatgagagggccctgcggcgcactctgcaggaggacctggtgaaggacgtgctgagcaacgcacacatccaaaacgagttggagcgggaatttgagcggatgcgggaggatcgggaggtgctcagggtcatcttcccaactggagacagcaaggtcgtcctcccctgtaacctgctgcggatgatctggaatgctcagaaaatcttccacatcaacccacgccttccctccgacctgcaccccatcaaagtggtggggggagtcaaggaattgagcaagaagctggtgattgtgaatggggatgacccactaagtcgacaggcccaggaaaatgccacgctgctcttcaacatccacctgcggtccacgttgtgttccccgccgcatggcagaggagtgttcggctcagtggggaggccttcgactggctgcttggggagattgagtccaagttcaaccaagccattgcgcatcccggggaaatggtgggggctctggctgcgcagtcccttggagaacctgccacccagatgaccttgaataccttccactatgctggtgtgtctgccaagaatgtgacgctgggtgtgccccgacttaaggagctcatcaacatttccaagaagccaaagactccttcgcttactgtcttcctgttgggccagtccgctcgagatgctgagagagccaaggatattctgtgccgtctggagcatacaacgttgaggaaggtgactgccaacacagccatctactatgaccccaacccccagagcacggtggtggcagaggatcaggaatgggtgaatgtctactatgaaatgcctgactttgatgtggcccgaatctccccctggctgttgcgggtggagctggatcggaagcacatgactgaccggaagctcaccatggagcagattgctgaaaagatcaatgctggttttggtgacgacttgaactgcatctttaatgatgacaatgcagagaagctggtgctccgtattcgcatcatgaacagcgatgagaacaagatgcaagaggaggaagaggtggtggacaagatggatgatgatgtcttcctgcgctgcatcgagtccaacatgctgacagatatgaccctgcagggcatcgagcagatcagcaaggtgtacatgcacttgccacagacagacaacaagaagaagatcatcatcacggaggatggggaattcaaggccctgcaggagtggatcctggagacggacggcgtgagcttgatgcgggtgctgagtgagaaggacgtggaccccgtacgcaccacgtccaatgacattgtggagatcttcacggtgctgggcattgaagccgtgcggaaggccctggagcgggagctgtaccacgtcatctcctttgatggctcctatgtcaattaccgacacttggctctcttgtgtgataccatgacctgtcgtggccacttgatggccatcacccgacacggagtcaaccgccaggacacaggaccactcatgaagtgttcctttgaggaaacggtggacgtgcttatggaagcagccgcacacggtgagagtgaccccatgaagggggtctctgagaatatcatgctgggccagctggctccggccggcactggctgctttgacctcctgcttgatgcagagaagtgcaagtatggcatggagatccccaccaatatccccggcctgggggctgctggacccaccggcatgttctttggttcagcacccagtcccatgggtggaatctctcctgccatgacaccttggaaccagggtgcaacccctgcctatggcgcctggtcccccagtgttgggagtggaatgaccccaggggcagccggcttctctcccagtgctgcgtcagatgccagcggcttcagcccaggttactcccctgcctggtctcccacaccgggctccccggggtccccaggtccctcaagcccctacatcccttcaccaggtggcgccatgtctcccagctactcgccaacgtcacctgcctacgagccccgctctcctgggggctacacaccccagagtccctcttattcccccacttcaccctcctactcccctacctctccatcctattctccaaccagtcccaactatagtcccacatcacccagctattcgccaacgtcacccagctactcaccgacctctcccagctactcacccacctctcccagctactcgcccacctctcccagctactcgcccacctctcccagctactcacccacttcccctagctactcgcccacttcccctagctactcgccaacgtctcccagctactcgccgacatctcccagctactcgccaacttcacccagctattctcccacttctcccagctactcacctacctctccaacctactcgcccacctcccccagctactcacccacttccccaagttactcacccaccagcccgaactattctccaaccagtcccaattacaccccaacatcacccagctacagcccgacatcacccagctattcccctactagtcccaactacacacctaccagccctaactacagcccaacctctccaagctactctccaacatcacccagctattccccgacctcaccaagttactccccttccagcccacgatacacaccacagtctccaacctataccccaagctcacccagctacagccccagctcgcccagctacagcccaacctcacccaagtacaccccaaccagtccttcttacagtcccagctccccagagtataccccaacctctcccaagtactcacctaccagtcccaaatattcacccacctctcccaagtactcgcctaccagtcccacctattcacccaccaccccaaaatactccccaacatctcctacttattccccaacctctccagtctacaccccaacctctcccaagtactcacctactagccccacttactcgcccacttcccccaagtactcgcccaccagccccacctactcgcccacctcccccaaaggctcaacctactctcccacttcccctggttactcgcccaccagccccacctacagtctcacaagcccggctatcagcccggatgacagtgacgaggagaactgagggcacgtggggtgcggcagcgggctagggcccagggcagcttgcccgtgctgctgtgcagttcttgcctccctcacggggcgtcacccccagcccagctccgttgtacataaatgccttgtggcagagctcccggtgaacttctggatcccgtttctgatgcagactcttgtcttgttctccacttgtgctgttagaactcactggcccagtggtgttctcactcctaccccacccaccccctgcctgtccccaaattgaagatccttccttgcctgtggcttgatgcggggcgggtaaagggtattttaacttaggggtagttcctgctgtgagtggttacagctgatcctcgggaagaacaaagctaaagctgccttttgtctgttattttatttttttgaagtttaaataaagtttactaattttgaccaaaaaaaaaa

SEQ ID NO: 89992 - DNA, 6871 bp, Homo sapiens
ttcgcgaaccggagagcgtcgtcctgagaggagtgaaggcggcaaaatggcggaccgcttctcccgcttcaacgaagaccgagactttcagggtaatcactttgatcagtatgaggaaggacacttggaaattgaacaagcgtcacttgacaagcctatagaatcgcccagtttttaaagccaggataatattggacaccgcttactccagaaacatgggtggaagctgggccagggattgggaaaatctcttcaggggagaacagatcccattccaatcgttgtcaagtatgatgtcatgggcatgggtcgcatggaaatggagcttgattatgctgaagatgctaccgaacggcgccgtgtcctagaagtagaaaaagaagacacagaagagctgagacaaaagtacaaggattatgttgacaaagagaaggcaattgccaaagccttggaagacctcagagccaacttttattgtgaactgtgtgataagcaatatcagaaacatcaggaatttgataaccatatcaactcctatgatcatgcacacaagcagagattaaaagatctgaagcagagagagtttgctcgaaatgtctcttcaagatcccgcaaggatgagaaaaaacaggaaaaagcccttcggcggctccatgagttggcagagcaaagaaaacaagctgaatgtgcacctggaagtggtcccatgttcaaaccaaccacagtggctgtagatgaagaaggtggagaagatgataaagatgaatcagctacaaatagtggcacaggtgccactgcttcttgtggcctgggatctgaattctccacagataaaggaggccctttcactgcagtacaaatcactaataccactggactggcccaggctcctgggttagcctcccaaggcatcagctttggcattaagaataatctggggaccccattgcaaaaattgggagtgtcattttcttttgccaaaaaggctcctgtcaaactcgaatcaatagcatcagttttcaaggaccatgcggaggaagggacctctgaagatggaacaaaacccgatgagaagagttctgaccaaggactgcagaaggtaggagactctgatgggagcagtaatcttgatggtaaaaaagaggatgaagaccctcaggatggagggtcccttgcctcaacattatccaaattaaaaaggatgaaacgagaagaaggagctggggctacagagcctgagtattaccactacatccccccagcacactgcaaagtaaaacctaattttccctttctactttttatgagagccagtgaacaaatggatggtgataatactacacacccaaagaatgccccagagagtaaaaaaggcagttctcccaagcctaaaagctgcatcaaggcggcagcaagccaaggagcagaaaagacagttagtgaagtctctgagcagccgaaggaaaccagcatgaccgagccctcagaaccaggaagcaaagctgaggcaaagaaggccttaggaggggatgtaagtgatcagagtttagaaagtcatagtcagaaggtttcagagacccaaatgtgtgagtccaactcttctaaagaaacctctctggccaccccagcagggaaagaaagccaagaaggacccaaacatcctactggtcccttcttcccagttttgagcaaagatgaaagcactgccctccagtggccatcagaactattaattttcaccaaggcagaaccctccatttcatacagttgtaaccctttatattttgactttaaactttcaaggaacaaagatgccagaactaaaggaacagaaaaaccaaaggatataggaagctcctcaaaggaccatctccaaggcctagatcctggtgagccaaataaaagcaaggaagtgggcggagagaaaatagtacgttcctcaggaggcagaatggacgcacctgcttcagggtctgcctgtagcggcctgaacaagcaggagcctgggggtagccatgggtctgagacagaagacacagggagaagccttcccagcaagaaagaacgatctgggaagtcccaccggcacaaaaagaaaaagaagcacaaaaaatccagcaaacacaaacgtaaacacaaggctgacacagaagagaaaagctctaaggcagagtcaggggagaaatctaagaagcgcaagaaacgaaaacgaaagaagaataagtcatcagccccagcagattctgaacgaggacccaaaccagaaccccctgggagtggcagtcccgcaccaccaagaagaaggcggagagctcaagatgactcccagcggagatccctcccagctgaagaggggagcagtggcaaaaaggatgaaggtgggggtggtagcagctcccaagaccatggtgggaggaaacacaaaggtgaacttccaccttcatcctgccagcgaagagcaggcaccaaacggagcagccggtctagccatcggagccaacccagtagtggagatgaggatagtgatgatgcttcctcacaccggctgcaccagaagtctccatcccagtacagtgaggaagaagaagaggaagattcaggcagtgagcattcccgcagccgctcaaggtctggccggcgccattcctcgcatcgttcctcccggcgttcttactcaagtagctcagatgcctcttcagaccagagctgctatagtagacagcgcagttactctgatgacagctacagtgactacagtgacagatcacgaaggcactccaagcgctcccatgactcagatgactcagactatgccagctccaaacaccgatcaaaacggcacaaatattcatcttctgatgatgactatagcctcagttgcagccagtcccgaagccgatctcggagtcataccagagagcgctcaagatcccggggccgcagccgcagcagcagttgtagtcgtagtcgaagcaagcggagaagccgtagcaccacagcccacagctggcaacggagccggagctatagccgggaccgcagccgcagcaccaggagcccttcccagagatcaggctccaggaagagatcatggggtcacgagagccctgaggagaggcattctgggcgtcgggacttcattcgttctaagatctaccgctcccagtccccccactatttccgatcaggccggggagaaggtcctgggaagaaagatgatggcagaggagatgacagtaaagcaacaggtccaccttcccagaacagcaacattggcacaggaagagggtcagaaggtgactgcagtcctgaagacaagaactctgtcactgccaaactgctactggagaagatccagtcaaggaaagtggagaggaaacctagtgtgagtgaggaggtgcaggccacccctaataaagctgggcccaagctcaaggaccccccacaaggttactttgggcccaagctccccccatctcttggcaataagcctgtccttccactgatagggaagctcccagctacgcgaaagcccaataagaagtgtgaagagtctggcttggaaaggggggaagagcaagaacagtcagagacagaagaggggcccccagggagtagtgatgccctatttgggcatcagttccctttcagaggaaacaactggccccttattagacccacccccagaagagtcaaagtctggagaagttactgctgatcaccctgtggctccgctaggccccccagcacattttgactgctaccttggggacccaaccatctcccataactacctccccgaccccagtgatgggaacaccctggagtccctggatagcagcagtcagccaggccctgtggagtccagcttgctgcctatagcaccagaccttgagcatttccccagttatgcacctcccagtggggatcctagtattgagtcaacagatggggctgaggatgctatcactggcccccctggaaagccagcccatcaccttcacccctgaggagatggagaagtacagcaagctccagcaggctgctcagcaacacatccagcagcagcttctggccaagcaagtaaaggcctttccagcctcagctgccctggccccagccacaccagccctgcaacccatccacattcagcagccagctacagcctctgccacctccatcacaactgttcagcatgccatcctacaacatcatgctgccgcagctgctgccgccatcggcattcaccctcacccccatccccaaccacttgcccaggtgcatcatattccccagccccatctgacccccatttctttgtcccacctcactcactcaatcatccctggccaccctgccacctttctcgctagccatcccatccacatcattcccgcctcagccatccatcctgggcccttcacctttcaccctgtcccacatgctgccctctaccccaccctacttgctccacggcctgctgcagcagctgccactgcacttcaccttcacccactacttcaccccatcttctcaggtcaggacctgcaacatccccccagccatggcacgtgagttgggggatgggatcctaggtagggccaggggaggagacccataaatgttcccttgggggtgttgagccattaataccagcaagtagaagctgggatgggcagtgtctgacagccaaagaattgagttttggcttgcaggggtgggtttagatttgaagtttgctttcagtttactatcagggatttctttttcctgtcctcctctcaatttgtccctccctcttctgtgtttctaagctagggaacaccagtaagtgctacccacccctctgcagcaacatctccaaactgtcaagtttagataatcccctcctccctctgcttttttcctctgctcttcccttctgtaaattttaaaacattttcctcccctctggccagtgggttgtcaccagagcacttgctgtgggcccatctggtcttgccttctcagcgccacagggaaggccaagctgttctagtggtggaagtgccaccattttggggtagtatctttgaccatctttggtgacgttacgttatcccaggtgaggtggaaagcgtctcacctggaacctgatataactcaggctgcaattccatccagttcccacatcaacggagccacacatttggcactgttatcttggtatccctcatcccagaagaggcatctccatatcccagaaaagaagatcctatcatgaataaaagctgtatggcccagagaggagctcatgtgtctaaagtgaagggtatattttcttctgttgtgttgatgtttccttcttaatttataggatttttttaatgtaaaaaattgcactgaactctataaacgtaaatgctgctttttgtagctcatataaaaaaggttccatatttgtagtatactgcaataatattttttacatccagctctttaagtgatcctcgttctggtggctttgtgtaaatatgtttgccctagttgaattaagaaactctaaaggttataaaatgaaaacaaaaaataaaatatttgttttctgctagatgcaaaactgactaagcatgtatattttaccaaacttatgtattttttgaagttatgaactataaaatgttaaaacattttttgctgggacaaaatgttaagtaatttgcagtatgtagtgcccccagtattgggatttttgagctaatgggcagcagtcagctgggggcttctgagggatgctcatctttaacagtctccctcatgtacttttgctgttttacacagagaaacaggtagaccccacagaggagaaggaggggattcaacagctttattgtctggaagcagtgagatttggtgattgtctggggggattcctgggtttccctgggtaccttgttccaggcagtcagtccatttgccttcctagtacttagccccctctgacaattttttttttaatgtgccttttgggttggtagaaacggaagtagaagtaggctggaggatgagttgggacagtcttccttttgttgggaggtgagcacatttacagatattttgcttcatagtttccatgccctctgcccagctcagtttagacagtaaacgttccttgtttcttttctcccatgacactgacaagaggaattaccacctcagcctcttttgcccctcttcttgcctttcacccaggctctcagccctaattaacacactgacccaaaggtgcttgtgttgcaggtcccatctcctttgatgaggttaacaattcccactttggcattttcctaactattcgtgtggctagaattggttggttggtcacttgacaagaaaaaccatacttacctgggccaaggctctgttcctgccttcgcaaattctcaaaagagtaaagtttatgaaaagaaagtggcaggcaaacacaactcttgactgccctcccaccctcctacctgttcagtactcatctgattcagaagcatcacttcttggataactagcactggaaaaatgaaatcatctgtgtaagtgaagggactcatttttctttgctttcagcccatgtaaataaataatacagtattaacattttcgtgctgcttcccattagcttgtagattgagccatactctggctgcctctttgccttcctaggggcattttctttaacttccagaatagtgattttaaaagtaaaaataaaaataaaccttacttacaagcataacagattgtatttaactttatcacatatgatagagatatatatgctgtaaaatgagggaaaggaactttctaataaacccaatcgatttgtggaaaaaaaaaa

SEQ ID NO: 89993 - DNA, 1799 bp, Homo sapiens
caagtacatcccaacaaaagcaggagtttagggagatgaaaagctcagtcaaatgtggtgtagggttaaatccacagagattacacacttgattcttgcattcagtgcaagtattgaagttaggaggatccttagaacctatgttgagttcagttttgcagagaggacaggttgattctggtttgggcgatttctccagttttgtgggaaggacagccttttgaggctcagctgttaaagatttgctatccttaataggtggtggctttttttctgtttctgttctttttactgttggagcttgttcagctttgggctctaatttttcagctgctggggcttttgtttcctttttcacaggtatactttttgcaggtgctggtggtgcttgacctgtggatttgggtggcccttgtgaagtaggtggctgtgaaggggcaggggcttgtttcattggggcccctggtccactttgtgaatgaggtccaggttggcctgcagtggaaattaaatttgatgcctggctgaagattgatgctccaaacccaaagagtttcccagtcacggtctcttgaggagttgtaggctgtgatttgggggcatcagtaatacttcccagattcagactgaaacgccttgactgctcctgaggctttggggactgttgaggtgtggggacagtttggccagcggtaggtcgtgggccagggggtgttggtgacccttttggcattggcttggcatctggtttaggactcattttggtttgtgctttcttgggttcttccttcttttgtacggggtcaacttgtttttgacctttgctctctgaactgggaccaggatgtgaaataatttttgaatctgatgcaggtcgaggtatggctttagaatcaaatgggctgactttttcccctgttggtggaaaactctgtgagggtttggcagagtctgtttttagaggaggggttgttttctcttcagcttgtgactgtactttggagcttggaatatcaggttttgttgttgctgatgatgaagatacaaggtcagtggttggctttaccatcttgggctgctttggtttatcatcagcaacaggggccttgtcctgctcagatggggacagaaggttctttggggaggggctggcttggacaaagaatctgcctcaggggggctgcttggccttggctgaaggagagccatgaagggttggttgtttcactagtggggggggctttttaggctcaggtgccttggagagatcctgttttggtgcagcatccttctttggggaagtctgctgtggctgtggggatgatttgctcactgctgatgtagtggtaacaggtgcagtcttcagtttgggctggggtgatgacggaactggagccagatccccgcctagagctcttttcatttgacagttcaaacagagccactcttttacctccgttaaatgaggattgggattaaaaccacagagactacagacagtggcttgacactcagtgcatgtgttaaaattggccttttctggaacatgcaacagaagttcagtggtattgcaaagaggacagatggttttatggaggccttgtgaaggaggctgttttgcagatggagacactgttggtggctgcagaggttttccagatcctgtttggcttactggctttgtagatagctgcgccgagggccctgctatgctatgttgaccacttctagttctttgcaaatctttgtctgtctcatttcctctgaccatattcgctcttttctgatacgaaatcccc

SEQ ID NO: 89994 - DNA, 3686 bp, Homo sapiens; identical to SEQ ID NO: 61021

SEQ ID NO: 89995 - DNA, 1794 bp, Homo sapiens; identical to SEQ ID NO: 60991
  misc_feature (1)...(1794): n = a,t,c or g

SEQ ID NO: 89996 - DNA, 4588 bp, Homo sapiens
cagacaccagccagccagtggcgttcctggctcctcgggattttccttttcctccgaagctgctgattcatccccaggctggagtcaggctcagctgtggggctgggagcatgggctctcaggctgctgctgagtggaggaactgggcctcctgggaggtgtcctccagcctctctggatgctccatgggtgggggtcgggagtggtgagggaagggtggcgcatctcagagccctcgcaaatttctggccagaaatgtgggggtatgggcgcagcttggccaaggccatgctgcaagggccagggtggccgtccttcctcactcctgtctggcctccctctgcagggtgcttcaaggatgaccgcatcgtcttctggacttggatgttctccacctacttcatggagaaatgggctccccggcaggacgacatgcttttctatgtgcgccggaagctggcgtactccggcagcgaaagcggtgcagacgggaggaaggcagctgagcctgaggtggaggtggaggtgtaccggcgggactccaagaagctgccaggcctgggagaccctgacatcgactgggaggagagcgtctgcctgaatctcatcctgcagaagctggactacatggtgacctgtgcggtgtgcacacgtgctgacggcggggacattcacatccataagaagaaatctcagcaagtgttcgcgtcccccagtaaacaccccatggacagcaagggggaggagtccaagatcagctaccccaacatcttcttcatgattgacagcttccgaggaaggtgttcagcgacatgaccgtagggaaaggagagatggtctgtgtggagctggtggctagtgacaaaaccaacacgttccagggggtcatctttcagggctccatccgctacgaggcgctcaagaaggtgtatgacaaccgggtgagcgtggccgcccgcatggcacagaaagatgtcgtttggcttctccaagtacagcaacatggagttttgttcgccatgaagggcccccagggcaagggccacgccgagatggcggtcagccgagtgtctacaggtgacacatccccctgtgggactgaagaggactccagcccagcttcgcccatgcacgagcgggtgacctccttcagcacaccccccaccccagaacggaacaaccgtcctgccttcttctccccatccctcaagaggaaggtgccgcggaaccggatcgctgagatgaagaagtcgcactcggccaacgacagcgaggagttcttccgggaggacgacggtggagccgatctgcacaatgcaaccaacctgcggtctcggtccctgtcgggcacaggacggtccctggtcgggtcctggctgaagctgaacagagcagatggaaacttccttctctatgcacacttaacctacgtcacgttgccgctgcatcggattttaacagacatcctggaagttcggcagaagcccatcctgatgacctagccgcgtgcggagcctgcgcagagccccggccgggcccagccctcggagtgctgccaagtgcctacctgtccaccgccaccggggtctgcgatggcacgccagtgctggagccgcagccaggcgaggccactcgactcccggggccggggccgactccacgaacaccagcccaaactgaagtgcctcttccctcccctgctggcgctgctccgccctgtgccccccgcccatcgccccccacccatctctggagagccctctgcacccaaagaggactagagatgccgagcggccatgagagagagcggaaggagcagctgatgcccagagcggggccagagcggcgggtctatgttcacgtccccccagcagcaggcggaaccacccagccagggcactcagtgcattggactgtccacatgttcttgaggaaagccggtggaagattctggaatgccgtgcggatgaacttcagcgcccgagtcagtcccagctcatcctccccagtttaccactttgttctaataggagatgggaacacgagaagtttgatggctttgccctgggctgggaatacctcacccacgcccagttccagaaaggcctccagctgagcagacggccccgatcccgccagaacggccttttgcttccagccaaagaacaccgccaacacgcacacctccaacctgggacatcccacgctgggcctcgcacggaggaacctgcagaatttggattctgagggtagtcgggaggcctcggtagccaggcagaacaggatatctgccaaagggtgtctgatgtggggtggggctggcatcctcccaggaaggttctaggtgggaccccgtcttctgggggcgggggtgtcttttcatcttccctggtttcctagaactcacttcctttgacggcgtgtgttggtcccatctctcagaccagctcactgaggcagaggagttgctcagaggctcacatgggcacccccattggttcgtgtgagcagctgcccagccccaggcctgccctcggcctggtccagcatgaaggcgtttccatctgcaaggatgcacggtaccctccccgagagcaggcctgtcccctacccaactgggaataaactggaagctgggtctctttgttgctatgtttttttgtttgaagttcccaggaatatttgaggggttccggtgatgtgtttagggatcttctctgtgggggaaaaggaagaggagggtcttgttctcccatctgtttattctttgggctctgggaacaggggactactttggggctttctccagacttttgtatgttgttattaaaagcgagctattgcatttcattctgcctcagtttgcccacctgtgaaatggggctgataccacctacctcactgaagtcccagggttcaagtgtgtggctgggtcagggcgtggtcacccgtcattctgcataggtcgggttggatgttagactcctgggatgccctcctcccccctcgccctttgtaataacctaatctgagaccgtgcttggtggggggatgtgaactttctctctcccccagcagtgtctgctcaggcctgacagctcagctctgcacgatttcatgttcctaaacccatgtcttagggcagcacagagccaggtcatgtcatgccccaaagtgtggggacagagcctcagggagccccgagcatggtccagccccatttgagtgctctccggggatgccaaatgctgcttccaagtttgagtccatgtggctaaaatacacccatttcttcaggaactcttcccctggttgttctggggatcttgggagaaacacagccctgacagctcgtccgtgggaagatgaggcagtccaggttgtgaggagcacagcggcccgccctctgttctcagaggtgaggggcgggagaaggttgtctcctctggggccagcatttggccaagctcggaggcttggccagcactgctggatggctcagagcaagctgggctccccgtctgtaagatggcaaaaatgctgcccccctcacagggtgaccatgaggaccagtcacagtgatgtgtgaaagggctcgctggtcacagaaacgtgtacaaatcatgctattttagagatcagccctcaatttgtaaggcatgtgaacagggcacgcggtgggctggtggtttcatagccgacacacagcgcctaccatgtgcagctgcctgtccgaccccatcttacagacgagaaaaccagcacacaggcaccaaggaactgtccggaactaacagcaggggccggcgatgggagtcaaacccaggcacgcggcctggcctgcatgctgagccacatggtgctgtccggacagatggacagacactcggtggagtctgcctttctcaggccctaaatccctctccaaagggtacttgcgatgccggatttaaaacttgctcagagccacttagccacttgagaaccagacagtaaggtgttactcccaggtttgtttttccaaagtaacagatgacatgtggaataaagtaatagagtaacaagtggcagggccagaaccagggtccccaaagtcctggtgttggcacatttgtacttcttgtaagaccatctttaatttttctgggaacacacctgccttttgtgtaatgcggggaagactaatgcatggtgacacctagttttcctcaacaggacacttgatcccaaaacccctttaagaccttaggtttcctcagcggaaaactgtactttaatcccaaaccccctttaagacatattggggctgggcgcagtggctgcacgcctgtaatcccagcactttgggaggctgagatgggtggatcacctgagatcaggagttcaagaccagcctgactaacatgctgaaaccccatgtctactaaagatagaaaaattagccggacatggtggcaggcacctgtaatcccagctactcggaaggctgaggaaggagaatcacttgaacctagtaggcagaggttgcagtgagccgagatcacgccattgcattctagcctgggcaacgagagcgaaactctgtctc

SEQ ID NO: 89997 - DNA, 750 bp, Homo sapiens
tcttcgtacgatttcgtgcctgggggcagtaggacgggtccgggaactaagcccatctcaaacacgtcggagtggctttctttgggggccaaggcccgagcctgaggcgggactccatgaggcctctggggcgcgagcggtttgactagggggggcgatcctttcggcggggctgacgcaaggcgcggacaggaattctgacgatcgggaaccatcttgtccggccttgatacgtctctgactacgcttcccagaggtctcctcggcaagactgtacttctcgcggtaattcagcttccaactcacgcgctggcgggaccctcagggctttaccagcaactaccccagtgccggggagggttctgctgcttcgaaagctggtaaggcctgaggtgaggaacccgggagagggcggggccgggggccaagcctcggctttgtgcggcggtggaggtgagattgaaagcgtgcgcttgcgtctgtgtggaggtgtgtggtgaatgatcgcgcgattgtgacaggctgcccttgtgatgagtgtgtttccaacgctcacaccgtgtgcagcacggcctcggagactgtggctgctggtgtgtgtgtgagagggagcaggaccacgtgcggcattgtgtgtgcggctgtggggagcttgtgcctggttgagtgttactgcgtttgtccccgtagtggtgtgcgactatatgctgtgtgactgtgtgcggcaaagatcaggtggcgatacctgcc

SEQ ID NO: 89998 - DNA, 8486 bp, Homo sapiens
tttcgtggagccgagctgggtgcggtgaggcgcgcagatcaccgcggttcctgggcagggcacggaaggctaagcaaggctgacctgctgcagctcccgcctcgtgcgctcgccccacccggccgccgcccgagcgctcgagaaagtcctctcgggagaagcagcgcctgttcccggggcagatccaggttcaggtcctggctataagtcaccatggcacagcaagctgccgataagtatctctatgtggataaaaacttcatcaacaatccgctggcccaggccgactgggctgccaagaagctggtatgggtgccttccgacaagagtggctttgagccagccagcctcaaggaggaggtgggcgaagaggccatcgtggagctggtggagaatgggaagaaggtgaaggtgaacaaggatgacatccagaagatgaacccgcccaagttctccaaggtggaggacatggcagagctcacgtgcctcaacgaagcctcggtgctgcacaacctcaaggagcgttactactcagggctcatctacacctattcaggcctgttctgtgtggtcatcaatccttacaagaacctgcccatctactctgaagagattgtggaaatgtacaagggcaagaagaggcacgagatgccccctcacatctatgccatcacagacaccgcctacaggagtatgatgcaagaccgagaagatcaatccatcttgtgcactggtgaatctggagctggcaagacggagaacaccaagaaggtcatccagtatctggcgtacgtggcgtcctcgcacaagagcaagaaggaccagggcgagctggagcggcagctgctgcaggccaaccccatcctggaggccttcgggaacgccaagaccgtgaagaatgacaactcctcccgcttcggcaaattcattcgcatcaactttgatgtcaatggctacattgttggagccaacattgagacttatcttttggagaaatctcgtgctatccgccaagccaaggaagaacggaccttccacatcttctattatctcctgtctggggctggagagcacctgaagaccgatctcctgttggagccgtacaacaaataccgcttcctgtccaatggacacgtcaccatccccgggcagcaggacaaggacatgttccaggagaccatggaggccatgaggattatgggcatcccagaagaggagcaaatgggcctgctgcgggtcatctcaggggttcttcagctcggcaacatcgtcttcaagaaggagcggaacactgaccaggcgtccatgcccgacaacacagctgcccaaaaggtgtcccatctcttgggtatcaatgtgaccgatttcaccagaggaatcctcaccccgcgcatcaaggtgggacgggattacgtccagaaggcgcagactaaagagcaggctgactttgccatcgaggccttggccaaggcgacctatgagcggatgttccgctggctggtgctgcgcatcaacaaggctctggacaagaccaagaggcagggcgcctccttcatcgggatcctggacattgccggcttcgagatctttgatctgaactcgtttgagcagctgtgcatcaattacaccaatgagaagctgcagcagctcttcaaccacaccatgttcatcctggagcaggaggagtaccagcgcgagggcatcgagtggaacttcatcgactttggcctcgacctgcagccctgcatcgacctcattgagaagccagcaggccccccgggcattctggccctgctggacgaggagtgctggttccccaaagccaccgacaagagcttcgtggagaaggtgatgcaggagcagggcacccaccccaagttccagaagcccaagcagctgaaggacaaagctgatttctgcattatccactatgccggcaaggtggattacaaagctgacgagtggctgatgaagaacatggatcccctgaatgacaacatcgccacactgctccaccagtcctctgacaagtttgtctcggagctgtggaaggatgtggaccgcatcatcggcctggaccaggtggccggcatgtcggagaccgcactgcccggggccttcaagacgcggaagggcatgttccgcactgtggggcagctttacaaggagcagctggccaagctgatggctacgctgaggaacacgaaccccaactttgtccgctgcatcatccccaaccacgagaagaaggccggcaagctggacccgcatctcgtgctggaccagctgcgctgcaacggtgttctcgagggcatccgtatctgccgccagggcttccccaacagggtggtcttccaggagtttcggcagagatatgagatcctgactccaaactccattcccaagggtttcatggacgggaagcaggcgtgcgtgctcatgataaaagccctggagctcgacagcaatctgtaccgcattggccagagcaaagtcttcttccgtgccggtgtgctggcccacctggaggaggagcgagacctgaagatcaccgacgtcatcatagggttccaggcctgctgcaggggctacctggccaggaaagcatttgccaagcggcagcagcagcttaccgccatgaaggtcctccagcggaactgcgctgcctacctgaagctgcggaactggcagtggtggcggctcttcaccaaggtcaagccgctgctgcaggtgagccggcaggaggaggagatgatggccaaggaggaggagctggtgaaggtcagagagaagcagctggctgcggagaacaggctcacggagatggagacgctgcagtctcagctcatggcagagaaattgcagctgcaggagcagctccaggcagaaaccgagctgtgtgccgaggctgaggagctccgggcccgcctgaccgccaaagaagcagggaattagaagagatctgccatgacctagaggccagggtggaggaggaggaggagcgctgccagcacctgcaggcggagaagaagaagatgcagcagaacatccaggagcttgaggagcagctggaggaggaggagagcgcccggcagaagctgcagctggagaaggtgaccaccgaggcgaagctgaaaaagctggaggaggagcagatcatcctggaggaccagaactgcaagctggccaaggaaaagaaactgctggaagacagaatagctgagttcaccaccaacctcacagaagaggaggagaaatctaagagcctcgccaagctcaagaacaagcatgaggcaatgatcactgacttggaagagcgcctccgcagggaggagaagcagcgacaggagctggagaagacccgccggaagctggagggagactccacagacctcagcgaccagatcgccgagctccaggcccagcatcgcggagctcaagatgcagctggccaagaaagaggaggagctccaggccgccctggccagagtggaagaggaagctgcccagaagaacatggccctcaagaagatccgggagctggaatctcagatctctgaactccaggaagacctgaagtgcgagcggggcttccaggaataaagctgagaagcagaaacgggaccttggggaagagctagaggcgctgaaaacagagttggaggacacgctggattccacagctgcccagcaggagctcaggtcaaaacgtgagcaggaggtgaacatcctgaagaagaccctggaggaggaggccaagacccacgaggcccagatccaggagatgaggcagaagcactcacaggccgtggaggagctggcggagcagctggagcagacgaagcgggtgaaagcaaacctcgagaaggcaaagcagactctggagaacgagcggggggagctggccaacgaggtgaaggtgctgctgcagggcaaaggggactcggagcacaagcgcaagaaagtggaggcgcagctgcaggagctgcaggtcaagttcaacgagggagagcgcgtgcgcacagagctggccgacaaggtcaccaagctgcaggtggagctggacaacgtgaccgggcttctcagccagtccgacagcaagtccagcaagctcaccaaggacttctccgcgctggagtcccagctgcaggacactcaggagctgctgcaggaggagaaccggcagaagctgagcctgagcaccaagctcaagcaggtggaggacgagaagaattcccttccgggagcagctggaggaggaggaggaggaggccaagcacaacctggagaagcagatcgccaccctccatgcccaggtggccgacatgaaaaagaagatggaggacagtgtggggtgcctggaaactgctgaggaggtgaagaggaagctccagaaggacctggagggcctgagccagcggcacgaggagaaggtggccgcctacgacaagctggagaagaccaagacgcggctgcagcaggagctggacgacctgctggtggacctggaccaccagcgccagagcgcgtgcaacctggagaagaagcagaagaagtttgaccagctcctggcggaggagaagaccatctctgccaagtatgcagaggagcgcgaccgggctgaggcggaggcccgagagaaggagaccaaggctctgtcgctggcccgggccctggaggaagccatggagcagaaggcggagctggagcggctcaacaagcagttccgcacggagatggaggaccttatgagctccaaggatgatgtgggcaagagtgtccacgagctggagaagtccaagcgggcaatagagcagcaggtggaggagatgaagacgcagctggaagagctggaggacgagctgcaggccaccgaagatgccaagctgcggttggaggtcaacctgcaggccatgaaggcccagttcgagcgggacctgcagggccgggacgagcagagcgaggagaagaagaagcagctggtcagacaggtgcgggagatggaggcagagctggaggacgagaggaagcagcgctcgatggcagtggccgcccggaagaagctggagatggacctgaaggacctggaggcgcacatcgactcggccaacaagaaccgggacgaagccatcaaacagctgcggaagctgcaggcccagatgaaggactgcatgcgcgagctggatgacacccgcgcctctcgtgaggagatcctggcccaggccaaagagaacgagaagaagctgaagagcatggaggccgagatgatccagttgcaggaggaactggcagccgcggagcgtgccaagcgccaggcccagcaggagcgggatgagctggctgacgagatcgccaacagcagcggcaaaggagccctggcgttagaggagaagcggcgtctggaggcccgcatcgcccagctggaggaggagctggaggaggagcagggcaacacggagctgatcaacgaccggctgaagaaggccaacctgcagatcgaccagatcaacaccgacctgaacctggagcgcagccacgcccagaagaacgagaatgctcggcagcagctggaacgccagaacaaggagcttaaggtcaagctgcaggagatggagggcactgtcaagtccaagtacaaggcctccatcaccgccctcgaggccaagattgcacagctggaggagcagctggacaacgagaccaaggagcgccaggcagcctgcaaacaggtgcgtcggaccgagaagaagctgaaggatgtgctgctgcaggtggatgacgagcggaggaacgccgagcagtacaaggaccaggccgacaaggcatctacccgcctgaagcagctcaagcggcagctggaggaggccgaagaggaggcccagcgggccaacgcctcccgccggaaactgcagcgcgagctggaggacgccactgagacggccgatgccatgaaccgcgaagtcagctccctaaagaacaagctcaggcgcggggacctgccgtttgtcgtgccccgccgaatggcccggaaaggcgccggggatggctccgacgaagaggtagatggcaaagcggatggggctgaggccaaacctgccgaataagcctcttctcctgcagcctgagatggatggacagacagacaccacagcctccccttcccagaccccgcagcacgcctcttccccaccttcttgggactgctgtgaacatgcctcctcctgccctccgccccgtccccccatcccgtttccctccaggtgttgttgagggcatttggcttcctctgctgcatccccttccagctccctcccctgctcagaatctgataccaaagagacagggcccgggccagggcagagagcgaccagcaggcttcctcagccctgtttttgccaaaaagcacaagatgttgagggcgagcaggggcagggcccccggggaggggccaagagttttctattgaatctatttttcttcagactgagggctttttggtagttgggagcccccgcagttcgttcagccttccctgacgttctgccaccagcgccccccactcctcctcctttctttgctgtttgcaatcacacgtggtgacctcacacacctctggccccttggggcttcccactcccatgggctctggggcggtccagaaggagcaggccctgggcttccacctctgtgcagggcacagaaggctggggtggggggaggagtggattcctccccacccctgtcccaggcagcgccactgtccgctgtctccctcctgattttaaaatgtctcaagtgcaatgccccctcccctcctttaccgaggacagcctgcctctgccacagcaaggctgtcggggtcaagctggaaaggccagcagccttccagtggcttctcccaacactcttggggaccaaatatatttaatggttaagggacttgtcccaagtctgacagccagagcgttagaggggccagcggccctcccaggcgatcttgtgtctactctaggactgggcccgagggtggtttacctgcaccgttgactcagtatagtttaaaaatctgccacctgcacaggtatttttgaaagcaaaataaggttttcttttttcccctttcttgtaataaatgataaaattccgagtctttctcactgcctttgtttagaagagagtagctcgtcctcactggtctacactggttgccgaatttacttgtattcctaactgttttgtatatgctgcattgagacttacggcaagaaggcattttttttttttaaaggaaacaaactctcaaatcatgaagggatataaaagctgcatatgcctacaaagctctgaattcaggtcccagttgctgtcacaaaggagtgagtgaaactcccaccctacccccttttattatataaaaaaagtgccttagcatgtgttgcagctgtcaccactacagtaagctggtttacagatgttttccactgagcatcacaataaagagaaccatgtgctaaccagcttactgtagtggtgacagctgcaacacatgctaaggcacttttattatataaaaaagggggtagggtgggagtttcactcactcctttgtgacagcaactgggacctgaattcagagctttgtaggcatatgcagcttttatatcacttcatgatttgagagtttgtttgctttcaaaaaaagaaatgccttcttgccgtaagtctcaatgcagcatatacaaaacagttaggaatacaagtaaattccgcaaccagtgtagaccagtgaggacgagctactctcttctaaacaaaggcagtgagaaagactcggaattgtatcatttattacaagaaaggggaaaaaagaaaaccttattttgctgtcaaaaatacctgtgcaggtggcagatttttaaactatactgagtcaacggtgcaggtaaaccaccctcgggcccagtcctagagtagacacaagatcgcctgggagggccgctggcccctctaacgctctggctgtcagacttgggacaagtcccttaaccattaaatatatttggtccccaagagtgttgggagaatccactggaaggctgctggcctttccatctcaggctgcaggagaagaggcttattcggcaggtttggcctcagccccatccgctttgccatctacctcttcgtcggagccatccccggcgcctttccgggccattcggcggggcacgacaaacggcaggtccccgcgcctgagcttgttctttagggaggctgacttcgcggttcatggcatcggccgtctcagtggcgtcctccagctcgcgctgcagtttccggcgggaggcgttggcccgctgggcctcctcttcggcctcctccagctgccgcctgagctgcttcaggcgggtagatgccttgtcggcctggtccttgtactgctcggcgttcctccgctcgtcatccacctgcagcagcctcgtgcc

SEQ ID NO: 89999 - DNA, 1675 bp, Homo sapiens
gaggcagtaaggacttggactcctctgtccagcttttaacaatctaagttacgccctcttctgggtcacgctagaatcagatctgctctccagcatcttctgtttcctggcaagtgtttcctgctactttggattggccacgatgggctggagctgccttgtgacaggagcaggagggcttctgggtcagaggatcgtccgcctgttggtggaagagaaggaactgaaggagatcagggccttggacaaggccttcagaccagaattgagagaggaattttctaagctccagaacaggaccaagctgactgtacttgaaggagacattctggatgagccattcctgaaaagagcctgccaggacgtctcggtcgtcatccacaccgcctgtatcattgatgtctttggtgtcactcacagagagtccatcatgaatgtcaatgtgaaaggtacccagctactgttggaggcctgtgtccaagccagtgtgccagtcttcatctacaccagtagcatagaggtagccgggcccaactcctacaaggaaatcatccagaacggccacgaagaagagcctctggaaaacacatggcccactccatacccgtacagcaaaaagcttgctgagaaggctgtgctggcggctaatgggtggaatctaaaaaatggtgataccttgtacacttgtgcgttaagaccccacatatatctatggggaaggaggcccattcctttctgccagtataaatgaggccctgaacaacaatgggatcctgtcaagtgttggaaagttctctacagtcaacccagtctatgttggcaacgtggcctgggcccacattctggccttgagggctctgcgggaccccaagaaggccccaagtgtccgaggtcaattctattacatctcagatgacacgcctcaccaaagctatgataaccttaattacatcctgagcaaagagtttggcctccgccttgattccagatggagccttcctttaaccctgatgtactggattggcttcctgctggaagtagtgagcttcctactcagcccaatttactcctatcaaccccccttcaaccgccacacagtcacattatcaaatagtgtgttcaccttctcttacaagaaggctcagcgagatctggcgtataagccactctacagctgggaggaagccaagcagaaaaccgtggagtgggttggttcccttgtggaccggcacaaggagaccctgaagtccaagactcagtgatttaaggatgacagagatgtgcatgtgggtattgttaggaaatgtcatcaaactccacccacctggcttcatacagaaggcaacaggggcacaagcccaggtcctgctgcctctctttcacacaatgcccaacttactgtcttcttcatgtcatcaaaatctgcacagtcactggcccaaccagaactttctgtcctaatcatacaccagaagacaaacaatatgatttgctgttaccaaatctcagtggctgattctgaacaattgtggtctctcttaacttgaggttctcttttgactaatagagctccatttcccctcttaaatgagaaagcatttcttttctctttaatctcctattccttcacacagttcaacataaagagcaataaatgttttaatgcttaacatgg

SEQ ID NO: 90000 - DNA, 2769 bp, Homo sapiens
gtgctctacaggagtttccaaagctcctttaacttacctgatgtcttacggctttgagcttgggtggagaaagggtaacagggctgtggcttgccgggaagacagaggaggagagtctgtgggcatggggcaggagtcaattctgtctcaggttcactggtgggaggctgagccggtggaaaagacaccgggaagagactcagaggcgaccataatgtcgttacgtgtacacactctgcccaccctgcttggagccgtcgtcagaccgggctgcagggagctgctgtgtttgctgatgatcacagtgactgtgggccctggtgcctctggggtgtgccccaccgcttgcatctgtgccactgacatcgtcagctgcaccaacaaaaacctgtccaaggtgcctgggaaccttttcagactgattaagagactggacctgagttataacagaattgggcttctggattctgagtggattccagtatcgtttgcaaagctgaacaccctaattcttcgtcataacaacatcaccagcatttccacgggcagtttttccacaactccaaatttgaagtgtcttgacttatcgtccaataagctgaagaccggtgaaaaatgctgtattccaagagttgaaggttctggaagtgcttctgctttacaacaatcacatatcctatctcgatccttcagcgtttggagggctctcccagttgcagaaactctacttaagtggaaattttctcacacagtttccgatggatttgtatgttggaaggttcaagctggcagaactgatgtttttagatgtttcttataaccgaattccttccatgccaatgcaccacataaatttagtgccaggaaaacagctgagaggcatctaccttcatggaaacccatttgtctgtgactggttccctggtctccttgctggtcttttggtatcgtaggcactttagctcagtgatggattttaagaacgattacacctgtcgcctgtggtctgactccaggcactcgcgtcaggtacttctgctccaggatagctttatgaattgctctgacagcatcatcaatggttcctttcgtgcgcttggctttattcatgaggctcaggtcggggaaagactgatggtccactgtgacagcaagacaggtaatgcaaatacggatttcatctgggtgggtccagataacagactgctagagccggataaagagatggaaaacttttacgtgtttcacaatggaagtctggttatagaaagccctcgttttgaggatgctggagtgtattcttgtatcgcaatgaataagcaacgcctgttaaatgaaactgtggacgtcacaataaatgtgagcaatttcactgtaagcagatcccatgctcatgaggcatttaacacagcttttaccactcttgctgcttgcgtggccagtatcgttttggtacttttgtacctctatctgactccatgcccctgcaagtgtaaaaccaagagacagaaaaatatgctacaccaaagcaatgcccattcatcgattctcagtcctggccccgctagtgatgcctccgctgatgaacggaaggcaggtgcaggtaaaagagtggtgtttttggaacccctgaaggatactgcagcagggcagaacgggaaagtcaggctctttcccagcgaggcagtgatagctgagggcatcctaaagtccacgagggggaaatctgactcagattcagtcaattcagtgttttctgacacaccttttgtggcgtccacttaatttgtgcctatatttgtatgatgtcataatttaatctgttcatatttaactttgtgtgtggtctgcaaaataaacagcaggacagaaattgtgttgttttgttctttgaaatacaaccaaattctcttaaaatgattggtaggaaatgaggtaaagtacttcagttcctcaatgtgccagagaaagatggggttgttttccaaagtttaagttctagatcacaatatcttagcttttagcactattggtaatttcagagtaggcccaaaggtgatatgactcccattgtccctttatttaggatattgaaagaaaaaataaactttatgtattagtgtcctttaaaaatagactttgctaacttactagtaccagagttattttaaagaaaaacactagtgtccaatttcatttttaaaagatgtagaaagaagaatcaagcatcaattaattataaagcctaaagcaaagttagatttgggggttattcagccaaaattaccgttttagaccagaatgaatagactacactgataaaatgtactggataatgccacatcctatatggtgttatagaaatagtgcaaggaaagtacatttgtttgcctgtcttttcattttgtacattcttcccattctgtattcttgtacaaaagatctcattgaaaatttaaagtcatcataatttgttgccataaatatgtaagtgtcaataccaaaatgtctgagtaacttcttaaatccctgttctagcaaactaatattggttcatgtgcttgtgtatatgtaaatcttaaattatgtgaactattaaatagaccctactgtactgtgctttggacatttgaattaatgtaaatatatgtaatctgtgactttgatattttgttttatttggctatttaaaaacataaatctaaaatgtcttatgttatcagattatgctattttgtataaagcaccactgatagcaaatctctctcc

SEQ ID NO: 90001 - DNA, 3387 bp, Homo sapiens; identical to SEQ ID NO: 60755

SEQ ID NO: 90002 - DNA, 901 bp, Homo sapiens
aaatctcgtgtctttgtctcgctgcagcgggtgctgcaggtctggccttcacttttctgcgtcctcttactcctagaggcccagcctctgtggcgctgtgatctggttatcgggagattcacagctaagacgccaggatcccccggaagcctagaaatgctctgtgttctcgttttgcccaagacctttggctagagcagaacataaaagattctttccaaaaagtgacactgagcagatatggaaaatatggacataagaatttacagttaagaaaaggctgtaaaagtgtggatgagtgtaagggacaccaaggaggttataatggacttaaccaatgtttgaaaattaccacaagcaaaatatttcaatgtaataaatatgtaaaagtcatgcataaattttcaaattcaaatagacacaagataagacatactgaaaataaacatttcagatgtaaagaatgtgacaaatcactttgcatgctttcacgcctaactcaacataaaaaattcatactagagagaatttctacaaatgtgaagagtgtggaaaaacctttaactggtccacaaacctttctaaacctaagaaaattcatactggagaaaacccctacaaatgtgaagtatgtggaaaagcctttcaccaatcctcaatccttactaaacataagataattcgtactggagaaaaaccctataaatgtgcacactgtggcaaagcctttaaacagtcctcacaccttactagacataagataattcatactgaagagaaaccctacaaatgtgaacaatgtggcaaggtctttaagcagtccccaacccttactaaacatcagataatttatactggagaggaaccatacaaatgtgaggaatgtggcaaagcttttaac

SEQ ID NO: 90003 - DNA, 1376 bp, Homo sapiens
gcgcttgcaactccacctcagcaggggtctctcagtcctcttaaagcaaggaaagagtactgtgtgctgagagaccatggcaaagaatcctccagagaattgtgaagactgtcacattctaaatgcagaagcttttaaatccaagaaaatatgtaaatcacttaagatttgtggactggtgtttggtatcctggccctaactctaattgtcctgttttgggggagcaagcacttctggccggaggtacccaaaaaagcctatgacatggagcacactttctacagcaatggagagaagaagaagatttacatggaaattgatcctgtgaccagaactgaaatattcagaagcggaaatggcactgatgaaacattggaagtacacgactttaaaaacggatacactggcatctacttcgtgggtcttcaaaaatgttttatcaaaactcagattaaagtgattcctgaattttctgaaccagaagaggaaatagatgagaatgaagaaattaccacaactttctttgaacagtcagtgatttgggtcccagcagaaaagcctattgaaaaccgagattttcttaaaaattccaaaattctggagatttgtgataacgtgaccatgtattgggatcaatcccactcttaatatcaggaacatttgcaaagcagttgcatcacaactttgcatttattatcttagtttctgagttacaagactttgaggaggagggagaagatcttcactttcctgccaacgaaaaaaaagggattgaacaaaatgaacagtgggtggtccctcaagtgaaagtagagaagacccgtcacgccagacaagcaagtgaggaagaacttccaataaatgactatactgaaaatggaatagaatttgatcccatgctggatgagagaggttattgttgtatttactgccgtcgaggcaaccgctattgccgccgcgtctgtgaacctttactaggctactacccatatccatactgctaccaaggaggacgagtcatctgtcgtgtcatcatgccttgtaactggtgggtggcccgcatgctggggagggtctaataggaggtttgagctcaaatgcttaaactgctggcaacatataataaatgcatgctattcaatgaatttctgcctatgaggcatctggcccctggtagccagctctccagaattacttgtaggtaattcctctcttcatgttctaataaacttctacattatcaccaacagcctgattgctgctgaacacactgggtaagtgtttgctgagaatattcacagcaactgaaatggagcagacccgtcaaacatagatgactatgctgaggctcagaaaacaatgccccaaaatgaaa

SEQ ID NO: 90004 - DNA, 340 bp, Homo sapiens
gggaacgagccggggccacgatgggccgcgagtttgggaatctgacgcggaagctgcatgggatcagctacagattgggaccgttcgagcagggcgcctatccggacgtcttcactaaaggaatccccaatgttctgcgccgcaatcgggagtctttctttcgcgtggtgccgcagttagtagcggtttatcttatctacacatgggggactgaacagttcgagagaaccaagaggaagaattcagctgcctatgaaaatgacaaatgagcaacgcatccggatgacggctccctgtctctgaaagacctttctctggaagaggagtctgcattgtactg

SEQ ID NO: 90005 - DNA, 4450 bp, Homo sapiens; identical to SEQ ID NO: 60759

SEQ ID NO: 90006 - DNA, 1815 bp, Homo sapiens
ggagagtggagaagagaagagaacaaaaagtaacttcaggatggggaccagtgaagtacttgcggcctgtacccagaatcaaaccccaagtttcacatgcctgaggatgtacgagaaaaaaaggaaaatcttctactcaattctgagagatctactaggctcttaacaaagaccagtcattcacaaggaggggatcaagctttaagtaagtccacagggtcaccaacagagaagttgattgaaaaacgtcaaggagctaagactgtttttaacaagttcagcaacatgaattggccagtggacattcaccctttaaacaaaagtttattcaaagataataaatggaagaaaactgaggagacccaagagaaacgaaggtctttccttccaggagttttgcaagaaatacggtgggggtgagtcatcatcagtcacatctttttcatacagtatccagaatctatgtagaagataaacacaaaatcttatattgtgaggtacctaaggctggctgttccaattggaaaagaattctgatggtactaaatggattggcttcctctgcatacaacatctcccacaatgctgtccactacgggaagcatttgaagaagctagatagctttgacctaaaagggatatatacccgcttagatacttacaccaaagctggtgttggttcgtgatcccatggaaagattagtatcagcctttagggacaaatttgaccaccccaatagttattaccatccagtattcggaaaggcaattatcaagaaatatcgaccaaatgcctgtgaagaagcattaattaatggatctggagtcaagttcaaagagtttatccactacttgctggattcccaccgtccagtaggaatggacattcactgggaaaaggtcagcaaactctgctatccgtgtttgatcaactatgattttgtagggaaatttgagactttggaagaagatgccaattactttttacagatgatcggtgctccaaaggagctgaaatttcccaactttaaggataggcactcttccgatgaaagaaccaatgctcaagtcgtgagacagtatttaaaggatctgactagaactgagagacaattaatctatgacttttattacttggactatttaatgtttaattatacaactccatttttgtagtttgcattcattttctaaaaccctgtatatacttaatgatgataagttcaaatcagctgtaatttttctataattctctgtatgaccagaaatttaacccaagtgcagttgtccttgatttaatgtagatttttaccaaatagtatgacacccaattggcacaaagttataggaaaatcacctacaggagatgtaaacaacttgagttgctctaaaatgtttggaaaagagctgcttttgcattatgaattatattgttgaagcaataacctagccagctgttgcattagctaaagcagcctcttgcaatggtaggaaaaaaggatctcaaatagcatgagtgtatgtctatatcctgaaatttattgtctaagatgcatgaatatatttttagcagtctgtggcatattaatcaaactgttgaattgttttcttacaccctggaaatctttctatcaactataatgataaatccattttgaagtgatattttggacttaggcattttactttagattggaaggcattatgtgatttacaatatgagaatatagcagaaaaaccagatgaggctgtggctttttataccccacagccaataaaaaatgcacaaaaaaataagatcaaaaaaaaaaaaaa

SEQ ID NO: 90007 - DNA, 472 bp, Homo sapiens
  misc_feature (1)...(472): n = a,t,c or g
ccccgcccccnnnattgaaaccgtttgatatcttacgccagcctggcacgaggtggcacgaggcctcgtgccctgggctgcctgccctcacgtgatggtttgtactggttcctgcctctgtggggcccagaggagccaggatcactccccacaccccacaaagaatgagatccaaatccctccccaggccccgtgcaccctgttccaccagcctgtttcccctcctgccacgtggcctccgcctctgtgtcccccacatctgttctcacgcccaggccttccttcatgctgtctctgtgggagaggccagaggccccgagggctctccccacccttccacgcctggcttctctgcccttccagagcctccgggacctgtcccctttgcacctccagccttggggcatggaccacgcacagcacagaaggtgcagcagacacttcttggtgtaaccctcactggaatgattaa

SEQ ID NO: 90008 - DNA, 3291 bp, Homo sapiens
gtgcgacaaatctggcgctgtccccttcagcaccacgcggagtccgcgccgcccctccccgcgctcagctgggcccagcctctcctctgtctctcctcggtctcagctctgggcgagcagcggcctgtctgaagagcatgcagcccccttactccccgcctggcctcgccatccctgcccccccagcctgacccccggccccagcatggcccagggtgccatgcgcttctgctcggaaggcgactgtgccatctccccaccacgatgcccacgccgctggctccccgaaggcccggtgccccagagccccccagccagcatgtatggcagcacaggctccttgctacggcgagtggcaggtccaggtcctcgaggccgggaactgggacgtgtgacagcaccctgtacacctctgcgtggccccccctcaccccgtgttgctccctcaccctgggcaccctcttcacccactgggcagcccccacccggggcccagagctctgtggtcatcttccgctttgtggagaaggccagtgtgaggccactgaatgggctacctgctccagggggcttgagtcggagctgggatctgggtggggtttctcctcccaggcccaccccagcccttgggcctggctccaaccggaagttacggctggaagcatccacatcagacccactccccgccagaggaggctcggccctacctggcagccggaaccttgtacatgggccgccagccccaccccaggttggagcagatggcctttactcctctctccccaatgggctgggggacccccctgagcgcctggccacactcttcggaggacctgctgacactggattcctgaaccagggggatacctggtcctccccccgggaagtctcctctcatgcccagagaatcgctagagccaaatgggaattcttctatggctccttggacccccccagctcaggtgctaagcccccagagcaggcccccccatctccacctggggtgggctcaaggcagggctctggggtggctgtggggcgagcagccaagtactccgagacagacctggacacggtgcccctgaggtgctaccgcgagactgacatcgatgaggtgctggctgagcgggaggaggccgactcggccatcgaaagtcagcccagctctgagggcccaccaggcactgcctacccacctgccccacggcccggcccactccctggccctcatcccagcctcggcagtggcaatgaggatgaggacgacgatgaggcaggtggggaagaagatgtggacgacgaggtgtttgaggcctctgaaggggcccggccagggagccggatgcctctcaagtcacctgtgccctttctacctgggacgagcccctcggctgatgggcctgactctttcagttgtgtgttcgaagccatcctggagtcacaccgggccaaaggcacctcctataccagcctcgcctcgctggaggccttggcctcacctggcccaacccagagccccttcttcacctttgagctgcctccccaaccccctgcaccccggcccgacccaccagctcccgccccacttgcccctcttgaaccggattctggtaccagctctgctgctgatggtccttggacacagagaggggaggaggaggaggcagaggccagagccaagctggccccagggagggagccccctagtccctgccactcagaggacagccttgggctgggggcagcaccccttggcagcgaaccacccctgagccagctggtgtccgactcagactcagagctggacagcacagagcggctggccctgggaagcacagacaccttgtccaatgggcagaaagcggacctggaggctgcgcagcgcctggccaagaggctgtaccgactagatggcttcaggaaggccgatgtggcccggcacctgggcaagaacaatgacttcagcaaactggtggctggggagtacctcaagttctttgtcttcacgggcatgactctggaccaagctctcagggtgtttctgaaggagctggccttaatgggtgagacccaggaacgagagcgcgtgctggcccacttctcccagcgatacttccagtgcaatcctgaagccctgtcctcagaggacggcgcccacacgctgacctgtgcgctcatgctgctcaacacggatctccacggccataacatcgggaagcgcatgacctgcggggacttcatcgggaacctggagggcctcaatgatggcggcgacttccctagggagctgctcaaggccttgtacagctccatcaagaatgagaagctgcagtgggccatagacgaggaggagctgagacgctttctgtctgagttggccgaccccaaccccaaggtcatcaagcggatcagcgggggcagtggcagtggctccagccctttcctggacctgactcccgagcctggggctgccgtctacaagcacggggccctggtgcgaaaggtgcacgcagaccctgactgcaggaagacacctcggggcaagcggggctggaagagcttccacgggatcctcaagggcatgatcctctacctgcagaaggaggagtacaagcctgggaaggccctttcagagacggagctcaagaatgccatcagcatccaccatgccctggccactcgtgccagttaactacagcaagaggccccacgtcttctacctgcgcacagctgactggcgggtcttcctcttccaggccccgagcctggagcagatgcagtcctggatcactcgcatcaatgtagtagccgctatgttctctgcgccccccttcccagctgctgttagctcccaaaagaagttcagccgccctctcctgcccagcgctgccacccgcctctcccaggaggagcaggtgcggacccacgaggccaagctgaaggccatggcaagtgagctgcgggagcaccgggccgcccagctgggcaagaagggccggggcaaggaggctgaagagcagcggcagaaggaggcctacctggagtttgagaaatcccgctacagcacctatgcagcgctgcttcgggtcaagctgaaggcaggcagtgaggagctggatgcagtggaggcagcactggcccaggccgggagcacagaggatggactccctccttctcactccagtccctccctgcagcccaaaccctccagccagccccgggctcagcgtcacagctcagagcctcggccaggggcaggcagtgggcggcggaagccctgagatgaggttt

SEQ ID NO: 90009 - DNA, 1968 bp, Homo sapiens
gggtcagggtttttgacgttcctcgccagctgcacaaacctcccggagcaagtgtgagtgtgggtgagagtgcgcgcgcgcgcacgggctggctgcgcttggcacgcttggtggcccagggtcccggggcccggggtcccgtctggcggcccgggattaccgtgacgtcacattgagcctctggccaccttggactgggacacctccggagcctcacagccccgcgccgcgccgcgcctcacctcgccaccacgcgcctttgggaacccgcatcttcttccttcccctgcccatccatgggcccttctgtcttccggaccccacgggccggaggggcgccttccggagcgcagggctcggcagccgggctgccctcggctctgcctccactggggccaaccaggcgaaggaaccggcgctgggcatccgcagcggtgtaaggaactgagacacctcactgctgggggcgcggaacagctgggctgagacgggaactcgacagggaagagagagacgggccagggacagccaccatgtccttcccacactttggacacccgtaccgcggcgctttccagtttctgggcgtcggcaagttccagcaccacatgctgcgaatctaccctacgctctgtatcatatgtggcttcaggctccaccccagcgcccgctctttgctgcgcacccttacgatagtcgactgctgggcagtgcgcgaccggagctgggcgccgccttgggcatctatggagcaccctatgcggccgctgcagctgcccagagctaccctggctacctgccctatagcccagagcccccctcactgtatggggcactgaatccacagtatgaatttaaggaggctgcagggagttttacatccagcctggcacaaccaggagcctattatccctatgagcggactctggggcagtaccaatatgaacggtatggcgcagtggaattgagtggcgccggtcgccgaaagaacgcgacccgggagaccaccagtacactcaaggcctggctcaacgagcaccgcaaaaacccctaccccactaagggtgagaagatcatgctggccatcatcaccaagatgaccctcacccaggtgtccacctggttcgccaacgcacgccggcgcctcaagaaagagaacaaaatgacatgggcgcccaagaacaaaggtggggaggagaggaaggcagagggaggagaggaggactcactaggctgcctaactgctgacaccaaagaagttactgctagccaggaggcccgggggctccggctgagtgacctggaagacctggaggaagaggaggaggaggaggaggaagctgaagacgaggaggtagtggccacagctggggacaggctgacggagttccgaaagggcgcgcagtcactgcctgggccgtgcgctgcagctcgagagggccgattggagcgcagggagtgcggcctggctgcgccccgcttctccttcaatgacccttccggatcggaagaagctgacttcctctcggcggagacaggcagccctaggttgaccatgcactacccatgcttggagaaaccgcgcatctggtctctggcgcacaccgcgacagccagcgctgttgaaggtgcacccccagcccggcctaggccacgaagtcctgagtgccgtatgattcctggacagcctcctgcctctgcccggcgactctcagtccccagagactccgcgtgcgacgagtcttcctgcatacccaaagcctttggaaaccccaagtttgccctgcagggactaccgctgaactgtgcgccgtgcccgcggaggagcgagcctgtagtgcagtgccagtacccgtctggagcagaaggtagtgggcccccagcggcgctgggagtatctatgcaaaagacacccacctaccgccccgcccggcaattgcacaccctctgccattccagtctgcccag

SEQ ID NO: 90010 - DNA, 1151 bp, Homo sapiens
aagatggaaaggactgagatgatgcccacaattaactcccagctggaatttaaaagtaagccttttcctttagtctcctcttcccggtggttggtaaaaagaggtgaattgacagcctatgttgaagacactgtgcttttctcaagaaggacatccaaacagcaagtctacttctttctctttaacgatgtgctcattatcaccaagaagaagagtgaagaaagttacaacgtcaatgattattccttaagagatcagctattggtggaatcttgtgacaatgaagagcttaattcttctccagggaagaacagctccacaatgctctattcaagacagagctctgccagtcacctctttactctgacagtccttagtaaccacgcgaatgagaaagtggagatgctactaggagctgagacgcagagcgagcgagcccgctggataactgccctgggacacagcagcgggaagccgcctgcagaccgaacctcactgacccaggtggaaatcgttaggtcatttactgctaagcagccagatgaactctccctgcaggtggctgacgtcgtcctcatcttatcaacgtgtcagcgatggctggtatgagggggaacgactacgagatggagaaagaggctggtttcctatggaatgtgccaagaagataacatgtcaagctacaattcataagaatgtggagagaatgggacgcttgctaggactggagaccaacgtgtagtctctcagatggtcttttgttactgcaagatttgcacgacacttaccgggctggttggttctgggctagttttattgttaattttgtcacagcctatttaattaaaagaacgaaaacacttgcctttaagcttgccaggttgttccgctctctcatgagaagagcttgggatacagtgagtttgcacagcttcagtttttacctaaccacacacttggcagacctcctgaggtacacagaataggctggagcagttcacttcagggatcaggttcatctctggttcctcctagtttcaccatgttctggcaataaaaaacacatattatatcctggttttctctatccttgcattactaaggtgactgtctctctttatacatccttgtatggttctcccagtattagc

SEQ ID NO: 90011 - DNA, 1447 bp, Homo sapiens
ttagtcagaccaacctgtctcaggtaggaatgcttgacccttttatttcgaagcaactcatgcactcttttcagcactcagaaggaactgtgagcttttatactactacagccccagtatctcagcggtaaccatggggaaaaaagtcttgttttccaaaggaaaatgagagttgggaggagccttaatataagcagtgaggccagccgggtggccccaggaagaactaggtgtcttgacacctaatccacacagcagggaaaggggctgggtgtgatgcacagtgcactgattttatttacagatcaaaagccacttaaataatctgcagacacaagtgctgtccagggcagaagcctggggtccaaatcagccttatccctcctcatgcccacagtcagcccaatgctgtctccgttccatgggccagcacaggcaggcgccactctgctgacatgaggacctggggtagctcagacatttgactacccaagcccagaaaggagctgggtccagcccttacggggaattcctttaattcccccaggccaggtgagtgctgactcagtgatgacaacagctgtagaagtaggggtttggcttctggcccagatccacgcccttgtcctctgtcatcacctggaaggcagccacactgacgtaatcctctgccactttctggaagagctcgtccacactctggcctgtcttgctggatgtttcaaagagctgagctttgatattgtctgcatagtcctggacgtcgtggaagtccacacgtcgacgcctccggtcttcttccagcaggtcactcttggtgccacataagtagatttggcagccctcctctaggctgcgcagttccttcacccagaactttgctcgctcaaagctgctgctgtctgtgaggtcatagcagacgatggcagccttggcaccccgatagtagattctactcatggcctcatagcgctcagagcctgctgtgtcccaaatacctaatgtcacagtccggtctccgaccgacatcaccttggccacgaaggcggccccgatggtctgcaacgagagggaagagatcggggccataggtgcagattaccggccccccactcccccgcccaccgtgcctggcccctccggatgcactcacgttctgataaggccccaccagaaagcggtcgtgcacgtagcgctccaccaggctagtcttgcccacgtactccttgcccagcatcaccaccttgacgtccacgcgctgcccgctcatgctgtgcggcaaggcttcatacacgttgtgcatagctcctagaggttttgcccagtcggcaacgttgtatatccgcgcgcagtggactgctctaggcgtcacatacaaaagctatcgcgtcgcatgctcgcgttcgtaagagcgggtcgtgtacagcccgggaattccggaccggtc

SEQ ID NO: 90012 - DNA, 819 bp, Homo sapiens
gctgcaggaattctggcacgaggagctgtgtcaccatgtgggtcccggttgtcttcctcaccctgtccgtgacgtggattggtgagaggggccatggttggggggatgcaggagagggagccagccctgactgtcaagctgaggctctttccccccaaacccagcaccccagcccagacagggagctgggctcttttctgtctctcccagccccactccaagcccatacccccagcccctccatattgcaacagtcctcactcccacaccaggtccccgctccctcccacttacgccagaactttctccccattgcccagccagctccctgctcccagctgctttactaaaggggaagttcctgggcatctccgtgtttctctttgtggggctcaaaacctccaaggacctctctcaatgccattggttccttggaccgtatcactggtccacctcctggaggccctcaatcctatcacagtctactgacttttcccattcagctgtggagtgtccaaccctatcccagagaccttgatgcttggcctcccaatcttgccctaggatacccagatgccaaccagacacctccttcttcctagccaggctatctggcctgagacaacaaatgggtccctcagtctggcaatgggactctgagaactcctcattccctgactcttagccccagactcttcattcagtggcccacattttccttaggaaaaacatgagcatccccagccacaactgccagctctctgattccccaaatctgcatccttttcaaaacctaaaaacaaaaagaaaaaaaaaagt

SEQ ID NO: 90013 - DNA, 3936 bp, Homo sapiens
  misc_feature (1)...(3936): n = a,t,c or g
tttcgtggcggcggcgcaagggtgagggcggccccagaaccccaggtaggtagagcaagaagatggtgtttctgcccctcaaatggtcccttgcaaccatgtcatttctactttcctcactgttggctctcttaactgtgtccactccttcatggtgtcagagcactgaagcatctccaaaacgtagtgatgggacaccatttccttggaataaaatacgacttcctgagtacgtcatcccagttcattatgatctcttgatccatgcaaaccttaccacgctgaccttctggggaaccacgaaagtagaaatcacagccagtcagcccaccagcaccatcatcctgcatagtcaccacctgcagatatctagggccaccctcaggaagggagctggagagaggctatcggaagaacccctgcaggtcctggaacacccccctcaggagcaaattgcactgctggctcccgagccccctctttgtcgggctcccgtacacagttgtcattcactatgctgggcaatctttcggagactttccacggattttacaaaagcacctacagaaccaaggaaggggaactgaggatactagcatcaacacaatttgaacccactgcagctagaatggcctttccctgctttgatgaacctgccttcaaagcaagtttctcaatcaaaattagaagagagccaaggcacctagccatctccaatatgccattggtgaaatctgtgactgttgctgaaggactcatagaagaccatttttgatgtccctgtgaagatgagcacctatctggtggccttcatcatttcagattttgagtctgtcagcaagataaccaagagtggagtcaaggtttctgtttatgctgtgccagacaagataaatcaagcagattatgcactggatgctgcggtgactcttctagaattttatgaggattatttcagcataccgtatcccctacccaaacaagatcttgctgctattcccgactttcagtctggtgctatggaaaactggggactgacaacatatagagaatctgctctgttgtttgatgcagaaaagtcttctgcatcaagtaagcttgacatcacaatgactgtggcccatgaactggcccaccagtggtttgggaacctggtcactatggaatggtggaatgatctttggctaaatgaaggatttgccaaatttatggagtttgtgtctgtcagtgtgacccatcctgaactgaaagttggagattatttctttggcaaatgttttgacgcaatggaggtagatgctttaaattcctcacaccctgtgtctacacctgtggaaaatcctgctcagatccgggagatgtttgatgatgtttcttatgataagggagcttgtattctgaatatgctaagggagtatcttagcgctgacgcatttaaaagtggtattgtacagtatctccagaagcatagctataaaaatacaaaaaacgaggacctgtgggatagtatggcaagtatttgccctacagatggtgtaaaagggatggatggcttttgctctagaagtcaacattcatcttcatcctcacattggcatcaggaaggggtggatgtgaaaaccatgatgaacacttggacactgcagaggggttttcccctaataaccatcacagtgagggggaggaatgtacacatgaagcaagagcactacatgaagggctctgacggcgccccggacactgggtacctgtggcatgttccattgacattcatcaccagcaaatccgacatggtccatcgatttttgctaaaaacaaaaacagatgtgctcatcctcccagaagaggtggaatggatcaaatttaatgtgggcatgaatggctattacattgtgcattacgaggatgatggatgggactctttgactggccttttaaaaggaacacacacagcagtcagcagtaatgatcgggcgagtctcattaacaatgcatttcagctcgtcagcattgggaagctgtccattgaaaaggccttggatttatccctgtacttgaaacatgaaactgaaattatgcccgtgtttcaaggtttgaatgagctgattcctatgtataagttaatggagaaaagagatatgaatgaagtggaaactcaattcaaggccttcctcatcaggctgctaagggacctcattgataagcagacatggacagacgagggctcagtctcagagcaaatgctgcggagtgaactactactcctcgcctgtgtgcacaactatcagccgtgcgtacagagggcagaaggctatttcagaaagtggaaggaatccaatggaaacttgagcctgcctgtcgacgtgaccttggcagtgtttgctgtgggggcccagagcacagaaggctgggattttctttatagtaaatatcagttttctttgtccagtactgagaaaagccaaattgaatttgccctctgcagaacccaaaataaggaaaagcttcaatggctactagatgaaagctttaagggagataaaataaaaactcaggagtttccacaaattcttacactcattggcaggaacccagtaggatacccactggcctggcaatttctgaggaaaaactggaacaaacttgtacaaaagtttgaacttggctcatcttccatagcccacatggtaatgggtacaacaaatcaattctccacaagaacacggcttgaagaggtaaaaggattcttcagctctttgaaagaaaatggttctcagctccgttgtgtccaacagacaattgaaaccattgaagaaaacatcggttggatggataagaattttgataaaatcagagtgtggctgcaaagtgaaaagcttgaacgtatgtaaaaattcctcccttgccaggttcctgttatctctaatcaccaacattttgttgagtgtattttcaaactagagatggctgttttggctccaactggagatacttttttcccttcaactcattttttgactatccctgtgaaaagaatagctgttagtttttcatgaatgggctttttcatgaatgggctatcgctaccatgtgttttgttcatcacaggtgttgccctgcaacgtaaacccaagtgttgggttccctgccacagaagaataaagtaccttattcttctcattttatagtttatgcttaagcacccgtgtccaaaaccctgtaccccatgttttatcattcataaactggtttcatcagtctcctcgaaagactctgaatagtcgactactgaacaatgaacacctggatctgagactaagccggacgatgactgggttaaagctctcccggctcacccctccagacccgctgcccatccctcttccttgctccatgcccaggggctgacttgtaaaggccaagtcatcaagctttcttgccctttggatgttggtcagtggggagccggagagctggagctggggtcggaggaggtagtaggtggaggtgttcttccctgattcccttgcgggatgcctcgggctggcctcccctgagggtcttagctccgagaggggaccctcttttccacacagccttctccacctctggattttggtaactgctccctcctcatcccttcaggattagtggcctcagtgggagtctggcttttactagtcctggcggacttgtggtttctacataatgtgctcgcacttttgcaaaaaatctttttatagaaccctcctcagataattctgagtgagtgtcatctatttccctgactggtacagtatctcttctgaaaaagcagagtgcattcaagtctgtaggaaaacccttttcttagggaggtgattttttttctctctctgcttcttatttggcctactttaacaatttctnaactaaactagttattggccattttac

SEQ ID NO: 90014 - DNA, 2080 bp, Homo sapiens
gcggccgcgagaagccccgctctcctgtaaacgtccgcggaggagcagcaagcctccctgtgagtcggtgggagacaagacggagcggcggtaagggcggtagggaagtgaagcgcctctctccaccttgttagaagcgcgctgaaagcggcctgcctacccaccccatcgctgccgttatgcagtcgtcgctcccaccttccgctgccgcctggagggaagccggagcgacgggggtcacggcggcggtcagagggtaaaggtcttgctcccagcagcctccgcggcggatacgccgccatcttggatccgcgggacaagaaaattcatgcgagggagacgtggtgggcggtccttcctgtgacacgacccttgagtgacagttctatttgattgcctccggtactgtgaggaaaggacacgactctatggtgaggactgatggacatacattatctgagaaaagaaactaccaggtgacaaacagcatgtttggtgcttcaagaaagaagtttgtagagggggtcgacagtgactaccatgacgaaaacatgtactacagccagtcttctatgtttccacatcggtcagaaaaagatatgctggcatcaccatctacatcaggtcagctgtctcagtttggggcaagtttatacgggcaacaaagtgcactaggccttccaatgagggggatgagcaacaatacccctcagttaaatcgcagcttatcacaaggcactcagttaccgaggccacgttcacgccaacaacaggggtaccaacaatgttcatttcacaccgcctccatctccaagcaggggtattttgcctatgaatcctaggaatatgatgaaccactcccaggttggtcagggcattggaattcctagcaggacaaatagcatgagcagttcagggttaggtagccccaacagaagctcgccaagcataatatgtatgccaaagcagcagccttctcgacagccttttactgtgaacagtatgtctggatttggaatgaacaggaatcaggcatttggaatgaataactccttatcaagtaacatttttaatggaacagacggaagtgaaaatgtgacaggattggacctttcagatttcccagcattagcagaccgaaacaggagggaaggaagtggtaacccaactccattaataaaccccttggctggaagagctccttatgttggaatggtaacaaaaccagcaaatgaacaatcccaggacttctcaatacacaatgaagattttccagcattaccaggctccagctataaagatccaacatcaagtaatgatgacagtaaatctaatttgaatacatctggcaagacaacttcaagtacagatggacccaaattccctggagataaaagttcaacaacacaaaataataaccagcagaaaaaagggatccaggtgttacctgatggtcgggttactaacattcctcaagggatggtgacggaccaatttggaatgattggcctgttaacatttatcagggcagcagagacagacccaggaatggtacatcttgcattaggaagtgacttaacaacattaggcctcaatctgaactctcctgaaaatctctaccccaaatttgcgtcaccctgggcatcttcaccttgtcgacctcaagacatagacttccatgttccatctgagtacttaacgaacattcacattagggataagttatttttctttttcagctggctgcaataaaacttggccgatatggtgaagaccttctcttctatctctattacatgaatggaggagacgtattacaacttttagctgcagtggagctttttaaccgtgattggagataccacaaagaagaacgagtatggattaccagggcaccaggcatggagccaacaatgaaaaccaatacctatgagaggggaacatattacttctttgactgtcttaactggaggaaagtagctaaggagttccatctggaatatgacaaattagaagaacggcctcacctgccatccaccttcaactacaaccctgctcagcaagccttctaaaaaaaaaa

SEQ ID NO: 90015 - DNA, 2882 bp, Homo sapiens
agtacagagtcccatgtatccattacccagtttcctccagtggtgcggttttgtaattatagcacaccttcacatccaagacattgacaataatattatactgctatctagactacagactttattcagtatcaccagattttacatgcattcatttgtgtgtatgtaggtccatacaacttcagcacaggtaaagattcatgtgcttaacctcataatcaaatgttataatcaacatcgtaatcatcataatcatatagaactgttccatcagcacaaaggaactccttgcgtcatccctttatagtcatacataccccacaccccctccagtccctatccctggcaaccattaatctgttcttcatttcaataattttgtcaccctcaagaatgttatataaatgcgatcatacagtatgtgaccatttgagactggtttttttttttgttcaccataatacccctgaggtacaaccaagttcttgtatcaacagttagttccttttcattccagagcagtattccaagttatggatggtttgtttaaccatgtacctgttgtaggacatctgggttgtttccagtttggggctattacaaataaagctcctatgaatatttgagtacaagtacaatataggttttcatttctctggaatgaatgtccaggagcacaactgctgggtcttatgtttaacttgattaaaaaattatgtttaacttgataagaaattcataaactctttcccagagtggctgtaccattttacattcctgtcagcaatgtataaaatatccagtttgtatcctcatcagtatttggtattttcactatttttttctttagccattgagataagtaagtcatagcctcgctgtggtttcaatttgcattccctgatgacttatggagtttaacagcttttcatatgcttacttgccatctatatatcctcttcagtgaaacatctattcatgtcttttgcccattttctaattggactgtttgtttttattgttgagttttgtggccttttttttttttttgagatgaggcctcactctgttacacaggttgggagtgtgggtgggtgtgatcacagctcaccgcaggcctcaaactcctgggctcaagtgatcctcctgcctccctagtagctgggactactggtgtgtgtaattaattcttccagttaattttttaaaaaaactttttggtaagaagacaaagagtcctcactatgttgccccaggctggtctggaacgcctaacctcaagcactcctccccatcttggcctccccaaagtggtgagattaccaagcatgagctaccatgcctgacttcagttgagtttttagtacactttatatattccaaattgatcagatatatggtttgcaaattcatctcaatctgtagcttatcttttcctcttcttaaatcacaagtttttaaattttgaagaagtccaatatatcagattttgtcttttatggatgtgctttcggggcaaagtccaagaacttgtcacctagcccaagatcctgaagatttttctcctgtggcttttttcaaagttatctagttttatgtatcacatttaagtccgttatacattttgagttaaattttatataagatgtgaggtttaagtagaggttcttttttctcctcgccatgggtgtctaattgctctagcataatttgtcagaaaggctattcttcctccattgaattgctttttcactttttcaaaatcagctgagcatatttatatgggtttatttctgggttctctcatctgttccattgacgtatgtgtctgttcctctgccaataccatctatcttgattactatagctttatagtaagtcttgaagtcaggtaaaatgagtcctccaagtttttcttctttgaaattgatttagcttaagtaactttacactggatattttcatctttccccattttgtctcctgatttattctagagaagaaagttcttgcataagctcctccttttcctggtggtaattcctgcaaatgctgttggttttgctccagtctgtcctccaaccactgtaggagaggcccgctgactgccgacatctgactgcacagattcttggtaaacactgagccattatggatcttggttactgagtccagatgtgtaaggctgtggatcctcctatacgcatcctgctcctcctggcacaggatcttgggcagctctactgctgattcaaggcacactttcccgatagtgacatgaggtacaatatggattgggatttcgattctctcatactctgaactcttttgggcctgtatggattggaagcaagtgtagagtacccggccagtctttgtgttcttatcttctatgaaacaggaaaaaataagtcctacaaagccttgatccatcatctggtacatggcttgtgtgcgaacatcaacatgtgaaggccaaacagttatatgaggatgggaatgataccagcccacaactctcatggggcggcctgtcagttcagccaacctctctgcctctgttgaagctgcagacagctgctctggagaaatttctactcggtccttcctcttatcagaacgtcgtaagatgatgacagaatgaatgtgaacaattctgacggcatcaaccttttcagcaactgtgcgcatttcagttccagtatatgcaaatttggagtcactccttgtatcatcgttcaactcccctatgcacagccccattacttcctccttctctgtgctcagagcgtggttgagacaaacgaggaaagcgtcagactcgagatgaaccgcctgcaccgcctgcaccacctgcaccgccatcttggcccgacccttct

SEQ ID NO: 90016 - DNA, 5008 bp, Homo sapiens
atcccgggtcgacgatttcgtcggtacgggggtggtgccgcgctcctggccccgcgcgggcggacggcggaggcgcctcccagcctgctgtgggatggatgaagaagagaaccactatgtctcgcagctcaggcaagtctacagcagctgcgacaccacggggactggctttctggaccgccaggagctgacccagctctgccttaagcttcacctggagcagcagctgcccgtcctcctgcagacgcttctcggaaacgaccatttcgccagggttaactttgaggaatttaaggaaggttttgtggctgtgttgtcttcaaatgctggtgttcgcccctcagatgaagacagtagttctttggaatcagttgcctccagtgccatccctccaaagtatgtgaatggttctaagtggtatggccgtcggagccggcctgagctatgtgacgctgccacagaagccagacgcgtgccggagcagcaaacccaggccagcctgaaaagtcacctctggcgctcagcgtctctggagagcgtggagagtcccaagtcagatgaagaggccgagagcactaaagaagctcagaatgaattatttgaagcacaaggacagctgcagacctgggattctgaggactttgggagcccccagaagtcctgcagcccctcccttggaaaccccagagagccagatccggggcgtgtgggaagagctgggggtgggcagcagcggacacctgagcgagcaggagctggctgtggtctgccagagcgtcgggctccagggactcgagaaagaggaactcgaagacctgtttaacaaactggatcaagacggagacggcaaagtgagtcttgaggaattccagcttggcctcttcagtcatgagcccgcgctacttctagagtcttccactcgggttaaaccgagcaaggcttggtctcattaccaggtcccagaggagagcggctgccacaccaccacaacctcatccctcgtgtccctgtgctccagcctgcgcctcttctccagcattgacgatggttctggcttcgcttttcctgatcaggtcctggccatgtggacccaggaggggattcagaatggcagggagatcttgcagagcctggacttcagcgtggacgagaaggtgaaccttctggagctgacctgggcccttgacaacgagctcatgacagtggacagtgccgtccagcaggcagccctggcctgctaccaccaggagctgagctaccagcaagggcaggtggagcagctggcaagggagcgtgacaaggcaaggcaggacctggagagggccgagaagaggaacctggagtttgtgaaagagatggacgactgccactccaccctggagcagctcacggagaagaaaatcaagcatctggagcaggggtaccgggaaaggctgagcctcctgcggtctgaggtggaggcggagcgagagctgttctgggagcaggcccacaggcagagggccgcgctggagtgggacgtggggcgcctgcaggctgaggaggctggcctccgcgagaagctgaccctggccctgaaggaaaacagtcgcctacagaaggagattgtggaagtggtggaaaagctttcggattcggagaggctggccctgaagctgcagaaggacctggagtttgtgctgaaggacaagctggagccacagagtgcagagctcctggcccaggaggagcggttcgcagcagtcctgaaggaatacgagctcaagtgccgggacctgcaggaccgcaacgatgagctgcaagctgagctggaaggcctgtgggcgcggctgcccaagaaccggcacagcccctcatggagcccggatgggcgcagacggcagctccctggactcggcccagcaggcatttcattcctgggtaattctgctccagtgagtatagaaacggagctgatgatggagcaggtaaaggagcattaccaagacctcaggacccagctggagaccaaggtaaattactacgaaagggaaattgcggcactgaaaaggaactttgagaaggagaggaaggacatggagcaggctcgcaggcgcgaggtcagcgtgctggagggtcagaaggccgacctggaggagctccacgagaagtctcaggaggtcatctggggcctgcaggagcagctgcaggacacagcccgcggccccgagcctgagcagatgggcctggcaccctgctgcacccaggcactgtgtggcctggccctgcggcatcacagccacctgcagcagatcaggagagaggctgaggcggagctgagtggagagctgtcggggctgggagccctgcccgctcgcagagacctgaccttggagctggaggagccgccgcagggacccctgccacgcgggagccagaggtcggagcagctggagctggagagggcactgaagctgcagccctgtgcgagcgagaagcgcgcccagatgtgcgtatcgttggccctcgaggaggaggagttggagcttgcccgcgggaagcgagtggacgggccctccctggaagcagagatgcaggccctgccgaaagatgggctggtggcaggaagtggccaggagggcacacgtggcctcctaccactgcgtccgggctgtggggagcggccactggcctggctggccccaggtgatggcagaaagtctgaggaggcggcaggagccgggcctcgccgcaggcaagcccaggacacagaagctacgcagagcccggcccccgcccctgccccggcatcccacggcccctcagagaggtggtcacgcatgcagccctgtggagtggatggggatattgtcccaaaggagccagagcctttcggcgcgagcgccagcggggctggagcagcctggagcccgggagctgcctctgctgggaacagagagagacgcctcgcaaacccagccacggatgtgggagccacccctgaggccggccgcttcgtgcaggggacaggctgagaggctacaggccattcaggaagagcgagcacgaagctggagcaggggcacccaggagcaggcctcggagcagcaggcccgggccgagggcgccctggagcctgggtgtcacaagcacagtgtggaggttgccaggagagggtccttgccatcccacctccagctcgcagacccgcagggttcctggcaggagcagcttgctgccccagaagagggggagaccaaaatagcgctggagagagagaaggatgacatggaaaccaaacttctacatctggaagacgtcgtccgggctctggagaaacatgtagatttgagagagaacgacagactggagttccatagactttctgaagaaaacactttgttgaaaaacgatctgggaagggttcggcaagagcttgaagctgcagaaagtactcacgatgcacagaggaaggaaattgaggttttaaagaaagacaaggaaaaggcctgctctgagatggaggtgctcaacagacagaatcagaactacaaggatcaattatcccagctcaatgtcagggttcttcaactgggacaggaggcttctacccaccaggcccaaaacgaggagcatcgtgtgaccattcagatgttaacacagagcctggaggaggtggttcgcagtgggcagcagcagagtgaccaaatccaaaaacttagagttgaacttgaatgcctgaatcaggaacatcagagcctgcagctgccatggtcagagctgacccagacccttgaggaaagtcaagaccaggtgcagggagctcacctgaggctgaggcaggcccaggcccagcacttgcaggaggtccggctggtgccccaggaccgtgtggccgagctgcatcgcctgctcagccttcagggagagcaggccaggaggcgcctggatgcacagcgggaagaacatgagaaacagctgaaagccacagaagagcgggtggaagaggcggagatgattctgaagaatatggaaatgctcctccaagagaaagtggataagctgaaggagcagtttgaaaagaacacgaagtccgacctgctgctgaaggagctgtacgtggagaacgcccacctggtgagagcacttcaggccaccgaggagaagcagcgaggcgccgagaaacaaagccgcctcttggaagaaaaagttcgcgctctcaacaaactcgtcagtaggattgcccccgcagccctctctgtgtaaagacagattattttctaggattcattcgaaagcacatcttttaaattaagccactgtgctgccttagattccgtgggtcatgagccatgagtcctgggacatctgaggattgggattctttgttcaccccgcagatagttaatgaatggtctgccctgggcaagatggaggtgggggctgggggaatatgcatgttgcagaagccggcgtttttattagcggtcctgagtaatttcccttggcaaaattcccagttttgccactcgctggagccagatcctgggagctgtcagcaaggagcaggtaagtgagcagttatggacagcactttccatgtggtgcttccgaccctggctgtcagagtgaaatgtaaagtcagggctctgtacagttttgccatttcactgttctgctttaagcttagcttattagaactcttggtggagggtgcgtacacacattccagaaaaggcttcactcgctgggaacgtcaacccagcgagaaaggaggggaagccccttctccggggaccttatctgtggactcaggaatgatggtgtttattgcaaatgcacaatctttttcccattgaaatgtcatcacactggaaattgtactatatgtaaaaaaaaaaaaaagtatagttttatatttgaaatgtatgcaaattatggccatatggctgattggaatgtactactgtaatataaaaagtcactgtatttgcaataaattcttttctattaaaattgaaaaaaaaaa

SEQ ID NO: 90017 - DNA, 1010 bp, Homo sapiens
ggagatctccccttctttgtgaatcactcagcccttcaccctggggtgaggctgtaaggtaactggtggtctccagaggtaacaggacccaggcccatgcagtgaagggcaggagtggagttgagcaggggagacagggaggtcagagtctggctggagcaggcccatggatcctcactcccggcctgcctgctgggccggacaggggataggcaggaaggcaggatgcccacggccgagtccatgctgccttccttctcccctccttcgcccagggtcctgcatcctcaagccccctctgtggctgccctgcacccctgcctgacccccggatgccatgcacctgcccctgcactggctccctgcttggcactgccaagcaccctgctctgcttacagtggcccgttgacctcctgcccccaacccccgcttgctgagaccctccccatgccaggccaatttcttccttccctgtgcccacctgggactcctaagaggtgctcaccagagggttgagaggatgtaacacccactcgggtcaggctctgccccgggaaaccattacctgcttactctcgtctcttcctgcccttctgttgctccagtcttggagggggcaggggaccgacactcacatctatcaggcctggagttactgctctgcccccatgccctggtcgacactgtgcccgccccaccctcagccctgcacggagacacacacgcccacacgcacacacatgtgcacacacattgccccatcgcacaagaaacctgcagaggacccccactgggggcatcgaggctcagccctcagggcccggggcatctgactctggccccccaggaggggagctatttggacttttgggacacccaccgaggagaccctaagccaagaaggagaagaaagagccttgaagaccttcagtctgacccctgccaccttccggggcatttgggcactgtaggaaaagaggccagctctgcagccccctcggggacgccc

SEQ ID NO: 90018 - DNA, 1450 bp, Homo sapiens
cgagcgagatggggcggagggccggtcttgcagagtagctgcggtgagtgggcgtgtgcgccgagcggtctggcccaagggctgggggccggccgagggtcttcgggagcaggccgcagggcgcggagagatcctgggatcgccgtccgccgctgctacccggcatgtcggcggaggcctcgggcccggctgccgccgcggccccgtcccttggaagcccccaagccctcgggtctcgagcctggccccgccgcctacggtctcaagccgctgaccccgaacagcaaatacgtgaagctgaacgtgggcggctcgttgcactacaccacgctgcgcaccctcacgggacaggacaccatgctcaaagccatgttcagcggccgcgtggaggtgctgaccgatgccggaggttgggtgctgattgaccggagcggccgtcacttttggtacaatcctcaatttacatgcgggatgggtctgtgccactgccggagagtacgagagaactgggggagctgctgggcgaagcacgcctactacctggtgcagggcctgattgaggactgccagctggcgctgcagcaaaaaagggagacgctgtccccgctgtgcctcatccccatggtgacatctccccgggaggagcagcagctcctggccagcacctccaagcccgtggtgaagctcctgcacaaccgcagtaacaacaagtactcctacaccagcacttcagatgacaacctacttaagaacatcgagctgttcgacaagctggccctgcgcttccacgggcggctactcttcctcaaggatgtcctgggggacgagatctgctgctggtctttctacgggcagggccgcaaaatcgccgaggtgtgctgcacctccattgtctatgctacggagaagaagcagaccaaggtggaatttccagaggcccggatcttcgaggagaccctgaacatcctcatctacgagactccccggggcccagacccagccctcctggaggccacagggggagcagctggagctggtggggctggccgcggggaggatgaagagaaccgagagcaccgtgtccgcaggatccatgtccggcgccatatcacccacgacgagcgtcctcatggccaacaaattgtcttcaaggactgacctctgaccctccccctgccttcctcttgccttgggacccagtccctctctctttccctccccttcccagacttttgccccggctctgctggccaagtcgtgggtcctcctctgtcccttcattgcatggcacagctcactttggcccttctccacccatcccaaccccattgctaacaacatggtacattccggccccaccactcagagcctttcgaagccaacacttgtgcccaccctgtgcctggggcctttccttttcaacttggttaagaggaatttaaatttcctg

SEQ ID NO: 90019 - DNA, 4606 bp, Homo sapiens
tatcgacccacgcgtccgctaggcgctcagagacaggacagccacaatatgctgtgaccgaggacggactcccataccgacagaggggcggcttatacatgaatgggggaggcgaaccctgcggcgtggaagccaatcactgcagtgaaggacatgccagtgagatcaggtggcctgcttccagatcctcctagaagtagttacttggaaagtccaagaggcccaagatttgatggtcctcgaagatttgaggatttagggtcaaggtgtgaaggaccgagacccaaagggcctcgttttgaaggaaatcgccccgatgggccaagacccagatatgaaggtcacccagcagagggcactaaaagcaagtggggaatgattccccgggggtcagcatctcaattttatattacccccagtacatccctaagtcctcgacagagtggaccacagtggaaaggccccaaaccagcttttggacagcagcatcagcagcaacctaagtcacaagcagaacctctttcaggaaacaaagaaccattagcagacaccagtagtaaccagcagaagaattttaaaatgcaatcagctgcattttccattgctgcagatgtaaaggatgtcaaggcggctcagtcaaatgagaatctaagcgactctcaacaagagccacctaaaagtgaagtctcggaagggcccgtagagccctctaattgggaccagaatgttcaaagtatggagactcaaatcgacaaagcccaagctgttactcagcctgtaccccttgcgaataagcctgtacctgctcaatctacttttccttcaaaaacaggggggatggagggaggaacagcagtagcaacatcatcattaacagcagataatgattttaaacctgtgggtattggtctaccccattcagaaaacaaccaagataaaggcctgcctcggccagataatagagataatagattagaaggcaatagaggcaacagctcatcttacagaggtcctgggcaaagcagaatggaagacacacgggataaaggtctagtaaacagaggtcgcggccaggcaatcagtcgaggcccaggattggtcaagcaagaagactttcgggataagatgatgggtagaagagaagatagtcgagagaagatgaacagaggagaaggtagccgggacagagggttggtgaggcctggaagcagtcgggagaaagtgccaggtggtcttcaagggagccaggacaggggtgcagctggcagccgagaaaggggaccacctcggagggctggcagtcaggagaggggacctcttcgaagggctgggagtagagagagaataccaccccgaagagctgggagcagggagagaggaccacctcgagggcctggcagtcgagaaaggggactgggaagatcagattttggtcgtgatagaggtccattcagaccagaaccaggagatggtggggaaaaatgtatccatatcaccgggatgagcctcctagggctccatggaaccatggagaagagcgagggcatgaagagtttccattagatggtagaaatgctccaatgggaacgagaaagactcgatgactgggatagagagagatactggagagaatgtgaacgtgactatcaagatgatacactagagctctataacagagaggacaggttctcagcaccaccatctcggtctcatgatggagataggcgaggcccttggtgggatgattgggagagagaccaggatatggatgaggactacaatagggaaatggaaagggacatggacagggatgtggatcggatttcaagacctatggatatgtatgatagaagtttggataatgagtgggacagagattatgggagaccactggatgaacaagaatcacagtttcgtgaacgggatattccatctcttccacctttaccgcccctcccacctcttccacctttggatagatatcgggatgatagatggagagaagaaagaaatcgagagcatgggtatgatcgagatttccgtgataggggtgagttgaggattcgagagtatccagaaagaggagatacatggcgggaaaagcgagattatgttcctgacagaatggactgggaaagagaacggttgtcagacagatggtacccatctgatgtggatagacattcccccatggcggaacatatgccctcctcacatcatttcctcagaaatgatggggtccgatgcaagcttagactctgaccaaggccttggaggggtaatggttctcagtcagaggcagcatgaaatcrttttgaaagctgcacaagaactgaaaatgyttcgggaacgagaaagaacagcttcaaaagatgaaagacttcgggtctgagccacagatggctgaccatctaccacctcaggaatcaagattgcagaatacatcttcaagacctggaatgtatccgcctccagggtcgtatagacctccccctcctatgggcaaaccaccaggttcaattgtaagaccctctgctccaccagcaagatcatctgttcctgtgaccaggccacctgtcccaataccaccacctccacctcctccacctctacctcctcctcctccagtgataaagccacaaacttcagctgtagaacaggaacgatgggatgaagattctttctatgggctctgggatacaaatgatgaacaaggactgaattcagaatttaagtcagaaattgcagcaattccatctgctccagtattaccacccccacctgttcactcttccattccccctcctggcccagtgcctatgggtatgccaccaatgtccaagccaccaccagtacaacagactgttgattatggccatggccgagatatatccactaataaagttgaacagataccttatggagaaagaataactctacgcccagatccactacctgaaagatcaacttttgagacagagcatgcaggccaacgtgatcgttatgatagagaaagagatcgtgagccttattttgatcgtcaaagtaatgtcatagcagatcatcgagattttaaaagggatcgtgagacacatagagatcgagaccgggatcgtggtgttattgactatgaccgggatcgatttgacagagaacgccgaccccgagatgatagagctcagtcatatcgagacaaaaaagaccattcctcatccagaagagggggttttgataggccatcctatgaccggaagtctgaccgaccagtctatgaaggaccatccatgtttggaggagaacgaaggacttatcctgaggagcgaatgcctctgccagctccttcactgagccaccagccacctccagctccacgagtcgagaagaagcctgaatcaaagaatgtggacgatattttgaaaccaccgggccgggagagcagacctgagagaattgttgttataatgagaggattacctggcagtggaaagacacatgttgcaaaacttattcgagataaggaggtagaatttggaggacctgcacccagagttctaagcctggatgattacttcatcactgaagtggaaaaagaagaaaaagatccagattctggaaagaaagtgaaaaagaaggtaatggaatatgaatatgaagctgagatggaggagacttaccgcaccagcatgttcaaaactttcaaaaagactctggatgatggcttttttcccttcatcatcctggatgccatcaatgacagagttaggcattttgaccagttttggagtgcagcaaaaaccaagggatttgaggtatatttggctgaaatgagtgcagataaccagacttgtggcaagagaaatattcatggaagaaagcttaaagaaataaataagatggctgatcactgggaaactgcacctcgtcacatgatgcgtctagatattcgttctttgctgcaagatgctgctattgaagaggtagagatggaagattttgatgcaaatatcgaagaacagaaagaagaaaagaaagatgcagaggaagaggaaagcgaactgggttacattccgaaaagcaaatgggagatggacacatctgaggcaaagctagacaagttggatggcttgaggactggtactaaaaggaaacgtgactgggaggccattgccagcagaatggaggattatcttcagctccccgatgattatgatactcgtgcttctgagcctgggaagaagagggtcagatgggcagacctggaagagaagaaggatgcagataggaaaagggccataggttttgtggtcggacagactgattgggagaagatcacagatgaaagtggtcacctggctgaaaaagccctcaatcgaaccaaatatatatgagacttagtttttgaacggagtcattattcctctaaggtggttcgctttgaggtggtctgaagccaaggcctcgcggagcttctttgtgtgtcaccttgcttccacgtttcagttcttgttttgtttctactgctttagttttttttaaagttctccagtgtccccaagaggtattagaatcttgctgtacccaagcaagacgttaatttttcttttat

SEQ ID NO: 90020 - DNA, 4366 bp, Homo sapiens
gaatcagccaaatattgtactgtgtgtgtgttttgggggtggggggagacagagttgaggtggcagaggcaatgtaggaggaaaagacaggctgactaaaatacataaatagtacgtgaattctttcgggccagggatctgggcctactttgcctgcatcatattaccagcatctcaattgtgtctggcacatagtaagtttcagtaaacatttgttgcactaagtgaaagaatgaacttttcacttttttcagagatgtgatttgtgattctcggaatcaaccagggtcctaagatgtcctggaggccgtctccatttctctcggtgagctaaggtgtccgagtggcaccagttctccactctttctgcgaccttcgcccgccgcgcgcctttctcaaatcctccggttattaagcaagctcaggggtccggtggcctgccctggtaactctgcgcccgccccttcctgcccccttcctgccctcacgccccgtcccctcctcttgacgtggcagaggcggcgccagccatgttggccgggcggaggtcttcgctgaggcccggggcggggtggcgccacccctgattgcggtgccacggactgctcctgctgggcggagaggacagattttgcaaagcggaggctgcgacgggtcctgcagggggacagtgaggaaagggccgcctcgtctccgctcctgggggaccgcagaaataagaatcaaactccacaatgacaacctatttggaattcattcaacaaaatgaagaacgagatggagtccgatttagttggaatgtttggccatcaagtcgactggaagctacaagaatggttgttcctgtggcagccctgtttacaccactgaaagagagacctgacttaccacctattcaatatgaacctgttctgtgtagtaggaccacttgccgtgcagttttgaatcctttatgtcaagtggattatcgagcaaaactttgggcttgcaacttttgttaccaaaggaatcagtttccacctagttatgctggtatatctgaactgaatcagcctgctgaacttttacctcagttttctagcattgaatatgtagttctgcgtggtcctcagatgcctttgatattcctctatgtggttgatacttgcatggaagatgaagatttacaagccctgaaagaatccatgcagatgtcattaagtcttttaccacctacagctttggttggacttattacttttgggagaatggttcaggttcatgaacttggatgtgaaggcatttcaaaaagctatgtcttcagaggaacaaaagatttgtctgccaaacaactgcaggaaatgctggggctctctaaagtaccagttactcaagcaacacgtggtcctcaggtacagcagccacctccttccaacagattcttacaaccagtacagaaaatagacatgaatctcacagatcttctgggagaactccagcgagacccttggcctgtaccacagggaaagagacctttgcgttcctctggggtggcactttccatagctgtaggactgctggagtgtacttttcccaacactggtgctcgtatcatgatgttcattggtggtcctgctactcaggggcctggaatggtggttggagatgagttgaagacacctataagatcgtggcatgacattgacaaagacaatgccaaatatgttaaaaagggaactaagcattttgaagcattggctaatcgagctgctacaactggccatgttattgatatctatgcgtgtgcattagatcagacaggtctcctggagatgaaatgctgtcccaaccttactggaggatacatggtaatgggtgattctttcaatacttccttattcaaacaaacttttcaaagagtctttaccaaagacatgcatggacagtttaaaatgggctttggtggtacgctagaaataaagaccccaaggggaaataaagatttcaggagctattggaccctgtgtgtcactcaattctaaaggaccctgtgtgtctgaaaatgagataggaacaggtggcacatgtcagtggaagatatgtggacttagtcccactacaaccttagccatatattttgaggttgtcaatcagcataatgctccaattcctcaaggagggccgtggtgcaaatccagtttgtgactcagtatcgagcattcaagtgggcagagacgcatccgagtgaccaccattgctaggaactgggcagatgctcaaactcaaatccaaaacattgctgcatcttttgaccaggaggcagctgccattcttatggcccggctagcaatatatagagcagaaacagaagaaggtccagatgtgcttaggtggctggacagacagctcattcgactgtgtcagaaatttggagaatatcataaagatgacccaagttccttcagattttcagaaactttctccctttatccacagtttatgtttcatttaagaagatcttctttcctgcaagtttttaacaatagtcctgatgagagttcatattatcgtcaccattttatgcgtcaagatctgacccagtctctaattatgattcagcctatcctgtatgcgtattcttttagtggaccaccagagccggttcttcttgatagcagtagcattcttgcagatcgtattcttctcatggacacattcttccagattttgatttatcatggtgagaccatagcacagtggcggaagtcaggataccaggatatgcctgagtatgaaaatttccgccaccttctgcaagccccagtggatgatgcacaggaaattcttcactccagatttccaatgccaagatacattgacactgaacatggaggcagccaggcccgtttcctcctttcaaaagtcaacccttcacagactcataataatatgtatgcctgggggcaggagtctggagcacctattcttacagatgatgttagtttacaagtgtttatggatcacttgaagaaacttgctgtgtccagtgctgcttgaagtgctaataatgttaaagacacttaagaagatgaaataatattcaaatttcattttttcctttttccatttatctgtggaaaccaacagatattgctctatattttttgtattagtatggtttgagacaacatatggaaaatgttcacatttgtagattaagctggaattataatgagagcaataagaacaaatttattttgcttaccacagtgttatagctggttctagaaatttgaagtctttataacttaattatgtttaataaaaaatagagtctgcctcgtactacagatgtaactcatttgtatattgcagacagacccaaagtggcactgaattttcttgctcaccttttaaaaacttgttccttaattttagccagaaagcaaaaaaacaatagtaatgataaatgtgaacatttttgcttattcattgaatatttttctgtaattttcagcacttatgtatacactttttctgtacttactaggttaaggcagacttatttttatgatttgtttaggaattatttgattgtataatggtaattttcatgatgataatgtttttggttatttggaaagatagtttagagatgaaaggtttttttgggtaacaatcccgcagctgacaaaaaatgtgaaatttccacaaaatatccaacttatgtgactaaacgcagtagtttttttaaaaggggagatagaaaataaatggttttgttggagtgcattttagtaagcctttgcagtaaaatgacggttgtaactactaaaccaaatttagttttcacagcatggttttgttgttttccccttgtttttcagaggtaaattttgcattatatccttcagtattttaacactattttggcagtttacacattactttttgtttttccttcctttttgtgaaatgtattaagttgtggttcttattgaaacagtattatataatgtttgcttaattatatcatgtgatgctcagttctattttgatttattcattagtattcacttttacctttaaagtttacttgtagcaaatatgtttacattgataaagccagatatgttttgacaatgaaatttacatatcaagtactgcaaataaaaggtggtgctatgatatatgcttaggaggacagttttaatgattgtacttgcatgaacacaatcatatgatggtaaagcagaaacttaagaaaaaattgtttatgtgttatattcaattagcttaaataagttgctttgttatattttatttgaattgaactacgctaggcctaaatgccaataaaatatacttttcactgttaaaaaaaaaa

SEQ ID NO: 90021 - DNA, 522 bp, Homo sapiens
gatactttgccctttcctcagttgccaccaaggtgcttggtccttccgaggaagctaaggccacattggggtgaggccatcacttcatccagtgactagcaccacctctggcaatgtcagccccacactcgcccgcgccatggcctccatctccgagcttgcctgtgtctacttggccctcattctgcacgatgacgaggtgatcatcatggaggttaatatcaataccctcattaaagcagccagtgtaaatgttgaaccttttggcctggcttgtttggaaaggccctggccaacgtcaacattggaagcctcatctgcaatgtaggggctggtggacctgctctagcagctggtgctgcaccagcaggaggtcctgccccctccattgctgctgcttcagctgaggagaagaaaatggaagcaaagaaagaagaatctgaggagtctgatgatgacatgggctttggtctttttactaaacctgttttataatgtgttcaataaaaagctgactttaaa

SEQ ID NO: 90022 - DNA, 6091 bp, Homo sapiens
agccagctgaggggaaaaatggctcggactgtggcggcttcggcggctcaggttgtggtagaggcggaggctcaggcagcttgaggccttgctattttggaagctacaagaaaaaaatagaggaaggaaggtttggtctttttagtggacatggctcagatatctagcaacagcggatttaaagaatgtccatcttcacatccggaaccaacaagagcaaaagatgtggacaaagaagaagcattacagatggaagcagaggctttagcaaaactgcaaaaggatagacaagtgactgacaatcagagaggctttgagttgtcaagcagcaccagaaaaaaagcacaggtttataacaagcaggattatgatctcatggtgtttcctgaatcagattcccaaaaaagagcattagatattgatgtagaaaagctcacccaagctgaacttgagaaactattgctggatgacagtttcgagactaaaaaaacacctgtattaccagttactcctattctgagcccttccttttcagcacagctctattttagacctactattcagagaggacagtggccacctggattacctgggccttccacttatgctttaccttctatttatccttctacttacagtaaacaggctgcattccaaaatggcttcaatccaagaatgcccacttttccatctacagaacctatatatttaagtcttccgggacaatctccatatttctcatatcctttgacacctgccacaccctttcatccacaaggaagcttacctatctatcgtccagtagtcagtactgacatggcaaaactatttgacaaaatagctagtacatcagaatttttaaaaaatgggaaagcaaggactgatttggagataacagattcaaaagtcagcaatctacaggtatctccaaagtctgaggatatcagtaaatttgactggttagacttggatcctctaagtaagcctaaggtggataatgtggaggtattagaccatgaggaagagaaaaatgtttcaagtttgctagcaaaggatccttgggatgctgttcttcttgaagagagatcgacagcaaattgtcatcttgaaagaaaggtgaatggaaaatccctttctgtggcaactgttacaagaagccagtctttaaatattcgaacaactcagcttgcaaaagcccagggccatatatctcagaaagacccaaatgggaccagtagtttgccaactggaagttctctttctttcaagaagttgaagtacagaatgaggagatggcagcttttttgtcgatccattacaaaattgaagaccaaatttccatataccaatcaccgcacaaacccaggctatttgttaagtccagtcacagcgcaaagaaacatatgcggagaaaatgctagtgtgaaggtctccattgacattgaaggatttcagctaccagttacttttacgtgtgatgtgagttctactgtagaaatcattataatgcaagccctttgctgggtacatgatgacttgaatcaagtagatgttggcagctatgttctaaaagtttgtggtcaagaggaagtgctgcagaataatcattgccttggaagtcatgagcatattcaaaactgtcgaaaatgggacacagaaattagactacaactcttgaccttcagtgcaatgtgtcaaaatctggcccgaacagcagaagatgatgaaacacccgtggatttaaacaaacacctgtatcaaatagaaaaaccttgcaaagaagccatgacgagacaccctgttgaagaactcttagattcttatcacaaccaagtagaactggctcttcaaattgaaaaccaacaccgagcagtagatcaagtaattaaagctgtaagaaaaatctgtagtgctttagatggtgtcgagactcttgccattacagaatcagtaaagaagctaaagagagcagttaatcttccaaggagtaaaactgctgatgtgacttctttgtttggaggagaagacactagcaggagttcaactaggggctcacttaatcctgaaaatcctgttcaagtaagcataaaccaattaactgcagcaatttatgatcttctcagactccatgcaaattctggtaggagtcctacagactgtgcccaaagtagcaagagtgtcaaggaagcatggactacaacagagcagctccagtttactatttttgctgctcatggaatttcaagtaattgggtatcaaattatgaaaaatactacttgatatgttcactgtctcacaatggaaaggatctttttaaacctattcaatcaaagaaggttggcacttacaagaatttcttctatcttattaaatgggatgaactaatcatttttcctatccagatatcacaattgccattagaatcagttcttcaccttactctttttggaattttaaatcagagcagtggaagttcccctgattctaataagcagagaaagggaccagaagctttgggcaaagtttctttacctctttgtgactttagacggtttttaacatgtggaactaaacttctatatctttggacttcatcacatacaaattctgttcctggaacagttaccaaaaaaggatatgtcatggaaagaatagtgctacaggttgattttccttctcctgcatttgatattatttatacaactcctcaagttgacagaagcattatacagcaacataacttagaaacactagagaatgatataaaagggaaacttcttgatattcttcataaagactcatcacttggactttctaaagaagataaagcttttttatgggagaaacgttattattgcttcaaacacccaaattgtcttcctaaaatattagcaagcgccccaaactggaaatggggtaatcttgccaaaacttactcattgcttcaccagtggcctgcattgtacccactaattgcattggaacttcttgattcaaaatttgctgatcaggaagtaagatccctagctgtgacctggattgaggccattagtgatgatgagctaacagatcttcttccacagtttgtacaagctttgaaatatgaaatttacttgaatagttcattagtgcaattccttttgtccagggcattgggaaatatccagatagcacacaatttatattggcttctcaaagatgccctgcatgatgtacagtttagtacccgatacgaacatgttttgggtgctctcctgtcagtaggaggaaaacgacttagagaagaacttctaaaacagacgaaacttgtacagcttttaggaggagtagcagaaaaagtaaggcaggctagtggatcagccagacaggttgttctccaaagaagtatggaacgagtacagtccttttttcagaaaaataaatgccgtctccctctcaagccaagtctagtggcaaaagaattaaatattaagtcgtgttccttcttcagttctaatgctgtccccctaaaagtcacaatggtgaatgctgaccctctgggagaagaaattaatgtcatgtttaaggttggtgaagatcttcggcaagatatgttagctttacagatgataaagattatggataagatctggcttaaagaaggactagatctgaggatggtaattttcaaatgtctctcaactggcagagatcgaggcatggtggagctggttcctgcttccgataccctcaggaaaatccaagtggaatatggtgtgacaggatcctttaaagataaaccacttgcagagtggctaaggaaatacaatccctctgaagaagaatatgaaaaggcttcagagaactttatctattcctgtgctggatgctgtgtagccacctatgttttaggcatctgtgatcgacacaatgacaatataatgcttcgaagcacgggacacatgtttcacattgactttggaaagtttttgggacatgcacagatgtttggcagcttcaaaagggatcgggctccttttgtgctgacctctgatatggcatatgtcattaatgggggtgaaaagcccaccattcgttttcagttgtttgtggacctctgctgtcaggcctacaacttgataagaaagcagacaaacctttttcttaacctcctttcactgatgattccttcagggttaccagaacttacaagtattcaagatttgaaatacgttagagatgcacttcaaccccaaactacagacgcagaagctacaattttctttactaggcttattgaatcaagtttgggaagcattgccacaaagtttaacttcttcattcacaaccttgctcagcttcgtttttctggtcttccttctaatgatgagcccatcctttcattttcacctaaagcatactcctttagacaagatggtcgaatcaaggaagtctctgtttttacatatcataagaaatacaacccagataaacattatatttatgtagtccgaattttgagggaaggacagattgaaccatcatttgtcttccgaacatttgacgaatttcaggaacttcacaataagctcagtattatttttccactttggaagttaccaggctttcctaataggatggttctaggaagaacacacataaaagatgtagcagccaaaaggaaaattgagttaaacagttacttacagagtttgatgaatgcttcaacggatgtagcagagtgtgatcttgtttgtactttcttccaccctttacttcgtgatgagaaagctgaagggatagctaggtctgcagatgcaggttccttcagtcctactccaggccaaataggaggagctgtgaaattatccatctcttaccgaaatggtactcttttcatcatggtgatgcatatcaaagatcttgttactgaagatggagctgacccaaatccatatgtcaaaacatacctacttccagataaccacaaaacatccaaacgtaaaaccaaaatttcacgaaaaacgaggaatccgacattcaatgaaatgcttgtatacagtggatatagcaaagaaaccctaagacagcgagaacttcaactaagtgtactcagtgcagaatctctgcgggagaattttttcttgggtggagtaaccctgcctttgaaagatttcaacttgagcaaagagacggttaaatggtatcagctgactgcggcaacatacttgtaaactagtgaatgtctgagctttggaagcatgaacagttataaacgtgcatgcatacatgcacacacacacagacacacacacacacacttgttaattttgtatagtatttttatacttggacagaacttataaagttaaatatacttgctgcatttcaacacatctgttggaccaacagtcacataactaacctttttgaatttttggaagccattgctgttttaaagtcattatgtagaatgctacaaaccctaaacttaatatatactaattcctgaaaaagactttgagacagtactatgtcagttcagccacctattttgcattgttttctataaggaggcaaagcatatgtgttttcctgttatgcaccttttatagcctttaccactgtgtaatgttcacaaacaccaaagtaaaggaaaaatgcaggatgttaccgtaaaatccagctgctattcatggagctgaaaaacaaagcacaaataatagatagctaagttaagaactactaagtagtttatagaagtagggaaaaacgtaatactgctttttattcatgtctttaaagcctttttcagaataagtgccaatcactgatgttgtaaataatggtgccttaactttatatgcttccctggcacttcgtttctgatttttttcctgatttgataaataattagtacatagttttcactcacttgcagcttactaaagacaagaaattatgtacatgtactaatgtttttcccacaaaaaaatcctttacttctgatgtatgaattagttatctaaatagttaagcctaatacctgaataagactcaccaatgtgattgtacaataaattctatcattccattaaaatcctaaaaaaa

SEQ ID NO: 90023 - DNA, 3219 bp, Homo sapiens
tcctctttcctgactggcacatttcttttccagctctgaccgggagtcagctcctcggggataccatcccccgacctcaccttccacctaccgcagcctgctagcctttccgggagaaaaggcatccttacctctggttgaaggtctcggggcctccccctctgcatccggaccctctccccatcccagcctcccatgccaaggcccgccttgtcagtcacttccttttgtcatcggcttggcaaacgggagagaaaacagagcttcatgggaaacagcggcaacagttggtcccatacacctttccccaagttggagctaggcctggggccccagcccatggcgccccgggagctccctacctgctccatctgcctggagaggttgcgcgaccccatctcgctggactgtggccacgacttctgcatacggtgcttcagcacacaccgtctcccgggctgtgagccgccctgctgtcctgagtgccggaagatatgcaagcagaagaggggcctccggagcctgggcgagaagatgaagctcctgccgcagcggccgctgccccctgcactgcaggggcccctctcttctcctggcccaggagacgtgtcctgtgagggcggagccgctgctgctggtccgcatcaatgcctctgggggcctcatccttaggatgggggccatcaaccgctgcctgaagcaccctctggccagggacaccccagtctgcctcctcgctgtcctgggggagcagcactcagggaagtccttcctcctcaaccatttgcttcagggcttgccgggcctggagtctggtgagggcggccggccaagaggaggagaggcatccctgcagggctgcaggtggggcgccaatggcctcgccaggggcatatggatgtggagccaccccttcttgctggggaaagaagggaagaaggtggcggtgttcctggtggacacaggggatgccatgagccctgagctgagcagggaaacaaggatcaagctctgtgctctcaccacgatgctgagctcctaccagatcctcagcacctcccaggagctgaaggatacagacctggactatctggagatgtttgtccacgtggccgaggtgatgggcaagcattatgggatggtgccaatccagcatctggacctcttagttcgtgactcatcccaccccaacaaggcagggcaggggcatgtaggcaacatcttccagagattgtctggcagataccccaaggtgcaggagctgctgcaagggaagcgagcccgttgctgcctcttgcctgccccagggaggcggcggatgaaccaaggccatgcaagccctggtgacacagatgatgacttccgccaccttctgggggcctacgtctcagatgtgctgagtgcggccccccagcacgctaagagccgctgccaggggtactggaacgaggggcgcgccgtggccaggggggacagacgcctactcacggggcagcagctagctcaggaaatcaagaacctctcaggatggatggggaggacagggcccggtttcacctctccggatgagatggctgctcagctgcacgacctgaggaaggtggaagctgccaagagggagttcgaggagtatgtgaggcagcaggacgtagccaccaagcgcatattctctgcgctgcgggtcctgccagacaccatgcggaacctcctctccacccagaaagatgccattctggcccgccatggtgtggccttactctgcaaggggagagatcagaccttggaggcactggaagctgagctgcaggccacggccaaggccttcatggactcctacacgatgcgcttctgtggccacctagctgctgtggggggtgctgtgggggccgggctcatgggcctggcagggggcgtggtgggtgctggcatggcagcagctgcactggctgcagaggctgggatggtggctgctggagctgccgtgggggccacaggggccgctgtggttgggggtggcgtgggtgctgggttggctgccacagtgggctgcatggagaaggaggaggatgagaggcttctggaaggggaccgagagccccttctccaggaagagtaacagccccaggaggtattgaaggacaggagagatgtcaggtggggatgaaaaaaaggggcaggtcgggggagggtgatgccagggattccaaggcaccgccatgtactgcactgccctggtcgaatgctcggtgtctgggtggcagctgagctgggactcaaggtggctcttggaacctgggaggcagcatctgggggcagtggatagaacacccggcctgtttctggttgcagatggttgccgatctgcccttgtcacagataggctacatcccagggtttctggctgcaagtgagactccaccctccccacctggctcatttccccgatgaccctggattgtaggaaagttaagcaggcaccatcctggaagtctacccctaggtggtcgagagacctgttctttcacagatgtgagaagccccaggatgattgaccatggtgttcaggagcggggagcactgatgaggtgctggggatgacaggaaggaaggaacactgggcagaaccagagagatgggacatggtagactgtggcccagaccccagagcagagaaacttgttcccatgacccttcccaaatctgctccagcaggactaaggtggctttcccactcctggcccacagccccagagagcctgtctgtgcatcctgaaccactctttgctgggcctccgcaagggcctctcttgggtctgtgtcctttttcaagcctgtttagatgggggagtgcccatgccctctgtgaagtgcccaaatgcgaaagaataacaccttttcttgcattctgagctaagccagacagcctttatactagattctatcaaaatcttgcaaaggaaaacaaaatgaacaacttctacccttaaacacatcctttctcccctgggcttgtaagaagatgcagcttgatgcagctcctcaaacaccaggccccctgggaactgggggtgcgggagttctccctctgggggacagaaaatctgactactaggaagacttctaggctatgaaactgacttctaggctatgaaacttacagggtatgggtgggcacattatcctttattttatgaaaaataaaatgtgtgtatgtgaaaa

SEQ ID NO: 90024 - DNA, 1947 bp, Homo sapiens
  misc_feature (1)...(1947): n = a,t,c or g
cgttcgtgcgtcctagttccagtacagcgtggagggtttaggcagcgtgttctgattctttgcgggacggcgagcgcatttgtgctttgcccgccgcggcctaggaggccttttgaggccgcgtagtcggtgtttttgaactgactctacagcttctggcaggccgtgcggcgccctgacccggcctcaccatgttggtgctgtttgaaacgtctgtgggttacgccatctttaaggttctaaatgagaagaaacttcaagaggttgatagtttatggaaagaatttgaaactccagagaaagcaaacaaaatagtaaagctaaaacattttgagaaatttcaggatacagcagaagcattagcagcattcacagctctgatggagggcaaaatcaataagcagctgaaaaaagttctgaagaaaatagtaaaagaagcccatgaaccgctggcagtagctgatgctaaactaggaggggtcataaaggaaaagctgaatctcagttgtatccatagtcctgttgttaatgaacttatgagaggaattcgttcacaaatggatggattaatccctggggtagaaccacgtgaaatggcagctatgtgtcttggattggctcacagcctgtctcgatatagattgaagtttagcgctgataaagtagacacaatgattgttcaggccaatttccttgttagatgacttggataaagaactaaacaactacattatgcgatgtagagaatggtatggctggcatttccctgaattaggaaaaattatttcagataatttaacatactgcaagtgtttacagaaagttggcgataggaagaactatgcctctgccaagctttctgagttgctgccagaagaagttgaagcagaagtgaaagcagctgcagagatatcaatgggaacagaggtttcagaagaagatatttgcaatattctgcatctttgcacccaggtgattgaaatctctgaatatcgaacccagctctatgaatatctacaaaatcgaatgatggccattgcacccaatgttacagtcatggttggggaattagttggagcacggcttattgctcatgcaggttctcttttaaatttggccaagcatgcagcttctaccgttcagattcttggagctgaaaaggcacttttcagagccctcaaatctagacgggatacccctaagtatggtctcatttatcatgcttcactcgtgggccagacaagtcccaaacacaaaggaaagatttctcgaatgctggcagccaaaaccgttttggctatccgttatgatgcttttggtgaggattcaagttctgcaatgggagttgagaacagagccaaattagaggccaggttgagaactttggaagacagagggataagaaaaataagtggaacaggaaaagcattagcaaaaacagaaaaatatgaacacaaaagtgaagtgaagacttacgatccttctggtgactccacacttccaacctgttctaaaaaacgcaaaatagaacaggtagataaagaggatgaaattactgaaaagaaagccaaaaaagccaagattaaagttaaagttgaagaagaggaagaagaaaaagtggcagaagaagaagaaacatctgtgaagaagaagaagaaaaggggtaaaaagaaacacattaaggaagaaccactttctgaggaagaaccatgtaccagcacagcaattgctgtatgtttgtttttaattatcggttttcacttggaggggccagttctctatatttcaatctattttctatatcagaaatgagcaggcattttaaaaaatggttttcattgatggagaggtaaaagtgaaatggctttgttgtatttatattataaaaggccatttcccnaatagttccttcgcgatgncttagtactcattnnnnnncccctccct

SEQ ID NO: 90025 - DNA, 858 bp, Homo sapiens; identical to SEQ ID NO: 61284

SEQ ID NO: 90026 - DNA, 1666 bp, Homo sapiens
tgcacctctgtgcggagaccaaggatgatgccctagcatggaagacagcactgctggaggcaaactcccccccggtgcgcgtctacagcccgtaccaagactactacgaggtggtgccccccaatgcacacgaggccacgtatgtccgcagctactacggaccgccctacgcaggccctggcgtgacgcacgtgatagtgcgggaggatccctgctacagcgccggcgcccctctggccatgggcagcaacatccgcaacaagtgtagacaaggtcccgcctgactccgctctggaaagtccttttgaagaaatggccctggtgaggggcggctggctgtggagacagagctccatcctccgccgctggaagcggaactggtttgccctgtggctggacgggaccctgggatactaccacgatgagacagcgcaggacgaggaggaccgtgtgctcatccacttcaatgtccgtgacataaagatcggcccagagtgccatgatgtgcagcccccagagggccggagccgagatggcctgctgactgtgaacctacgggaaggcggccgcctgcacctctgtgcggagaccaaggatgatgccctagcatgggaagacagcactgctggagggcaaactccaccccggccccagctggagccaccgtccctcccaggagccgccgggtttgctccaaggtcaggtgtgtgacccgctcgtggagcccctgtaaggttgagaggcggatctgggtgcgcgtctacagcccgtaccaagactactacgaggtggtgccccccaatgcacacgaggccacgtatgtccgcagctactacggaccgccctacgcaggccctggcgtgacgcacgtgatagtgcgggaggatccctgctacagcgccggcgcccctctggccatgggcatgcttgcgggagccgccactggggcggcgctgggctcgctcatgtggtcgccctgctggttctgagccctgggactcggagcactgacccctgcgcttggattgctagactcctcttcctcctggaccccatcctctaccatccaagccctgtcccactttggccctatcctctccattagctccttccgggtttggaccattccccccactccctacccttaatccccacatgggaagaagctatcatcacaggtacaaacatcgcttgaagtcttcacatctaccactagacacccccaaaatctgttatagacatttatggatacatttcctctaaacacaacagggcacagcaaatacgacttcatttggcttcgagttccccaggcgctgtagacacaacatgaatcgggctctctgctctctccttagggagctcgagtcctggtggggagaacaggagtaaacaaggacttgacaaagctgaagagttatcagtcctttgacaaggacaggtggggcagggagcaagacaggtaggctggaagaacagttattggcaagtatgcagagccgtgaacgtcatggcatgtccaaggaattaaatgggagttcatttgggctggggtggaggctgggatcagaccgtggtgggccttcaagctaaggagcttcctaggtgaaaggggagatgtgagccttctctggagggaagtttcatgattgcatctataatgaag

SEQ ID NO: 90027 - DNA, 2834 bp, Homo sapiens
tttcgtcgccaagatggcgacgagtcagtatttcgacttcgcgcagggcggcggcccgcagtacagcacccaggctccgacccttcccctgcccactgtgggggccagctatactggacaacccactcctgggatggaccctgccgtgaacccggcctttcccccagctgccccggcagggtacggtggataccagccccactccgggcaggacttcgcctacggcagccgaccccaggagcccgtccccacggccaccaccatggctacctaccaggacagttacagctacggacagtcagcagctgccaggagctatgaggacaggccgtacttccagtctgctgccctccagtctgggcgcatgacagccgcagactccggccagccagggacccaagaagcctgcgggcagcccagcccccatggcagtcacagccacgctcagcccccacagcaggcgcccatagtggagtccggacagccagcgagcaccttgtcctcgggatacacctaccccacggcgacaggcgtccagcccgagtcgtcagcttccatcgtgacctcctaccccccgccctcctacaaccccacctgcaccgcctacacggcaccaagctacccgaactatgacgcgtcggtgtactccgctgccagccctttctatcctccagcgcagcccccgcctcccccgggacccccgcagcagctgcccccgccgcccgcgcctgcaggctcaggaagcagccccagggccgactcgaagccaccgcttcccagcaagctgccgagacccaaggcggggcccaggcagctccagcttcactactgcgacatctgcaagatcagctgcgctggcccccagacctaccgggaacatctgggagggcagaagcacagaaagaaggaggcggcccagaagacaggcgtgcagcccaacgggagcccgcgcggggtgcaggcgcagctgcattgcgacctgtgcgccgtgtcctgcaccggggcggacgcctacgcggcccacatccggggatccaagcaccagaaggtcttcaagctgcacgccaaactggggaagcccattcccaccctcgagcctgcactggccacagagagcccccccggggcagaggccaagcccacgtcccccactggccccagcgtgtgtgcctcgagcaggccagcgctggccaagagacccgtggcctcgaaggccttatgcgaggggcctcctgagccacaggcagcaggctgcagaccccagtgggggaaaccagcccaacctaaattagagggtcccggagcacctacccaaggaggctcaaaggaagctcccgcgggctgctctgatgcgcagccggtgggcccggaatatgtggaggaggtgttcagcgacgaagggcgagtgcttcgcttccactgcaagctgtgcgagtgcagtttcaacgaccttaacgcgaaggacctgcacgtgagggggcggcggcaccggctgcagtaccggaagaaagtgaacccggaccttcccattgccacggagcccagcagccgggctcggaaggtcctggaggagcgcatgaggaagcagcggcacctggcggaggagcggctggagcagctgcggcgctggcacgcggagaggaggcggctggaggaggagccaccccaggacgtgccgccccacgcgccgcccgactgggcccagcctctgctcatgggcaggccggagtcacccgccagcgccccactccagcccgggcggcggccggcgtccagcgacgaccggcacgtcatgtgcaagcacgccaccatctaccccacggagcaggagctcctggccgtgcagagggccgtgtcccacgcagagcgggccctcaagctggtgtccgacacactggccgaggaggaccggggccgccgagaggaagagggtgacaagcgcagcagcgttgccccccagactcgggtcctgaaaggcgtcatgcgagtaggcatcctggcgaaaggcctcctcctgcgtggggacaggaacgtgcgcctcgctctgctctgctccgagaagcccacgcacagcctgctgcggaggatcgcccagcagctgccccggcagctccagatggtgaccgaggatgagtatgaggtctcctccgaccctgaagccaacattgtcatctcctcctgtgaggagcccaggatgcaggtcaccatatctgtcacctcacctctgatgcgggaggacccctccacagacccaggtgtggaggagcctcaggctgatgcaggtgatgtcctgagccccaagaagtgcctcgagtccctggccgccctccgtcatgccaggtggtttcaggctcgagccagcggcctgcagccatgcgtgatcgtcatcagggtcctgagggacctctgccggcgtgtgcccaccctggggggccctgccagcctgggccatggagctgctggtggagaaggctgtgagcagtgcggctgggcccctgggccccggggatgcagtcaggcgagtcctggagtgcgtggccacagggacgctcctgacagacgggcccgggctccaggatccctgcgagagagaccagacagatgccctcgagcccatgaccctccaagagcgggaagacgtgaccgccagcgcccagcacgccctgcgaatgctggccttccggcagacccacaaggtcctgggcatggatctcctgccgcccagacaccggctgggggcccgcttccggaagaggcaacggggacctggcgagggagaggagggcgcaggggagaagaagcggggccggcggggcggagaggggctcgtgtga

SEQ ID NO: 90028 - DNA, 2160 bp, Homo sapiens; identical to SEQ ID NO: 75605

SEQ ID NO: 90029 - DNA, 7728 bp, Homo sapiens; identical to SEQ ID NO: 60554

SEQ ID NO: 90030 - DNA, 4322 bp, Homo sapiens
aaccaaacggcgtcgcccttttacaccttcccggagcggcagtcatcccaaatacaaactacatgttccaggatgctttgggcggcagatctcgcggaagccgcgaggagagcccggccccgtctcgcgcgcctgcttccgcctccctgtggcggcggcttgttgttgtggaggccaaaatggcggctcatgcggcggcagcggcccaggcggcggcggcccaggctgcgcatgccgaggcggccgactcgtggtacctggcgcttctgggcttcgctgagcacttccgcacttccagcccgcccaaaatccgcctgtgcgtgcactgcctgcaggccgtgttccccttcaagccgccgcagcgcatcgaggcccgtacacacctgcagctgggctccgttctctatcaccacaccaagaacagcgagcaggcgcgcagccacctggagaaggcgtggttgatatcacagcaaatcccacagttcgaagatgttaaatttgaagcagcaagtctgttgtctgaattgtactgtcaagagaattccgttgatgcagcaaagccgctgctgcggaaggcgatccagatctcacagcagaccccatattggcactgccgcctgctcttccagctcgctcaactgcacacgcttgagaaggacctggtgtctgcctgtgacctcctgggtgtaggggccgagtacgcccgggtggtgggatctgaatacacacgggcgctgttcctcctcagcaaggggatgctgctgctgatggagcgaaagctgcaggaggtgcacccgctgctgaccctctgcgggcagatcgtggagaactggcaggggaaccccatccagaaggagtcgctgcgtgtcttcttcctggtgctccaggtcacccactatctggatgccgggcaggtgaagagcgtgaagccgtgtctgaagcagctgcagcagtgcatccagaccatctccacactgcacgatgatgagatcctgcccagcaaccccgctgacctcttccactggctgcccaaggagcacatgtgtgtgcttgtctacctggtgactgtgatgcactccatgcaggccggctacctggagaaggcgcagaagtacacggacaaggccctcatgcagctggagaagctcaagatgctggactgcagccccatcctgtcatccttccaagtgatcctgctggagcacatcatcatgtgccgccttgtcacgggtcacaaggccacggcgctgcaggagatctcccaggtctgccagctgtgccagcagtccccccggctcttctccaaccatgcagcacagctgcacacattgctgggcctgtactgtgtctctgtcaactgcatggacaacgcggaagcccagttcaccacggccctgaggctcaccaaccaccaggagctgtgggccttcatcgtcaccaacctggcgagtgtgtatatacgggaaggaaatagacaccaagaggtagtagctctacagtctgctggagaggatcaacccggaccacagcttccctgtcagctcgcactgcctccgagcagccgccttctatgtgcgtgggctcttctccttcttccagggacgctacaacgaggccaagcgatttctgcgggaaactctgaagatgtccaatgctgaggacctgaaccggctcacagcctgctccctcgtgcttctgggccacatcttctatgtgctgggaaaccacagggagagtaacaacatggtggtgcctgccatgcagctcgccagcaagatcccggacatgtcggtacagctgtggtcgtcagcactgctgagagacctgaataaagcctgtgggaacgccatggatgcccatgaagccgcccagatgcaccagaacttctcgcagcagctgctccaggaccacattgaggcctgcagcctccccgaacacaacctcatcacgtggacagacggtccaccccccgtgcagttccaagctcagaatggacccaacaccagcctggccagcctcctgtgaggccttgatggggccatccagctccgcagggcctgcgcgtctccggcttccacccagacggcactcaagcctgcccccgaggcgtgcttccttcctgattgtctctagagcttccaagtcctgggaatgtgcggggccagtccctgccctcccaggaggggtggtagccgttcccacctcgcagcaggacccccagtgcagaggctcacaggtggcacacaggcgctgtctctccagagccatccttcagagtggacctcagtgccagtcctgcctcagcatctgggtcacgtcggccaggagtagggtgcaggcctccagcaggtcctaatcctgtgtgccagggcaggcagtgccccaggggcaccacgcctgactctccatcacccaggccttgatgccgagcgggagtagagtgtttcctctgctcaaggcaatttccagagcccggatgccagtttctggcctgaatttggagggaagaagtaatggccctagtgtgggacgaagcacagatcccagcacttttcccagctttctctccagcatcagtccctgcagcagctggggcctctggtcaggaaccctcagggacccaggaactcagcttccaaacatctgcaccttgaccggactcgccatcccgccgtgggggtgcaggtgattgtaaacacgggtgtgcatgtggatgcacacgggtgtgcggtgaagatctgtggagatggagctgggagctgaggctcctgttgcaccagccaccttcccccatcttgtggctgctgaggggcaggaagcgggggagtgggctcgtctcctaaatttaagatcacctcctcagctagcttagagtgcgtggcacgggccccccgcccccgagatctggagcccagggactttcttcctggcagatctgtggccttccctgctcagcctcttggtccccccactccctccaccgcctcaccttccctgctgggtctctggggcacagtgtgaaacccgcaccctagccaggccccagggagcctccgctgggcccagacagcagcgtttggttttatccacttttcttggataatcaggaggtgccccagtggtcacagtgtggcattccgagttggggcgggtggtcgggtcaagatagcagcagcaggtgtcagggctcaagacaccaccccctccagcttctggggcccaggagcctctccctgctacagggggtgggggtcctgctcagcagggtaggtggtggttttaggtcttgtcaccctcactcagtggaactgcctctgggagctttggcgtctgtgactaaagggacgctggattgctcaggtcagctgctcggggctcccaggctgggtgtgccttagccacaggcagggctgtcaataacccccttcctcactggccaccacctgacatcagcaccagtgacaggctggtcagagggcggggctggtgagggtttgtcctaagaggaccaccgccatctctgggtctccagggggagagcctggccctgtcctttgctacccagggctgcccccaggcccatgaagccaataggagagcgtgtggcactggcccacaaactgtccctgtcctgtcttcctcccgagccatggcctctgctagctccaccttgaaggagccccccacatcctcccctacatcccagagatgccaccacttgtgtctccacaatgtgctcctgcccacccgggttccgcactgtccgacccctgcacaccactcatgtcaccacggcgtgcatcatgttcatccccatctatttatttaagcctttctttgcttgtagggcattttgtatgtagagcagttgaaaacagaacctcagaacttaacatctgtcctgatgttaaagtgcttttcatgaccaccctgttatctatgtatatgtaaagttaaggatgagatcttaagtttacaattaaaaactcagtactcaatatttaatattctactcgagctttatggaagccaaatcatgtgcatgtgtgtgtgtgcgtgtgtgcaagctttgaacctccttccacagccgcatcttctcatgacacaaagcttttgataagtactttcctgtgggtcgctcagggcctcatagcatctcattcaattacaagaatagaggccagacacggtggcgcatgcctgtagtcccagctaactgggaggctgaggcaggaggatcacttgagcccaggagattgaggctgcagtgagcatgatcgcgacactgcactccagcctgggtgacggtgagactttgtctc

SEQ ID NO: 90031 - DNA, 1199 bp, Homo sapiens
gcgccaagtgtccccagcaaccagtgtctcctgtaccagcagaagctccagaactctcacccgattgcctgcctctgctgcgtctttgcccactgaacagccatgagaaggcaactccgggccagaagggctccatcctttccttacagttatcgctacagactcggtattgtgttttgtcactgttccaggatgatccggatgaagcgaaccagaactacttagcagatgaagaggaggaagcagaagaagaggctcgggtgacggtggtgcccaaatcggaggaggaggaagaagaggaggagaaagaagaggaggaagaggaggaaaaggaggaggaagagggtcaaggtcagccaacaggcaatgcctggtggcagaaattgcagatcatgagtgaatacctgtgggatccagagagaaggatgtttctggcccgaacaggtcagagttggagcctgatcttactcatttacttcttcttctatgcctccttggctgctgtgatcaccctctgcatgtacacactatttctgaccatcagtccctatataccaaccttcacggagcgggtaaagcctcctggagttatgatcagacccttcgcccatagccttaacttcaacttcaacgtttctgaacccgacacttggcagcattatgtgattagcctaaatggctttctccagggttataatgacagtcttcaagaggaaatgaatgtagattgtcccccggggcagtacttcatccaagatggcaatgaggatgaggacaagaaggcctgccaatttaagcgctccttcctaaagaactgctctggtctggaggacccaacttttggatactctactggacagccctgcatccttctaaagatgaaccggattgtaggctttcgtcctgagcttggagatcctgtgaaggtttcctgcaaagttcagagaggtgatgaaaatgacatccgatccatcagttactacccagagtcggcttcttttgacctccgctactacccttactacggcaaactgactcacgttaactacacatcccccttggtggcaatgcactttacagacgtggtgaagaaccaagcagtgcctgtgcagtgccaactgaagggcaaaggcgtcataaatgatgtcatcaatgatcgttttgtgggcagggtaatctttaccctgaacatagaaact

SEQ ID NO: 90032 - DNA, 1663 bp, Homo sapiens
tgtgaataaataaaagtttatcattccgtacaaacgcactcattttcaacaaacaagttttttacacgagccgcggttggccccggttggtggcacgtggggagcggccccgcgacggacgttctcgcgggcggcgtcacagcggctccaggtcctcgtccccgcatgcgtactcgtacaggtccacggcgcccagcggtgagggcgcctcgaagaagggcctctgggccagcggggaaccgcagcgcactcagcttctgctccacagggctgagctcggcctcgaacccgtcctcccagggctctcccgcggtctcctcggccaccaggatgtcgtactcctcggccgcgtacttctcccagtccgagagctcggggccgccgctgtcaccgtccctgaagcagggagatctgctctttctgctcgtggtcgaggtacttctcgatgttgaagaaggtgtcgaagaagacgttggccagcttgcagcgcttcaagttctggcagcgtgatcttcccttcagtcctcggcttgaccaggtccagcatctggcagaggcagtcctggaagggcagggcctcgatggccatgctgtccagccttcggcactgctcctcgtagaagtactcgagctcgaacatggacagggcgccgtccccgtccaggtccatgcagcggaaccagtactcgatgctggtcggtgtttttttgtcttcctcagagatcaaaaaccagacaaagtcggcatagctgatcttcccttccttctgcacttttctgcctcgtgtgactgctcctgagaagatcctgtctatcatcttggtagaaagggcgtggtcattgtgccgcgccaggtcgtccgcgtcgatgagcaggtcgtggtccgtgtccagctcccagaacttgcagtagatgacgtagaaatgctcgtacgagaagaattcggtcagctggttgatgtccgcctcctcctccagcagcgccacattctgcaggaaggagctcctccgcagctcggcgcaggtgatcctgccggaccaggaccggttcacggcgtagaagatccgctggatgaccgtggtgatgtagcgcgagtggaactcggacgcctccttcaggaacgacagccccgggtgcgtgttcaccacgtcctgcaagaaggggacaaagtcctcctgcaccaggtagttgcagccggggctcatgagcagatggacgaacttggccgcgtcgtcgtggcagttctggaggatttttctccacatggcgacgaacttgtggacggacacggagcccgtgcgctccccgccggcgccatagaagagcggccccttccagtagagggggcagccgcaggccttggccaccaggcccatgtcgtccatggtggccctctcgtgggggaaccgggcgaaggtgctctcgatcttgctgatgacggcatccacgttgacggagtcctgcgggcgtcctctagggaagtagaaggtcggaatgctttggctcgtggccgggggcagaggctcttctttccgtgtctgaacctgctggaaggccttcagacgcttcttgactcgagagggcagcacgaagtcgcagccgcgggccagtgagaccagctcctggcgcaggtcggggtcctggcgcagcgagcgctcgcggag

SEQ ID NO: 90033 - DNA, 4280 bp, Homo sapiens
cgctgctcctgctctgctacctgaatgttgtaccatctttgggtaggcagacttccctgacgacatcagtgatacccaaagctgagcagagcgtggcttacaaagactttatttattttactgtctttgaaggaaacgttcgcaacgtttcctgaaagtcctcggttgaagtattttatgcctcctcagcccttgtgttgtccaatttgggaagccagttgtttccatcctgagttccagaagtagcattccccgtgtacaaaaaaaaggtggaagaatgagaaacatccttcacacccagcaggacacaaatagtacatgtgaaatttcccaagcattatggtttacagagatgattatttcatcagacattccatctctgtatctgcagtgatagtacgcgcctggattactcacaaatacaggggcagagactggaatgttaaatgggaggaaaacttgctccatgctgtagcaaagaattataccctcctgcagaccatcccgccttttgaacgccctttcaaagatcatcaagtgtgccttgagtggaacatgggttatatttggaaccttcgggcaaacaggattccacagtgtcctctggaaaatgatgtggttgccctgcttggctttccttatgcctccagtggagaaaacacaggcattgtcaagaagttcccgaggtttcggaaccgagagctggaggccactcgacgccagaggatggattacccagtgtttactgtttcattgtggctttatttactccattattgcaaggccaacctctgtgggattctgtactttgttgactctaatgagatgtacggcacaccttctgtatttcttacggaagagggctatttgcatattcagatgcatcttgtcaaaggggaagaccttgctgtaaaaactaaattcatcatacctttgaaggagtggtttcgactggatatctcttttaacggaggccagatagtagtaaccactagcattggacaggatttgaaaagctaccacaatcagaccattagcttccgggaggatttccattataatgacacagctgggtacttcattattggagggagcaggtatgtggctggcattgaagggttttttggacccctgaagtactatcgccttcgcagtctgcaccccgcccagatttttaatcccctccttgagaagcaacttgctgaacaaatcaagttatattatgaaaggtgtgctgaggttcaagaaatagtatctgtgtatgcatctgcagcaaagcacgggggcgagagacaagaagcatgccacctccacaactcctacctggacctccagcgcaggtatgggagaccctcgatgtgcagagccttcccctgggagaaggagctgaaagacaaacaccccagcttgttccaggcattgctggagatggatctgctgaccgtgccaaggaaccaaaatgaatctgtatcagaaatcggtgggaagatatttgagaaggctgtaaagagactctctagcattgatggtcttcaccaaattagctctatcgtcccctttctgacggattccagctgctgtggataccataaagcatcctactaccttgcagtcttttatgagactggattaaatgttcctcgggatcagctgcagggcatgttgtatagtttggttggaggccaggggagtgagaggctgtcttcaatgaatcttgggtataaacactaccagggtattgacaactaccccctggactgggaactgtcgtatgcctactacagcaacattgccaccaagacaccccttgaccagcacacactgcaaggagatcaggcatatgttgaaacaattagactaaaagatgatgaaatactcaaggtacaaaccaaagaagatggagatgtctttatgtggttgaagcatgaagctacccgaggcaatgcagcagctcagcaacgattggcccagatgctgttctgggggcagcaaggtgtggccaagaatcccgaagcagcaattgagtggtacgccaagggcgccctggagacggaggatcctgcgttaatctatgactatgccattgtgctattcaagggtcaaggagtaaaaaagaacagacggcttgccttagagctgatgaagaaagcagcttccaagggattgcatcaggcagtcaatggcctgggatggtattaccacaaattcaagaaaaattacgcccaaagcagcaaagtactggttaaaagcaggaagaaattggggaacccagatgcgtcatacaatcttggagtcctgcatttggatggcatcttccctggagttcctggaaggaatcaaactttagctggtgaatatttccataaggctgcgcaaggtggacacatggaagggaccttgtggtgttctctctactatatcacaggcaacctggagacattccctagagatcctgagaaagctgttgtatgggcaaaacatgtagctgagaaaaatggctacttgggccatgtcatccgcaaaggcctcaatgcctacctggaaggttcatggcatgaagctttgctgtattatgttttagcagcagaaactggaattgaagtgtcacagacaaatttagcacacatctgtgaggagaggccagacctggccaggagatacttgggtgttaactgtgtttggagatactataatttctctgtttttcaaatcgatgctccttcctttgcatatttgaagatgggagacctttactactatggccaccaaaaccagtcacaagacctggagttgtctgtgcagatgtacgcccaagccgccctggatggagactcccagggattttttaacctggccctgctaatcgaggaaggtacgataatcccacaccatatcttggatttcttggaaattgactcaactctccattctaataacatctccattctccaggaactgtacgaaaggtgctggagccacagtaacgaggagtccttcagcccctgctccttggcctggctttacctgcacttgcggcttctctggggtgctatcctgcactcagccctgatctactttctgggaacctttctgctatccatattgatcgcctggactgtgcagtatttccagtctgtctcagcaagcgatccccctccaagaccatcccaggcctccccagacactgccacgtccactgcaagtccagctgtgactccagctgcagatgcctctgaccaagaccagcccacagtaactaataacccggagccacgtgggtgaactgtgcactccagttctctccagatgagagagaatcttttcaacagctggtattgggaagctggggccagggcatgatcctgataaacaccttaaatgtcttgtcaactggatgcaaattttgcaattggtgtcattttttttaaagtcaaattacaaggaagtacccagatcaggcagtggtaataccaaaggtcatcaaacacatacaaggaacatcttgatcatagggcatgtggggaagtttactgggccatcacagacttttgttctagtgattgtatgtattaggagtcatagcatgccctacggcagatctggattcttatacactaagatgtgtcttaagaatcacagtgcgtgcttcatccctttattgaagaacagaaaattatgactactctacaaggtggataatattttggtacctgtgcttgccacagccctgttcctcaaagctgaattgatagatttctctttgacttccaagacctagcagttataaggcaccttgaaataaattgtttgtgcctggaaatgcagggagggcaatagctttgtaaattggtttacatttttctccttgaatttttctagggtcctagtgcttccgaatcatttaatggcattgtcggatatcttttacatttcaattgcaatccatgaaattacatttagaagattcttagtacttaactgtagtcttctccatgaattacacgttagaatagactggcagcaactgaatatgcagcaagtaagcctctagcttctagcttatagtttcatccctacccctcatgcctgcgtgagtctgtacagggatatgtgtgtgtgtgtgtgtgtgtgtgtgttagagaggaagaggaagagcagaatgtctgtatactacatgctgctaaggtagtgaataaatcagtaatgcaatattgtgggtccaaactactctttgcactactttatttacagtagtaaataaaattatttttatacaattg

SEQ ID NO: 90034 - DNA, 1585 bp, Homo sapiens
attgacgggtccatccacgcgtccgattgtctgtatcagacatcatgggagcagatccagggcgacatcaaagggaagcatgagtctccaggaccagaggggcttggatgcagatgatcatcatctgggcactgctggatactgaagttctcattatgttgcctagactggtctcaaacctccggcttcaagagatcctctcacctcgaccttcaaattactgggattacaggcatgagccaccatgtcctaccagactttgttaaaagaggaacaggccaggcatcgtgggctcacatgaacactcatgccccagaagtaaacaagtgttagccaaccaggaggcctatcctccccctaacctcacccaaagccatctctgtgccctcccccttgcaggggaaacagcacacactagtgaaatcttgtcttagtgtgtccggaattggtgggttcttggtctcactgagttctagaatgaagctgcagaccctcgcagtgagtgttacagctcttaagttctggtcagcctatgtgccatgccagacccaggaccgggatgccctgcgcctcaccctggagcagattgacctcatacgccgcatgtgtgcctcctattctgagctggagcttgtgacctcggctaaagctctgaacgacactcagaaattggcctgcctcatcggtgtagagggtggccactcgctggacaatagcctctccatcttacgtaccttctacatgctgggagtgcgctacctgacgctcacccacacctgcaacacaccctgggcagagagctccgctaagggcgtccactccttctacaacaacatcagcgggctgactgactttggtgagaaggtggtggcagaaatgaaccgcctgggcatgatggtagacttatcccatgtctcagatgctgtggcacggcgggccctggaagtgtcacaggcacctgtgatcttctcccactcggctgcccggggtgtgtgcaacagtgctcggaatgttcctgatgacatcctgcagcttcttgaagaagaacggtgggcgttcgtgatggtgtctttgttccatggggagttaatacagtggcaacccatcaggccaatgtgttccactgtggcagatcacttcgaccacatcaaggctgttcattggatccaagttcatcgggattggtggagattatgatggggccggcaagtacaggaagaaaacaacatgcaaagccccttggaggacaagttcccggatgagcagctgagcagttcctgccactccgacctctcacgtctgcgtcagagacagagtctgacttcaggccaggaactcactgagattcccatacactggacagccaagttaccagccaagtggtcagtctcagagtcctccccccacatggccccagtccttgcagttgtggccaccttcccagtccttattctgtggctctgatgacccagttagtcctgccagatgtcactgtagcaagccacagacaccccacaaagttcccctgttgtgcaggcacaaatatttcctgaaataaatgttttggacatagaaacagaaaaaa

SEQ ID NO: 90035 - DNA, 2164 bp, Homo sapiens
gacgcgcgccgccgcgcggaaggagcgaccagggcaggcgcgacgcgggcagagcgagcgccgcggaccccggaggcgagcggccgaggggagcccagtcccaacttcgggccccggccccggcgcgccccggcccggccccgcgaggtctcggcgcggaagatggccggcggcgtggacggccccatcgggatcccgttccccgaccacagcagcgacatcctgagtgggctgaacgagcagcggacgcagggcctgctgtgcgacgtggtgatcctggtggagggccgcgagttccccaacgcaccgctcggtgctggccgcctgcagccagtacttcaagaagctgttcacgtcgggcgccgtggtggaccagcagaacgtgtacgagatcgacttcgtcagcgccgaggcgctcaccgcgctcatggacttcgcctacacggccacgctcaccgtcagcacagccaacgtgggtgacatcctcagcgccgcccgcctgctggagatccccgccgtgagccacgtgtgcgccgacctcctggaccggcagatcctggcggccgacgcgggcgccgacgccgggcagctggaccttgtagatcaaattgatcagcgcaacctcctccgcgccaaggagtacctcgagttcttccagagcaaccccatgaacagcctgccccccgcggccgccgccgccgctgccagcttcccgtggtccgcctttggggcgtccgatgatgacctggatgccaccaaggaggccgtggccgccgcctgtggccgccgtggccgcgggcgactgcaacggcttagacttctatgggccgggccccccggccgagtcggcccccgacgggggacggggcacgagggcgacagcaacccgggtctgtggccagagcgggatgaggacgcccccaccgggggtctctttccgccgccggtggccccgccggccgccacgcagaacggccactacggccgcggcggagaggaggaggccgcctcgctgtcggaggcggcccccgagccgggcgactctccgggcttcctgtcgggagcggccgagggcgaggacggggacgggccccgacgtggacgggctggcggccagcacgctgctgcagcagatggatgtcatcggtgggccgggcgggggcccgcggcgggggacagcgacgaggagtcgcgggccgacgacaagggcgtcatggactactacctgaagtacttcagcggcgcccacgacggcgacgtctacccggcctggtcgcagaaggtggagaagaagatccgagccaaggccttccagaagtgccccatctgcgagaaggtcatccagggcgccggcaagctgccgcgacacatccgcacccacacgggcgagaagccctacgagtgcaacatctgcaaggtccgcttcaccaggcaggacaagctgaaggtgcacatgcggaagcacacgggcgagaagcccgtacctgtgccagcagtgcggcgccgcctttgcccacaactacgacctgaagaaccacatgcgcgtgcacacgggcctgcgcccctaaccagtgcgaacagctgactgcaagaccttcgtccgctccgaccacctgcacagacacctcaagaaagacggctgcaacggcgtcccctcgcgccgcggccgcaagccccgcgtccggggcggggcgcccgaccccagcgcgggggtttaccgcgacccccggcgcccccgcccagcccagctcccccgacgcccggcgcaacggccaggagaagcactttaagagacgaggacgaggacgaggacgtggccagccccgacggcttgggccggttgaatgtaagcgggcgccggtgagaggagagtgacaacggaggtggccccggggccgccaccgacggtaaacttcacagccggactcgcctaaaaaccaaaaagagaaaacagaaacccgagaaagagagagacagagagagagaaaaaaaatcacccaccacccccccaaaaacacaaaaaaagaaaatctatctatatacagatatctatatctatatatatatatacagatatatatatatgacgcgtcacagaatctagggtagcgctttctcagatttccctcctttctgacgtttttctccctccgcaggggccccg

SEQ ID NO: 90036 - DNA, 2206 bp, Homo sapiens; identical to SEQ ID NO: 60735
  misc_feature (1)...(2206): n = a,t,c or g

SEQ ID NO: 90037 - DNA, 3853 bp, Homo sapiens
ttttttttttttggctccactggctttaatctgccccacctcttccacaccaacctcccaccttggggttcgagggggctgggttacaaaccccctgtttttttaggagaccgaaaacccccccccggttcctgtaaaaattaagtcccaggtccacaggtaaaggcttgatttggggcccaccccaagggagtgtgggctgtgaggcaggagcgagctaaacctgtaggagcagcgccacggctgccaggatccacttcgctgccttctctttggtcttcaagttaaaggtccagacataggtggggccgcggatgcgtgttttgtacacgggacactcatagatgttcttggtctccatgcgggccacaggaatggccttgatgaagatgacaggcatggccggggtcagctctttcagccgcgcttcagcgatgactccagtctgggtgtcccagcgagccccttccatgaagagtccgtacacgtaggagccctctcgtgggggagcggtcatgtcctctcggtttttcttggtcacctcgacagacagacacatcttgtccaggggccactcgttcttcctggccatggactgcatgatggccgtgaggaacgactgggggttgaagaagccggccagccacacggtggtgggcagggcaaagtctgtcgtccaggcctcgagttccctgatgcggagcagcaggtttgcgtaccaggccgccaggcccatcatggaggggtaggcccgggccacccacgtatcaggcacggtgtcatagaagagagccgtggacagatcttccacgtcggtcgtgatggtcagttctcccttcagccccaggttcagctccttgagcgaacggcgcatttcgttggtcaggatgttcattctttcacattcttgaaaggcgactaccacatagggggtcttttccgctgcctttgccatgatctcagccatgttgaaagtctccggaatcttctccaggatgtcgtccagcacggccttcaccttctcctcgcgggacactcccgtgcctgcccccgagtccgtctcttttggctgcatttccaggacagtgcggaacagcttctctgaggtgaccgtcagaaagccaatctctgcgttggggtgcaggccatacagatagggactctcagggggcaggttctcatcgatgtattcgtggtaacccttgtagtccaggttgggggggatctgaaagccgggggccagcaggacgtctccctccagcatctccgtccggatgtattcagccaggtaggtcctgcacagccgacggtcccagtcatctgtgatgtggccgccatacatgatttcaccaaaaaggtagcggagatcgtcccagggcaccttggggttggcctccaggtagttgtagagcacgttgatggagatggtgaggtccccgttgttgaaggggtacgaccggttccagccctgggcgccgaacttgcgcctctctgccaccacagcgtggaagtagcacagggcgaagagcatgcacttgaactccatctccttggtgcacatctccagggtgtcctgggtgaacaggtccagggccttgtacaagttggcgtacatgcccgtggggggctcgttggtgatcttgatggcgttctccagaatgccctgggggatgatgtgggtctcgggactgggggcaggctccgctctgatgaacacccggtagtcctcatgtctgcccgtgctgtagcgctccagcttcttgtccagtgttcccagccaccgggccaccaggtggatattctgcagaatgacccagtgtcctttctctgcagccacgtccagggcgttctcagccaccacctcttgtccctgccccagggacacattatggagttttccattgtctatggtaaaccctagtttttttcccagggcttccacgtctttcaaggggtcaacccccggggagaggatgaagaagattgacgtggaggggctgctctcctcgtaggacttagaaaactcaacactccggccttccacgaacttgctgcccatcttttcctccacgaagttcttgatagcgtaggtcatgcgatctggccgcaggcagcgcaccatgcacagcttctgcagggccgtcttgttcttccactccttggggaagatctccttctcgggggcttccgactccaccagctttttccagcgcttggcagatccttcgatgtcactgtccagatttttgaactcatccatctccgagagggccttgatcccgccccagccttgatgctggaggaagtccactggtgagaccactccggccttaaaagggaaccgcaggaggaaatccagctccactgggttcagctccttcttcatggacaggacctgaaacgtaacttgtgccaggaaaatgagtttgtccctctcgaagagtccccgggccgtgtacatgtagacggagtaggtgatctcgtccgtcaggttgatcacccgctgcttcacctcgttggcaggggtggtcctctggatggctttctcaaacaccacgttgaaggccttgagggagaactggtagacggggttgattttgttgagatcgttcagtatgaagtagagcagagatgccctctccgcagccgggcggtagttctctctcgcttcgttgattttaacttctgtgatttttgcctccaccaccttctcctcgatctcgctggctgtgtgcttggtggtctccagattctccaccaaggccgtgtctcccagaaagttccccgacgcagccgacagacgggccaggagcgaatcttccagctctttcagaacaatcttaaattcgttttgagacttggtgaggtttgccttcagctgttccagatctgggcgctctttggccaccacagcggccaagagttggtcctcgagtccatccctggtgaccaggaagttgatgagggtgcactgagcctgcatctctggcttgtagtgtgggttgaagtacttggtgtgtaggatcaggcggaacttggggtggtactcccacctccttgtcaccgatcttaatgtactttccctttttaatcgtgttcctgcccagtagagggtccagcgcggggtccacggtttcgccgatgttctcaatgagcaacgtgtccccttccgaggtggcctgctcgatgacatccaggtagctcttctgtcccaggcggatggctttcagttcactcctgtatttgtttttgatccacttgattccttggagctgggcgtccacgatcagcggccaccgctcggtgttgcccaggatggtggcattctcggtggacatgcggtcgctggggaggccctggttgttccaggtggccacgtccgcgtcatctgtcagcaggctcaagggatccaggccattcgtgatcgggatggggacctttaagttatgtatgtaagggatccagaatttctccatcagctcattccggtatttcttggtgaagtagcccacgtaggacacgaaggcagagatgagcaggacgtccccacacagcgtgaccccctggctcctgaagttctccacagactcagcccagcggatgttttccgatgctaatcccccgaccagcctgttcgccagtaagatcaccctgttcgtggcatcggcctcttgctgacacttgattttctcagctgttgctttttcaaacgctgaggttaggttgctcaggttggcgttaagttcctgcaaaaccaagttggaaagctgctggaaaaccccacgaggcatctctagccccctgcagcggcagcagggctgggccctgtgagcgctgagacgaaatcgtcgac

SEQ ID NO: 90038 - DNA, 1556 bp, Homo sapiens; identical to SEQ ID NO: 60737

SEQ ID NO: 90039 - DNA, 641 bp, Homo sapiens
  misc_feature (1)...(641): n = a,t,c or g
cgcgtccgcggacgcgtgggcggacgcgtgggtcaatttaaaggaaggaaacttttacttcagacagttaacatgcagtactgagatttagtagcaggtataaactgcttttgaagcagttgagtaaaaggcagagttgtgaaatagatgagtggattcatataagaacctggattatgatcctagttctgcatgacattggactatgtacattaacctctgcagaattaggtaattggagtactgtttcaaggagctttcttgctctaaaaagtgtgatttagatagtatggccatgagtccatgtggacttttttttgcttttagaaagctgttggggttggaattgactggctttaaacatttagcaaacattaaatgctctttaacacaaaacagagtagtcagtctgctgtagagcagaggagttggcatactatctttgtgggttggctggttggttcgtttgttcatagacttgaggtcccactgtgtaactcaggctggatagggaatggggctttgactgacttagacgggcatatgagtcccgtccccctgcgtcntaaacctgggctgtaatggccaacaaggatggactgtttttttgtttgtgggngagagcgcgcctccccccccct

SEQ ID NO: 90040 - DNA, 2761 bp, Homo sapiens
gcccgactctaacatggcggcgccctttgtctgctctggagtgccgtccccggccttctcgcggccgtgatgcacctccctctgcggtggggtccgggacatggcaggtaatgagccggacgaggggagccaagctggagtttacacaggcaaactgtcagaaaagagtagcctgggctgtctggaaatctgagccatggactttccccagcacagccagcatgtcttggaacagctgaaccagcagcggcagctggggcttctctgtgactgcacctttgtggtggacggtgttcactttaaggctcataaagcagtgctggcggcctgcagcgagtacttcaagatgctcttcgtggaccagaaggacgtggtgcacctggacatcagtaacgcggcaggcctggggcaggtgctggagtttatgtacacggccaagctgagcctgagccctgagaacgtggatgatgtgctgcgccgtggccactttcctccaaatgcaggacatcatcacggcctgccatgccctcaagtcacttgctgagccggctaccagccctgggggaaatgcggaggccttggccacagaaggaggggacaagagagccaaagaggagaaggtggccaccagcacgctgagcaggctggagcaggcaggacgcagcacacccataggccccagcagggacctcaaggaggagcgcggcggtcaggcccagagtgcggccagcggtgcagagcagacagagaaagccgatgcgccccgggagccgccgcctgtggagctcaagccagaccccacgagtggcatggctgctgcagaagctgaggccgctttgtccgagagctcggagcaagaaatggaggtggagcccgcccggaaaggggaagaggagcaaaaggagcaagaggagcaagaggaggagggcgcagggccagctgaggtcaaggaggagggttcccagctggagaacggagaggcccccgaggagaacgagaatgaggagtcagcgggcacagactcggggcaggagctcggctccgaggcccggggcctgcgctcaggcacctacggcgaccgcacggagtccaaggcctacggctccgtcatccacaagtgcgaggactgtgggaaggagttcacgcacacggggaacttcaagcggcacatccgcatccacacgggggagaagcccttctcgtgccgggagtgcagcaaggccttttccgacccggccgcgtgcaaggcccatgagaagacgcacagccctctgaagccctacggctgcgaggagtgcgggaagagctaccgcctcatcagcctgctgaacctgcgcaagaagcggcactcgggcgaggcgcgctaccgctgcgaggactgcggcaagctcttcaccacctcgggcaacctcaagcgccaccagctggtgcacagcggcgagaagccctaccagtgcgactactgcggccgctccttctccgaccccacttccaagatgcgccacctggagacccacgacacggacaaggagcacaagtgcccacactgcgacaagaagttcaaccaggtagggaacctgaaggcccacctgaagatccacatcgctgacgggcccctcaagtgccgagagtgtgggaagcagttcaccacctcagggaacctgaagcggcaccttcggatccacagcggggagaagccctacgtgtgcatccactgccagcgacagtttgcagaccccggcgctctgcagcggcacgtccgcattcacacaggtgagaagccatgccagtgtgtgatgtgcggtaaggccttcacccaggccagctccctcatcgcccacgtgcgccagcacaccggggagaagccctacgtctgcgagcgctgcggcaagagattcgtccagtccagccagttggccaatcatattcgccaccacgacaacatccgcccacacaagtgcagcgtgtgcagcaaggccttcgtgaacgtgggggacctgtccaagcacatcatcattcacactggagagaagccttacctgtgtgataagtgtgggcgtggcttcaaccgggtagacaacctgcgctcccacgtgaagaccgtgcaccagggcaaggcaggcatcaagatcctggagcccgaggagggcagtgaggtcagcgtggtcactgtggatgacatggtcacgctggctaccgaggcactggcagcgacagccgtcactcagctcacagtggtgccggtgggagctgcagtgacagccgatgagacggaagtcctgaaggccgagatcagcaaagctgtgaagcaagtgcaggaagaagaccccaacactcacatcctctacgcctgtgactcctgtggggacaagtttctggatgccaacagcctggctcagcatgtgcgaatccacacagcccaggcactggtcatgttccagacagacgcggacttctatcagcagtatgggccaggtggcacgtggcctgccgggcaggtgctgcaggctggggagctggtcttccgccctcgcgacggggctgagggccagcccgcactggcagagacctcccctacagctcctgaatgtcccccgcctgccgagtgagctggcggcccttctgactgtttatttaaggatggatggcaccctggaaccgggaagggtggcctgttccctagagagaataaattggattattttttaaaaaaaaaaacctcgtgccaagcttggggtaatgagtgtaatcagctttcgat

SEQ ID NO: 90041 - DNA, 530 bp, Homo sapiens
aatttcgtcaaggagggggccgccctgaaccaggaccggtgccgaaactggacccaaggcccaggtggcgctgggttgcctgcaaggccgttggccaggcctgaccctttgccaccatggccattgggcaaactctgccagggccactggagcctgttcttgaagctgccactgccccacaagctccagtcatgggtagggggagcagccttatttcaggccggccctgtcccggggggccagttcctccccaccaccacggccttcctgggcccaccttcttccgccagcaggatggcctgctacgggggggctatgaggcacaggagccgctgtgcccagctgtgccccctaggaaggctgtccctgtcaccagcttcacctacatcaatgaggacttccggacagagtcaccccccagcccaagcagtgatgttgaggatgcccgagagcagcgggcacacaatgcccacctccgcggcccaccaccaaagctcatccctgtctctggaaagctggagaagaacatg

SEQ ID NO: 90042 - DNA, 5999 bp, Homo sapiens; identical to SEQ ID NO: 60998

SEQ ID NO: 90043 - DNA, 403 bp, Homo sapiens
tttcgtctcttctgagcttggggcctgggggacggaggggttggttattggttcaggaggtctggggcaaggaagaggctgtagaatgtggtgggacctcgaccactcccggaaaggaggctgctttgagggggtgggaccgaggcctgatgagaggaggatggtctcctggggaaggatttgggccagggtccctgatgttggggttgtgggggatagtgttagattcagagtgtggaaggaaaaaacgcttggggtttctgggtgattacagttggtgcttttggggagggtctcccctttggagaagaggctggaggtgggaggccctggtaaaagattcaatttcccccagtggccctagaggctctaaaaatggcttccctaaggcctcggaggctgt

SEQ ID NO: 90044 - DNA, 6329 bp, Homo sapiens; identical to SEQ ID NO: 80999

SEQ ID NO: 90045 - DNA, 1732 bp, Homo sapiens
tttcgtgctttttcctgggatagcgatggagacgccgggcgcatcagcgtcgtccttgttgcttcccgccgcgtccaggcccccgaggaagcgcgaggcgggagaggctggggctgcgacgagcaagcagcgggtcctggacgaggaagagtatatcgagggcctccagacggtcatccaaagggatttctttcctgatgtggagaagctccaggcacagaaggagtacctggaagccgaggagaatggagacttggaacggatgcgccagattgccatcaagtttggctctgccttgggcaagatgtcccgggagcccccgccaccctatgtgactccagccacatttgaaacccctgaggtgcatgcaggcactggagtggtgggcaacaagcccaggccccgcggccgaggcctggaggatggagaggctggagaggaggaggagaaggagccgctgcccagcctagatgtcttcctgagccgctacacgagtgaggacaatgcctccttccaggagatcatggaggtggccaaggagagaagccgggcacgccacgcttggctctaccaggctgaggaagagtttgagaagaggcagaaagataatctcgaactcccgtcagcagagcaccaggccatcgagagcagccaggccagtgtggagacctggaagtacaaggccaagaattccctcatgtactatccagagggtgtccctgacgaggagcagctgtttaagaagccccggcaggtggtacataagaacacgcgcttccttagggaccccttcagccaagccctgagcaggtgccagctccagcaggcagccgccctcaatgcccagcacaaacagggcaaggtgggccccgatggcaaggagctgatcccccaggagtcccctcgagtgggtggatttggatttgttgccactccttcccctgcccctggtgtgaacgagtccccgatgatgacctggggggaggttgagaacacacccttgagagttgaagggtcggaaacgccctacgtggacaggacacccggcccagcttttaagatcctggagccaggccgcagggagcggctgggtctgaagatggccaacgaggccgctgccaagaaccgggccaagaagcaggaagccttgcggagagtgacggagaatctggccagcctcacccccaaaggcctgagcccagccatgtcgccagccctacagcgccttgtgagcaggacggccagcaagtacacagaccgggccctgcgggccagctacacaccatccccagcacgctccacccacctcaagaaccccgggccagtgggctgcagacccccacaaagcacaccgggcgctctggctctgccacacgcacccctcttcacacaggacccggccttcaatcacggacaacctgctgcagctccctgcccggcgcaaagcttcggacttcttttagagccaggcctgggctgggctcatagacgcttcacagagcctgcagggcagctgtacacccagcagaggactccagccttctcggggcccaggcctgggccagaagctgttgaccataccaggagtcactggagaaaggggctgtgctggggccagactggcacaaggcactcgtgcccacaccacaccccagggccttgccaagctgtttgctgtttaattggccccttgaactgtcattaaagaacacctaggtacagtcaaaaaaaa

SEQ ID NO: 90046 - DNA, 1228 bp, Homo sapiens
  misc_feature (1)...(1228): n = a,t,c or g
tttcgtcacagcctgaccctctgtgaccttcctcaaaggctccccaaagaggctttcccttgaagtgcaagtcatagtggcgcccctgccacgtccctatatgaacggggtgtgtgcccgcctgccctccgacgtccgccggctgtgctggtctgcagagctgccgccagctgcaccctcctcgccatgagtgacctgcaggaagaaggcaagaatgccatcaactcaccgatgtcccccgccctggtggatgttcaccctgaagacacccagcttgaggagaacgaggagcgcacgatgattgaccccacttccaaggaagaccccaagttcaaggaactggtcaaggtcctcctcgactggattaatgacgtgctggtggaggagaggatcattgtgaagcagctggaggaagacctgtatgacggccaggtgctgcagaagctcttggaaaaactggcagggtgcaagctgaatgtggctgaggtgacacagtccgaaatagggcagaaacagaagctgcagacggtgctggaagcagtacatgacctgctgcggccccgaggctgggcgctccggtggagcgtggactcaattcacgggaagaacctggtggccatcctccacctgctggtctctctggccatgcacttcagggcccccatccgccttcctgagcatgtaacggtgcaggtggtggtcgtgcggaaacgggaaggcctgctgcattccagccacatctcggaggagctgaccacaactacagagatgatgatgggccggttcgagcgggatgccttcgacacgctgttcgaccacgccccggataagctcagcgtggtgaagaagtctctcatcacttttgtgaacaagcacctgaacaagctgaatttggaggtgacggaactggagacccagtttgcagatgggcgtgtacctggttctgctcatgggccttctggaagactactttgttcctctccaccacttctacctgactccggaaagcttcgatcagaaggtccacaatgtgttcctttcgcctttgagctgatgctgggacggaggccttcaagaaacccaagggttcgtcctgaaaggacgtggtttaatttgggacctcaaatccaccttgagggtttttttacaacctgtttcaccaagtacaaggaacgtgggagttgacggggggagctgtgggatggtnggcangagtnttcccagcaag

SEQ ID NO: 90047 - DNA, 5148 bp, Homo sapiens
ttttttttttttaaaatgtagtcaactttattctccttaaaccacaaaatagagtctttggttgtacaaacatcactagttacagtctcgccgaggtctcggctggggtggggcagttagttagtcacaggccagaactcctgtggggtctctttaaaatgctaacacccaggttaaaagacttggggcaagggtggtgctggagctggcagggcccccaccccaagtctgggggaggtgcctgctcctctaggagggcacagggcccaggccacggcgcccaggccttacggggccggcggctgctgcacagtgccacatcttcagggcccacagcgccgggtgagggcctgcccagaagcaccagagccacttctccatcctcctcctgcgggccagggctgggagatggttccagggacctcaactcctcagcaaagtccggtgacaggcgtcccggggaggtgctggtctgggggccgaggtcttccacaggggtgggcgacggggtgggcgccaggaaaggggccttcgccagtcgcttccagggccccccgcgtgccccggccttcctgggacctgctgaggaccatctgtgctcggagagcgtcctgttccaatgacttcatcctggctgccctccacagcgcacgcttctcggcctccagggcccggagctcggcaggggacagggcacgctcgggtgccggtggctccggactctgcacgcgcagccgctcctggtggcgccgttcagctttggccgtccgcaccggggcgccacctcccaggggcgggggggacgccgggctctgccttgaggtggggctcgggctggcccagggtggcttgctcatcctcctgttcctcctcgcccagcgtctccccgtccagggcgagcctcgcttcggccccagcctctgccgcctcccgcagcatctgcgctctcttctgctgtagttttctggcttcctcctcctgcatcttccgcaggtcgtcagcacccaccagggacacgcgcttaggggggccctcggcctggggcacgcgcacctccagctcaaagtacttctgccgctcccggaaggacagctgctccggggaggctgcaggcccaggcgtggggggctgggcaggggcatcctcaggcgggtgagaagtgggcacggccgcgaaggccctgtaggcctgcttcacattggcgggcagctcatccggagaaggtggggagggcggctgctggccactaggggagcagggagattcagccatcttccctccagctgctccagacggtaccctctgcacgctgccagcgctgggcacggcggccagggcgcggtagtccagcttcaggggctgcagaccccgacctgcggcttctgtggcctcgggcccccagtgcagggtctgtccaggcagctccttctccttgcctgggccctcagggctcagctcccggtcgatggaagagatgctctccaggctgttccggtggccgatgcctgccgcaaaggggttggcaatgacacctggggacacctccagggctgcgtcggtgctggcctcgaagccgtcacagaccagcacggtgagggtgtcgcccacactgcggagcagctgcaccgcctcgccgtgcgtcaggcccagcaggctctgctggttcacctccaacagccgcaaacccacacgcagccgaccgtcgcgcccggctgcccccgtggggctcaccttggagatgaagatgccctcgtctgtggggtcgcgggggttgccagcgtggcccctggcacccccgcggatgctgatgcccagcctctccccaggtgccttctggatgcacagttcccgtaggcccgggggtgccgggtccctccgcaccagcagcgacagctccaggcagggccggagcagggcactgactgcttcttggtgcgtggcatcccgcacgtcttgcccgttcactgccaggatgcggtccccaacccgcaggccgctgcgagcggccaggccccgcgggagcaccttggagatgaacacaccaggctcctggacaccaaacgggtggctggaatggtcggagcctccgacaatactaagccccagagggcccccagctcttggcagacggatctcctccactgggtatggcccttccaacgcggcagccagcaggctgggggccaggctcggcaacccaggcaccccgggggtggcagtggttatgctggtggtggcaacagcagcggtggggggtgaggaatgtggcagagggctgggaggaagagggcccccagcctcccgctccaacagcagggcgatggtgggggaggcagcggtcagcagggagacggcgtggtcatgcctggcctcagtcacgtccactccattaatagagaggacgcggtcgccaacctgcagtgtgcccgcgcggtgagcagcaccgccctcggcaatgcgggagacgaagatgcccgcatcaccagccctgtagggtgtggagcctttcccaccagcaatgctgaagcccagccccctctcgctgcgtgccaggcaggccacgtggcgctgacggaggggcccggggctttcaggcgggagcaggggcaggcgcagcccccctcccccgccgctctcgggggctgtaatcatcctcgggccgcagcggcgtgatggtgaccgcgttctcaggctccaccatgcgctcccgccacactcgcatctgcacggcagtgccggccccccggagcgcctccacggcctcgtggtgctcggcgccctgcagagccacaccattcacctccaggagcttgtcacccacacggactccagcccgggccgcagggccttcctcggacacccgagagatgaatatgccctcgtcgtcccccttatagggtgtggagcccttgccgcccgcaatgctgatgcccaggcccccagtctgccgcaggatggtgagggtcagctcttcctcctcaatgcgagcaggctctatcagcaggttattggcctggtcaaacgaaactcccttgacagagggcgcagaaaccacggccccctccttgtcctcctcctcagtgctggcctcttcctcttcagccctgttttcctcctcctcctcttcctcctcctcctgaggactaccctcttcctcctcctcctcctccttctgggcccgaggagcccagggtgcgtgggggccattgtgccagcccccgggagccacagggccctccccatcaggctgcatgccctgcagcagagccacaacggcctcgggctggggcagcttggagatcttgaagtgctttttgtagtgaggtgtgtccttgcggatgagccgctgcctcccgcctggcagggtccagggggcctcaggctgcccctcctcgatctccctgtcatccccgggcagcagtgcgtcctctgcgaaatgcaccgtgggctcctggtagtcctcttcggcgtcttcctccccgccagcagtcgtggcttcctgctggctcccaccctgtgcctcagccgacgggccctcgggctcagcctcagagactgtgctggcagatgggcgagagtcttcactcaggccagactcggcactcagccgcttctcctcctctgcaggcaagggcgacccagagtctggctggcaagggcaggcctcgctccgccgcccctcgatgctcctcttcatcaccttgagctcgctggggtgaggtgtggcccggcgctgtaggccccgcttctcagctgcagcttcctcagcgtcctcatcacctatgggggcctccaggaactggatgacgctgacgcggctcggcggggcatcgctccaggtctccgagaggctcccctgctgcccagcatcctcgaggctgagtgggggctgctggggcagcaagtagcaggtgagcaccttctcgccggtccgggcatcatcctccgtctggaaccggagcatgggctgcgcctggttctctgccagccacagggccttgagattgaggtgggtgagcgcgaacggcagactctgcaggcggttccccgccacgtccagcacgtgcagctctgtcgtgtgggccagctctggtggcaggacggccaggcggttgtccctcaaggagaggacgctgagtgccacacagcccccgatctcgggcggcagcgcctcgaggtggttccggtccacgttgaggttggtcagcttagtcagctttcccagggagcggggcagggccatcagcaggttctccgtgaggatcagctcagagaggttctcacagtccccgatggcctcagtcacctcgcacagccgattctggtctacctttaggatggatagctgcttcagctgaccgatgccgtcgggcagcctccgcagcaggttctgggacagcagcaggtcagtgagcagcaccagcccgccgagctcagcaggcagctcctccagccggttttccgacacgtccaggcacaccaggcgccgcaggttcccgagctccgggggcagtgctgacagctggttccggtcaagccacagctcccgaagattgggcagagcccccagagtgtctggcagcacttccagatcgttgcctcccagatccagctgttccagcttgaccagaaatgacagggacgctggcagggacttgagcaggttctcccggagctccagggtcaccaggttggcgaggttgcccacgtccccgggcagtgcctgcagagacacatcattcagggccaggtgagccaggctgcgcagctgagtgaagccatcagggagcctggagagggggttcccgctgaagtccgcgatctccagagccttgcagaacttgatgctctccgggatctcagggatatcgttccgggacacgtccagctccaccagctgcatgaagttggccacctcgggaggcacccgctggatctcgttgtcgctcaggcccagcttgcgcaagttcagcagccggaaaaaaggcttgggcagctcgcgcagctggttggcgtcgagcagcagctcctccaggctgcggctgtagcggtagatctcctccggcgcggcctgcagcgaacagtgccgcttgtcctccgactccacgaaacggttgcagcaacacagcgggatgcacttgaacgaaa

SEQ ID NO: 90048 - DNA, 2696 bp, Homo sapiens
  misc_feature (1)...(2696): n = a,t,c or g
tagataacctggagccggcggcgtaagttggctctttagggcttcaccccgaagctccaccttcgctcccgtctttctggaaacaccgctttgatctcggcggtgcgggacaggtacctcccggctgctgcgggtgccctggatccagtcggctgcaccaggcgagcgagacccttccctggtggaggctcagagttccggcagggtgcatccggcctgtgtgtggcgcgaggcacggaaaccggtacccgggtcctggccccagcgctgacgttttctctcccctttcttctctcttcgcggttgcgcgtcgagntangttgtgagcccccatggcagatacgaccccgaacggcccccaaggggcgggcgctgtgcaattcatgatgaccaataaactggacacggcaatgtggctttctcgcttgttcacagtttactgctctgctctgtttgttctgcctcttcttgggttgcatgaagcagcaagcttttaccaacgtgctttgctggcaaatgctcttaccagtgctctgaggctgcatcaaagattaccacacttccagttaagcagagcattcctggcccaggctttgttagaggacagctgccactacctgttgtattcactcatctttgtaaattcctatccagttacaatgagtatcttcccagtcttgttattctctttgcttcatgctgccacatatacgaaaaaggtccttggacgcaagggggctcaaatagtttacctctgctgaggatctgtcttggacaaattaagtgctaatcaacaaaatattctgaaattcattgcttgcaatgaaatattcctgatgcctgcgacagtttttatgctttttagtggtcaaggaagtttgctccaaccttttatatactatagatttcttacccttcgatattcgtctcgaagaaacccatattgtcggaccttatttaatgaactgaggattgttgttgaacacataataatgaaacctgcttgcccactgtttgtgagaagactttgtctccagagcattgcctttataagcagattggcaccaacagttccatagtttaacatctagttaagctacaaatatagtataagcattattagcagctggtacttctgctaggggttgtaaattccaggtgttacactgacctcaatccaatttacataatttacataaatgcatctcggtggaaaaataatcattttcttggcatgttaaatcaagcttaaaaagttttgagaaaattttactgtgctgtgttgctaatggttaaagaagtctgtatctagtgataaatataccagtttttttaaaaagatgctgttgtgcctatatcatgaagtacattaatttctcatgtaaaaaaaatagctctaaaatttgtttcaacctaattggtaacctgagtttatatctggcatgaattcattatggtgatacacatatgtgaattcagtacattttgagacagtattctaccattcagtaattttggttaatgattttaacacttctcagtgtatttaatttcaaattgtttttttaattggttttatgctgctttgttaggacagatgtgttttgaatgtaccattataagaagaattctatgtatcttaaactatgatcttctaaaattttatttccgtaagtacttctgtggccttgagtattttttaaaaggctcagctgtaagcctcttagccagttggataaatatttggggtcacctagccattgaaagcagaaagcagtagtgacacagctttcccttcaaagagccattgagaaacatttctcaaacaggaaatccttcttttactaatgtggacatatagattattcgtattatagtttgtagaactacctagttcagaatcttgactgccagttttcttggtttcttaggcttgaattttcatagacaattgcaacagtttagatgccttttgaaaggaatgtaatgaagattcagcatctgactatatgtgtgtctatcctgaaataataatggagagtatactgtagattacatgtttacccatcaaatctgacttaaaaggttaaatggaaggttttataggtaaggtaattgattgggaatggggtagggggaggagttgtgggggaataatgtgcatttcagtctcaacgcatagataaatttaggggaattggatgtattattcaactttgatttgggttgtaaaatgtgttaaatcctgttcattgaactcccatcaactcttataaaattcatgctgatcttcattaccgttgcatgattggaaatgtttaaaacattgtacagttttagtatagagaaatgtaatggtttttgtgaccagtttctgtctgcatgtaatttggatttctcaaatacattcattagtaatttatcagtaacattagttttatttttgttcatctccttatctataaaaaggggatattcttaggataaatacatgaaaaattatacttgatagcttaactataatcagctatttttgtatttttgtaatatttgtccactaagctggagaagcagcctcatacagttgattttgtgtatgtggctagtcttattgtcactatgtaagtaatccaatggttttagaaactaaactttctagagcaataaaatgactataatgttaagtaaaaaaaaaa

SEQ ID NO: 90049 - DNA, 2611 bp, Homo sapiens
ttttttttttttaaatgcgtttttctttttctttttttttttttaataagttaaagttaatacaaatataaaaaggggaaagtcctctagattcaatgacatccacaaattgtacattatttacaccaaaagcacagggctcgtgtgggtgaacagtctgcagtcaaagccgatgctgggtgtccctgtagtgtagcagcccccgcgccgggggctttaggctcaactgagggttttggtcatttttcaaagtctgaaaagtgggctgttctccttgcctttgttgtttcttcttttcctggccgtctgggttttttctccacaatggggtggggtgggtttgtgtccccgattcacttgctagtccccagaaagggtgtcccagcccgagactcctttccgggaaggaggctccttccgtgctgggtactgggtggttgtgatcggaacgtgttcgatcccctcttctcatcactgctgctccaactggatttattactcccgggaatggtcagagccttggttggagcctaagagaatggaggagggcgtctctctggagccagaaaggtcaagggtcgagccactctccttgcttttctcagctgacgtctccttctctttggaaggcgctggccgtttctgaaggtgctgattgtgtgctcgaggagctcccctgggaggacttatttagtgtttctgtgttcaccttcagcatccgcttcctgcttgaggagcagtagctgactgggtgcaggacttcaatgtgctcaggccagtgggcttgcttggcaggggtagtcacagtagctggtgttccaacagcagtaaaagatggcctccttcttgaagttggcgcaccactgcttcttcttggtctcatccaccgcctgctgcttctccaactccagctgcttcttcacctcggcgatgagccggtcccgctcctgctcccagctctgccgcatctccgccatggtcagctctaagttgtgtttcatttcggagaagctcttgctggtgcagccactggagcttctctatctcgatcctcaagccttgcgaatcttcagctaattgtgctttccaagtagtggtttttagaaagatcgttgtatatttctgtcattgttccttttattgcatccatcattttgctagtgtacttggcaatatcagcggcgacatcagctgaggcagtggcgatgggcaggtcagcgttgactgaggacacaagggtgctcatggaccccgagctggtgaccaggggcgatgactgtgtgctggtcaccagggtgatggtggacgtggatgggctctgtgtgatctccttctgctggacagttgatgaagttccacacgaccgctgcacggccggggcagtcctccttcggtaaaagcggcctctgctttttcactgggcttcctgtggcggcgggggccggggccgtgacggtgaccgtggaggacgtgctggtggtggctgtggcgccagccgcggaagtttgggcggaagagcgggtgagcaccggtgtttccgggggagaatggctgcccaccgtcgtggatggtggtgttttacctacaacatcctgtttgggagatggttctttgggttccttcttattttttcgaccctcccgcccagaatggtcttctcctaaatctatgacaagttcgttcctctgaatcagagtccaggcccaaatgaactgtgggggaatccgtctcatcttttcccttcagtttatccttaatggggtgaggtgaaggttttgcctttccggaaaagtccttctcaggctcagggctggccttgtccttgactgctccagggtctgccttctcgctggctggtgacgtgcttttcagctcctctttaatctccactgggtttgtaggcttgggcttttttttaacagcagatggctctttgtccatctgacaaccttctttgtcctctgtgtcttctggctcgtccttagacttctgctcatcatcactgatatactcactatcgctactatctgacttctcagaatcctccgaatcgctgtgctctacggccgtatagacatcttccgagatttcatttatgcctaattgtgctttgcaactctctatggtcttgtcaagattcagctggaacctgctacgaatctggcgcttgggagagatgagaggaacaggggtggactgttgctggaccgactcgctcagctccttcaaatccatctcagctttgcttcgatccaggttaagattcaggatgctgccggtggtggaggttttgtccgttttcgtcgtgataggagctgacagttgaggagagaagggctttgggctgccggataaactccctgcttgtcccgtcttggtggaggctggtgaagctgaaagtatggcattgttaaaagacaggtttacaaataaacaagtagaacgtgtaggtgtggtgtagggagagaatggagagattatgaaattgtgtttgatttcagcaaggccgctacagtatcacgaatggggtggggtggagcatagcaggttggccatttattttcagcaaagggctttaaccggatgtgaaaccgttaaagccacaaatgat

SEQ ID NO: 90050 - DNA, 6294 bp, Homo sapiens
  misc_feature (1)...(6294): n = a,t,c or g
gaggacagagtgcagccttttcctcccctaatagaaaagccattgccctcttttcctcccctaatagaaaagccattgccctcttttcctccacccttaagaagacctgcatctgttggaccaacagacaactatccggcttacggccaggggagcccctgcagctgcacagaaccagtttcttatgtatctggcggtaattgggaaagcttctgagaaagtccatggggccgatgtatgggagatgaatgtggtcccggaggcatttaaacgagggctgtgtggtgtgctcatgtggagggatggactacactgcatactaactgtaagcaggccgagagacccaataaccagcagaattgtttcaaagttttgcgatttggcacaaagagtttttacgactggagacttgggaccttggaatcagtgtcagcccgtgatttcaaaaagcctagagaaacctcttgagtgcattaagggggaagaaggtattcaggtgagggagatagcgtgcatccagaaagacaaagacattcctgcggaggatatcatctgtgagtactttgagcccaagcctctcctggagcaggcttgcctcattccttgccagcaagattgcatcgtgtctgaattttctgcctggtccgaatgctccaagacctgcggcagcgggctccagcaccggacgcgtcatgtggtggcgcccccgcagttcggaggctctggctgtccaaacctgacggagttccaggtgtgccaatccagtccatgcgaggccgaggagctcaggtacagcctgcatgtggggccctggagcacctgctcaatgccccactcccgacaagtaagacaagcaaggagacgcgggaagaataaagaacgggaaaaggaccgcagcaaaggagtaaaggatccagaagcccgcgagcttattaagaaaaagagaaacagaaacaggcagaacagacaagagaacaaatattgggacatccagattggatatcagaccagagaggttatgtgcattaacaagacggggaaagctgctgatttaagcttttgccagcaagagaagcttccaatgaccttccagtcctgtgtgatcaccaaagagtgccaggtttccgagtggtcagagtggagcccctgctcaaaaacatgccatgacatggtgtcccctgcaggcactcgtgtaaggacacgaaccatcaggcagtttcccattggcagtgaaaaggagtgtccagaatttgaagaaaaagaaccctgtttgtctcaaggagatggagttgtcccctgtgccacgtatggctggagaactacagagtggactgagtgccgtgtggaccctttgctcagtcagcaggacaagaggcgcggcaaccagacggccctctgtggagggggcatccagacccgagaggtgtactgcgtgcaggccaacgaaaacctcctctcacaattaagtacccacaagaacaaagaagcctcaaagccaatggacttaaaattatgcactggacctatccctaatactacacagctgtgccacattccttgtccaactgaatgtgaagtttcaccttggtcagcttggggaccttgtacttatgaaaactgtaatgatcagcaagggaaaaaaggcttcaaactgaggaagcggcgcattaccaatgagcccactggaggctctggggtaaccggaaactgccctcacttactggaagccattccctgtgaagagcctgcctgttatgactggaaagcagtgagactgggagactgcgagccagataacggaaaggagtgtggtccaggcacgcaagttcaagaggttgtgtgcatcaacagtgatggagaagaagttgacagacagctgtgcagagatgccatcttccccatccctgtggcctgtgatgccccatgcccgaaagactgtgtgctcagcacatggtctacgtggtcctcctgctcacacacctgctcagggaaaacgacagaagggaaacagatacgagcacgatccattctggcctatgcgggtgaagaaggtggaattcgctgtccaaatagcagtgctttgcaagaagtacgaagctgtaatgagcatccttgcacagtgtaccactggcaaactggtccctggggccagtgcattgaggacacctcagtatcgtccttcaacacaactacgacttggaatggggaggcctcctgctctgtcggcatgcagacaagaaaagtcatctgtgtgcgagtcaatgtgggccaagtgggacccaaaaaatgtcctgaaagccttcgacctgaaactgtaaggccttgtctgcttccttgtaagaaggactgtattgtgaccccatatagtgactggacatcatgcccctctatcgtgtaaagaaggggactccagtatcaggaagcagtctaggcatcgggtcatcattcagctgccagccaacgggggccgagactgcacagatcccctctatgaagagaaggcctgtgaggcacctcaagcgtgccaaagctacaggtgggaagactcacaaatgggcacagatgccaaattagtccctttggagcgtgcaacaagacagcccctggagcacaggaaggctgtgggcctgggcgacaggcaagagccattacttgtcgcaagcaagatggaggacaggctggaatccatgagtgcctacagtatgcaggccctgtgccagcccttacccaggcctgccagatcccctgccaggatgactgtcaattgaccagctggtccaagttttcttcatgcaatggagactgtggtgcagttaggaccagaaagcgcactcttgttggaaaaagtaaaaagaaggaaaaatgtaaaaattcccatttgtatcccctgattgagactcagtattgtccttgtgacaaatataatgcacaacctgtggggaactggtcagactgtattttaccagagggaaaagtggaagtgttgctgggaatgaaagtacaaggagacatcaaggaatgcggacaaggatatcgttaccaagcaatggcatgctacgatcaaaatggcaggcttgtggaaacatctagatgtaacagccatggttacattgaggaggcctgcatcatcccctgcccctcagactgcaagctcagtgagtggtccaactggtcgcgctgcagcaagtcctgtgggagtggtgtgaaggttcgttctaaatggctgcgtgaaaaaccatataatggaggaaggccttgccccaaactggaccatgtcaaccaggcacaggtgtatgaggttgtcccatgccacagtgactgcaaccagtacctatgggtcacagagccctggagcatctgcaaggtgacctttgtgaatatgcgggagaactgtggagagggcgtgcaaacccgaaaagtgagatgcatgcagaatacagcagatggcccttctgaacatgtagaggattacctctgtgacccagaagagatgcccctgggctctagagtgtgcaaattaccatgccctgaggactgtgtgatatctgaatggggtccatggacccaatgtgttttgccttgcaatcaaagcagtttccggcaaaggtcagctgatcccatcagacaaccagctgatgaaggaagatcttgccctaatgctgttgagaaagaaccctgtaacctgaacaaaaactgctaccactatgattataatgtaacagactggagtacatgtcagctgagtgagaaggcagtttgtggaaatggaataaaaacaaggatgttggattgtgttcgaagtgatggcaagtcagttgacctgaaatattgtgaagcgcttggcttggagaagaactggcagatgaacacgtcctgcatggtggaatgccctgtgaactgtcagctttctgattggtctccttggtcagaatgttctcaaacatgtggcctcacaggaaaaatgatccgaagacgaacagtgacccagccctttcaaggtgatggaagaccatgcccttccctgatggaccagtccaaaccctgcccagtgaagccttgttatcggtggcaatatggccagtggtctccatgccaagtgcaggaggcccagtgtggagaagggaccagaacaaggaacatttcttgtgtagtaagtgatgggtcagctgatgatttcagcaaagtggtggatgaggaattctgtgctgacattgaactcattatagatggtaataaaaatatggttctggaggaatcctgcagccagccttgcccaggtgactgttatttgaaggactggtcttcctggagcctgtgtcagctgacctgtgtgaatggtgaggatctaggctttggtggaatacaggtcagatccagaccggtgattatacaagaactagagaatcagcatctgtgcccagagcagatgttagaaacaaaatcatgttatgatggacagtgctatgaatataaatggatggccagtgcttggaagggctcttcccgaacagtgtggtgtcaaaggtcagatggtataaatgtaacagggggctgcttggtgatgagccagcctgatgccgacaggtcttgtaacccaccgtgtagtcaaccccactcgtactgtagcgagacaaaaacatgccattgtgaagaagggtacactgaagtcatgtcttctaacagcacccttgagcaatgcacacttatccccgtggtggtattacccaccatggaggacaaaagaggagatgtgaaaaccagtcgggctgtacatccaacccaaccctccagtaacccagcaggacggggaaggacctggtttctacagccatttgggccagatgggagactaaagacctgggtttacggtgtagcagctggggcatttgtgttactcatctttattgtctccatgatttatctagcttgcaaaaagccaaagaaaccccaaagaaggcaaaacaaccgactgaaacctttaaccttagcctatgatggagatgccgacatgtaacatataacttttcctggcaacaaccagtttcggctttctgacttcatagatgtccagaggccacaacaaatgtatccaaactgtgtggattaaaatatattttaatttttaaaaatggcatcataaagacaagagtgaaaatcatactgccactggagatatttaagacagtaccacttatatacagaccatcaaccgtgagaattataggagatttagctgaatacatgctgcattctgaaagttttatgtcatcttttctgaaatctaccgactgaaaaaccactttcatctctaaaaaataatggtggaattggccagttaggatgcctgatacaagaccgtctgcagtgttaatccataaaacttcctagcatgaagagtttctaccaagatctccacaatactatggtcaaattaacatgtgtactcagttgaatgacacacattatgtcagattatgtacttgctaataagcaattttaacaatgcataacaaataaactctaagctaagcagaaaatccactgaataaattcagcatcttggtggtcgatggtagattttattgacctgcatttcagagacaaagcctcttttttaagacttcttgtctctctccaaagtaagaatgctggacaagtactagtggtcttagaagaaccgagtcctcaagttcagtattttatagtgggtaattgtctgggaaaactaatttacttggtggttaatacaatacggtttcctactttccctgattttcaaactggttgcctgcatcttttttgctatatggaaggccacatttttggcacctatattaggtgccagcacgataggcgccttaacccagtattgccataggaaactggcctctnttttcatgtgggatgaagacatctgtgccaagagtggcatgaagacatttgcaagttcttgtatcctgaagagagtaaagttcagtttggatggcagcaagatgaaatcagctattacacctgctgtacacacacttcctcatcactgcagccattgtgaaattgacaacatggcggtaatttaagtgttgaagtccctaaccccttaaccctctaaaaggtggattcctctagttggtttgtaattgttctttgaaggctgtttatgactagatttttatatttgttatctttgttaagaaaaaaaaagaaaaaggaactggatgtctttttaattttgagcagaaggagaaaataaataatgtatcaatgacctttgtaactaaaggaaaaaaaaaaaaa

SEQ ID NO: 90051 - DNA, 2197 bp, Homo sapiens
cgagcccggagacttgccttgcaatgccatgtttgtgtatgtgctctaactcccggagagcaatcagggagacggctccccggccagacttggctgatgttttcttgtttctgtttcagccttcaggataattccttcagcagcaccactgtaacagagtgtgacgaagatccagtctctctacatgaagaccagactgattgctccagtctcagagatgaaaacaataaagagaactaccccgacgcaggggctctggtagaagagcacgcgccgccctcttgggagccgcagcagcagaatgtagaggcgaccgtgctggtggacagcgtattgcgacccagcatgggcaacttcaagtccaggaagcccaagtccatcttcaaagcggagagcgggaggagccacggagaaagtcaggagacagagcatgtggtatccagccagtcagagtgtcaggtgagagcaggaacaccagctcatgagagtccacaaaacaatgccttcaagtgccaagaaaccagtgcgacttccaaccaagaatagaccagaggactgccacttcgccaaaggatgcttttgaaactcggccaggacttaaatgaggaagaagctgctcaggtgcatggagtcaaggacccggcgccagcatcaacccagagcgtgcttgccgaatgggacagattctgcagacccctcaccagtccacaaagatgggcagaatgaggccgacagtgcaccagaagacctccactctgtggggaccagcaggctgcttctattcacatcactgatggtgataaccccactgctgttcgccacggttgttccctctttcaggccaaagccagagattcaacttagaccccgagtcagccccatctccacccagcactcagcagtttatgatgccgcggagttcttcacgctgcagctgtggagatggcaaggagccacagaccatcacccagctcaccaagcacatccagagcctcaagcggaaaattcggaaatttgaagaaaaatttgaacaagaaaagaaataccggccttcacatggtgacaagacttctaatcctgaagtcctgaaatggatgaatgatttggctaaaggtcgtaaacagctcaaagaactaaagctaaagctgtcagaagaacaagggagtgctcccaaaggtccacctagaaacctgttgtgtgagcaacccacagtccccagagaaaatgggaaaccggaagctgcgggcccggagccaagctcctctggagaagagactccagatgctgccttgacatgcctgaaggagagaagagagcaacttcctccccaggaggattctaaggtaactaagcaagacaagaacctcataaagccgctttatgaccgatacagaattatcaagcaaatcttgtcaacaccttcccttattccaacaattgtaagtcaggatacttgcatgctgttactttgtactgatgtgtagttaacaggatgtcacatagtagtacaagagttataaaagacccttcatggcagtatatactgcaaacaaggctagttgtcatttcaaaaagtgaaaatttggtcttctctaaccccattactatatttaacagtggctgatattagaactattgtaaaataggaacatatagcacttgtatgtctagagccaattttaacatttgctttcattatcttgggtgaaaagaaatgatagatttcagtttggcattttctaatttgtaacacagctagacaaaacagagcctttctgttctgtgtgttggttaattttttcctttaatcagaaaattaacaatatattcttgatataatgcaacatttgtttttggtaccatttgaccatactgtacaagatatgagaagatttatttcaatagaaaatataagtactgaaattgaattaggctacttttaataaagaatgatttatggggaatacagaactaggaaaaggcatcacaaatcctactccatcaatatccagaacagttacttgttcaagatatcaatataaaaaggaataaatattaacaaatataaatttaagtatggcttggggtacatttatacttccatttttttgaggacaaattatacttccacatttttaaaggacattaaggtgaataattaattcatagtctttggggaattttccctttatgggaa

SEQ ID NO: 90052 - DNA, 2211 bp, Homo sapiens
tttttttaggttttacttttcttttattaggttgtttgctatgtctttggctgatctaacaaaaacaaatatagatgagcatttcttcggcgtggcattagaaaacaataggaggtctgcagcatgcaagagaagcccaggcacaggcgatttttcacggaacagtaatgcttccaataagagtgttgattatagcagatctcagtgctcctgtggaagtttaagttctcagtatgattattcagaagactttctctgtgattgttcagaaaaggctattaatagaaattatttaaagcagcctgtggtaaaagaaaaggagaagaaaaagtataatgtttctaaaatctcccaatctaaaggccagaaggaaatatcagttgaaaaaaagcacacctggaatgcatcactctttaattctcaaatccatatgattgcccaaagaagagatgctatggctcatcgaatactctcagcaaggcttcataaaattaaaggactaaaaaatgaattagctgatatgcatcataaattggaagccatccttacagaaaaccaatttttgaaacaacttcagcttaggcatttgaaagctataggaaaatatgagaattcacaaaataatctacctcaaattatggctaaacatcagaatgaagtaaaaaatttaaggcaactacttaggaaatcccaggaaaaggaaagaactctatctaggaaacttagagaaactgacagccagttactgaagactaaagatatcttgcaggcactgcagaaactttctgaagacaaaaaccttgcagaaagggaagaactcactcataaattatctattatcacaacaaaaatggacgcaaatgacaaaaaaatacagagcttggaaaaacaactgaggttgaactgcagagcctttagccggcagctggctattgagactcggaagactttagcagctcagacagctaccaagactctgcaggtggaagtaaaacaccttcaacaaaaacttaaggaaaaggatcgtgagcttgaaattaaaaacatctatagtcatcgaatacttaaaaatttacatgacacagaggactatccaaaagtttcttcaacaaaatcagtccaagcagacagaaaaattttgccattcacaagtatgagacaccagggaacccaaaaatcagatgttccacctttgacactaagggtaaaaaggcaacaggaaacatcgatcataaagaaaaatcaactgaaataaatcatgaaattcctcactgtgtgaataaactaccaaagcaagaggattctaagagaaaatatgaagatttatcaggggaagagaaacatttggaagtccaaatactgctggagaatactggaagacaaaaagacaaaaaagaagaccaagaaaagaaaaacatttttgtgaaagaagagcaagaactaccaccaaaaataattgaagttattcatcctgaaagagaaagcaatcaagaagatgttctagtaagagaaaagtttaaaagaagcatgcagagaaatggtgtggatgacaccacttggcaaaggcactgctccctacacgaaaggccccctcagacaaagaagacattactcattcacagaagcaactgaaaacctgcatcatgggcttcctgcttcaggggggccagccaatgccggcaacatgaggtacagtcatagtacaggcaagcatctcagtaacagagaggaaatggagctagagcattctgtacagtgggtatgagccctcatttggtaagtcttccagaataaaagtgaaggatacaactttcagagataagaaaagcagtctcatggaagaactctttggatcaggctatgtcttgaaaactgaccaatcaagtcctggtgttgcaaaaggctcagaggagcctttgcaaagtaaggagtcgcatcccttgcctcccagtcaggcctccaccagccatgctttcggagactctaaagtaactgtggtaaattctattaagccatcgtcacctacagaaggaaaaagaaaaataattatttaaatataatcaatatcctaatgcattctggtttgatataatgctgcttatgtgccttgcatcttatttttgaaatgtgtgagagagggagtgtatgtatgtgtgtgttttagtacttaattgactttcgataattaaatttttgtttgattgctaaaaa

SEQ ID NO: 90053 - DNA, 3277 bp, Homo sapiens; identical to SEQ ID NO: 61087

SEQ ID NO: 90054 - DNA, 5732 bp, Homo sapiens; identical to SEQ ID NO: 61175

SEQ ID NO: 90055 - DNA, 1753 bp, Homo sapiens
  misc_feature (1)...(1753): n = a,t,c or g
ttttttttttttattttttgaacggtcacaatatgcatttattaatgaatgtatttatacacaatacaaacgtgcggggacaccgtccccttcacagcccagaacccagggtcagaagatgagggatccagcctcagaggggagatatgcgacttcccaagagcagttcttggcctgggaggggccatgagagtgcaagacacggggccgtggccggggcggggctacgggaacggggcgtggccggcccctgaggttactataggggaatgggccccggccaggtccccttttctttggggcagtgggaagacagcggggcccacggcatagagctgctacacgtagggcgtttctgccgtatttgccaaaagctgctgtcgccttcttggtccgaggtggcgacgggcatcacggacactggagcctggtagggccgccgggcgctggcggctgggtcctcgtcagagccgcagcagcaggcggagcagaggcagaggccacccaggatggagatcagtgaggcgctccaccccaggtagagggcggggcccagctcgtacttggttccggggtacaaggggtcgaagaagtcccgggtgatgttgaaggcgtaccaggagatggccaccatcccgcagataccggccagaatgtggagggcccctgcggtggccgccagcttggctttcctggagagctccaggcccccaatgttggtgcagcgcaggcccgctatgcctagcaagaggccgaggaagcccaggaggatggcggtgatcatgagtgcccggcaggcctgaatatacccagagagggccagcatggacgggaactcccagcagttgtagacgcccagggagtcggtggcacagctaaaccagaggttctcgaagatggtgttggtggtgatgacgttcccgtgcacagtggacactcgccagtagctgtttggcagagtcacccccagcatcagcagccccacagttgccatgaagaagccaaaggtttccacagccatcgacatggtgggatgcaggaccctggggggctggtgccccagagagggggaggggcagaacccctagggaactggaaggggctgcggctaaggagggttgtccaggcaggctggggtggaatcagcctcagcctctgcctgcctcttcctcgggctcaggtccgtctccactttctgcctccctcctgctctgtgggtctctctgcttcctggcaggtcagaggaatgagctaagcctgcgcgcggcagcctggagccactgacggatacagccaaggaggggcccccaagggaggcactgggaactgaggggaagcgtctgtctctgactcagctttcattgggggccaaagaacggagtaagagggacaaggagtgaaaagatgacagagacagacgtgagagcaataagggacagagacggagagagaatgaacagcagccttcagtggtgaaggacggaggaaccacgagaacaatctaagatactcagaccaaggggttggggcgtatgagtctcttaaggaagatcaagctggaatgaggggatgggagggtaggagacccacagctctgggctccatccagcctggaatggaactcggccccaccatccattcaccagggaactcagacgggagagttttagtcccctgagcttctgctctgtcagtgacaannccgnctgcttcgnnnttccnccgcnctggcctagtgtactgcaaatcgagg

SEQ ID NO: 90056 - DNA, 4375 bp, Homo sapiens
tttcgtaacgccgcgtgctcttcccaaggggaggacgcgggagaagccggggcctgagtgctccaaggccccgtgggcttcttgggtttgttgcctccggccgctcattaactcaggatggcgtggaagacctcgcccgcctccccttctgggccgcggctccgcttaagtgaaggcctgtttgggcgtccccaccctggagaggggccggggtctggattttcagaactgccactcttctagtgcgctggcgtcaatgctcccttcctcgggccattggagactccgttgctttttaatggcggcagcggctgctgggtgagcagctggaggccggacagtgttcgtcccatccggagaggatcgctttctcctggcgtcaccagcgctgggttggtgggggtagcttttccctctttgctcctccattcttgaagaaagaagaagatgccactgccatttgggttgaaactgaaacgcacccggcgctacacggtgtccagcaagagttgcctggttgcccggatccaactgcttaataacgagtttgtggagttcaccctgtccgtggagagcactggccaggaaagcctcgaggccgtggcccagaggctggagctgcgggaggtcacttacttcagcctctggtactacaacaagcaaaatcagcgccggtgggtagatttggaaaaacctttgaagaagcagctggataaatatgcattggaacctaccgtctattttggagtggtgttttatgtgccttcagtttctcagctgcagcaggagattaccaggtatcagtattatctgcaactgaagaaagatatcttggaaggaagtattccttgtaccttagaacaagcaattcagctagcaggcttagctgttcaagcggattttggtgactttgatcagtatgaatcccaggactttcttcagaaatttgccttgtttcctgtgggatggttacaagatgaaaaagtattggaagaagcaacccaaaaagtggccttactacatcagaaatacagagggctcacagctcctgatgctgaaatgctgtacatgcaggaggtagagagaatggatggctatggagaagagagctaccctgctaaggatagccaaggaagtgacatatccattggagcgtgtcttgaaggtatctttgtgaaacacaagaatggaaggcatcctgtggtatttaggtggcatgacattgccaacatgtcccacaacaagtccttttttgcattagagctggcaaataaagaggagaccattcaatttcaaactgaagacatggaaacagcaaaatacatttggagactctgtgttgcgcgacacaagttttacagactaaaccagtgtaacctgcaaactcagactgtcacagtgaacccaatcaggaggaggtcttcttcaaggatgtctctgcctaaaccccagccctacgtgatgcctcccccaccgccagttgcactataatggacattatacagaaccatatgcttcttcccaagataacctctttgtgcccaaccaggaagggatattactgtcaatttcagacaagcttgattagagcccagatggacttcaacggtcggatccgtaaatgccagtgtctacagtgcacacagcaccaactccttaaataatcctcagccctacttgcagccctcgccgatgtcgtccaaccctagcatcaccgggagtgacgtcatgaggcctgactacctcccgtcccatcggcacagcgccgtgatacccccgtcctaccgccccaccccagactatgagactgtgatgaagcagctcaacaggggcctggtgcatgcggaacggcagagccactcgctgcgaaacctcaacatcggcagctcgtacgcctacagcaggcccgcggcgctggtctacagccagcccgagatccgcgagcacgcacagctcccctcgccagcggccgcacactgcccgttcagcctgagctacagcttccacagcccgtctccctacccctaccctgccgagcggcggcccgtggtgggcgcggtcagcgtgccggagctgaccaatgcgcagctgcaggcgcaggactacccgtctcccaacatcatgcggacgcaggtgtaccggccacccccaccctacccgccccccaggcccgccaacagcacgccagacctgtcccgccacctttacatcagcagcagcaaccccgacctcatcacgcggcgcgtgcaccactcggtgcaaacgttccaggaggacagcctgcccgtggcgcactcgctgcaggaggtcagcgagcccctcaccgccgcgcgccacgcgcagctgcacaaacggaacagcatcgaggtggccgggctcagccacggcctggagggcctgcggctcaaggagcgcaccctatccgcgtcggcggcagaggtgggcgccgcgagccgtctcggtgggctcccagccccagcgttttcaccgagaggacacagcgagaagggccggaggaaggcggaagggcttaaggtacggcccataagcaagtccctgtcggacgccaccatgttaatccccagcagcgagaaggaggaggacgaggccttcgagggaggagagcggggcccgggcgccccctgcacgtgcgcgcgagcctcggcccggcctggcccaggacccacctggctgccctcgcgtcctgctcgccgggcccctgcacatcctggagcccaaggcccacgtcccagacgcggagaagaggatgatggacagcagccccgtccgcacgaccgcagaggcccagcggccctggagagacgggctgctgatgccctccatgtcggagtccgacctcaccacgtcaggccgctaccgagcccggagggactctctgaagaaaaggccggtgtcggaccttctctctgggaagaagaacatcgtggaagggctcccgcctctagggggaatgaaaaagactcgagtagatgcaaaaaaaattggtcctcttaaactggctgccctaaatggactctccctatctcgagtgcctctgcctgatgaaggaaaggaagtggctaccagagcaacgaatgatgaaaggtgtaaaattctggaacaacgattagaacaaggaatggtattcacagaatatgaaagaattcttaagaaacggctagttgatggggagtgctcaacagcacgactccctgaaaatgcagaaagaaatcgattccaagatgttcttccttatgatgatgtgagagtggagttggtcccaactaaagaaaacaacactggttacatcaacgcatcacatattaaggtctctgtcagtggaatcgaatgggattatattgccacacagggaccattacagaatacctgtcaagatttttggcagatggtatgggaacagggaattgcaattatagcaatggtgacagcagaagaggagggtggaagggagaagagctttaggtactggccacgacttggttccaggcacaacactgtcacctatggaaggtttaagatcacgacccggttccgcacagactctggctgctatgccaccacaggcctgaagatgaagcacctccttaccgggcaagagaggaccgtctggcacctccaatacacagactggcctgaacatggctggtccagaagacctcaagggatttttatcatatcttgaagagatccagtctgttcgacgccatacaaatagcacaagtgatccccaaagccccaaccctccgttgttggtccactgcagtgctggggtaggaaggactggcgtggtgattttgtcggagatcatgatcgcctgcctggaacacaatgaggtgctggacatcccgagagtgctggacatgctgagggcaacagagaatgatgctggtgcagactctctgccagtacacatttgtgtccagagtcatcatccaagtccctgaaaaagctcccaggctcatcctaagctccccacaatttccttacggggcccagtcatgtgaagcgtttacagcttaaaaaaaaagcgcttgccctaactcatactttccccgttgacacttgatccacgcaggcgtgggcactggggacgtaagttggcgcagtctgaatgggcggcacgctgaaggaaacgtgcgaagcacaggctgaagaggggtttctaacctgggaaaggtgctcaaggaggacttggtttcaagggccttgccctgccccggtctgtccggtttgcagtacttgcacacattttggagattgtattttctagacaattctctattttactgaagctatgctgggcaattctggcaatcattaaagtgcatagatttctatcttaaaaaaaaaaaaa

SEQ ID NO: 90057 - DNA, 1780 bp, Homo sapiens
gtcagtgtggtggaattcctgagttcccttagtatttattgatcatttgtgggtgtttctccgagagggggatgtgtcagggtcacaagacaatagtggggagagagtcagcagacaaacacgtgaacaaaggtctttgcatcatagacaaggtaaagaatcaagtgctgtgcttttagatatgcatacacataaacatctcaatgctttacaaagcagtattgctgcccacatgtcccacctccagccctaaggtggttttttcctatctcagtagatggaacgtacaatcaggttttataccgagacattccattgcccagggacagggaggagacagatgccttcctcttgtctcaactgcaagaggcatgccttcctcttatactaatcctcctcagcacagacccttcatgggtgtcgggctggggggcggtcaggtctttcccttcccacgaggccatatttcagactatcacatggggagaaaccttggacaatacctggttttcctaggcagaggaccctgcggccttccgcagtgtttgtgtccctgggtacttgagattagggagtggtgatgactcttaaggagcatgctgccttcaagcatctgtttaacaaagcacatcttgcacagcccttaatccatttaaccctgagtggacacagcatatgtttcagagagcacagggttggggctagggttagattaacagcatctcaaggcagaagaatttttcttagtacagaacaaaatggagtctcctatgtctacttctttctacacagacacagtaacaatgtgatctctctctcttttccccacatttcccccttttctattcgacaaaaccgccatcgtcatcatggcccattctcgatggtcgctgtctcttcggagctgttgggtacacctcccagacggggtggcagccgggcagaggcgctcctcacttcccagacggggcgggtgggcagaggtgctcctcacatcccagacgatgggcggccaggcagagatgctcctcacttcccagacggggcagctgccaggcagaggcgctcctcacttctcagatggggcggatgggcagaggcgctcctcagttcccagacggagtggcggccgggcagaggcgctcctcacttgggcagtatggccattttcacgatattgattcttcctacccatgagcatggaatgttcttccatttgtttgtaatcctcttttatttcattgagcagtggtttgtagttctccttgaagaggtccttcacatcccttgtaagttggattcctaggtattttattctctttgaagcaattgtgaatgggagttcactcatgattaggctctctgtttgtccgttattggtgtataagaatgcttgtgatttttgtacattgattttgtatcctgagactttgctgaagttgcttatcagcttaagaagcttttggctttctacacagacacagtaacaatctgatctctctttcttttccccacatttcccccttttcttttcaacaaaaccgccatcgtcatcgtggcccattctcgatggtcgctgtctcttcggagctgttgggtacacctgcacaaaggctgtcacttcacacttggaggattgcacagtggccaggcagaggcgctcctcacctcccagatggggtggcagccaggcagaggcactcctcacttccaagatggggctggctccctccttacttttggagtacccagtatctattgtttccatattcgtgtccat

SEQ ID NO: 90058 - DNA, 462 bp, Homo sapiens
  misc_feature (1)...(462): n = a,t,c or g
gtactcttgcacgaccggttcggannaccgggtcgacgatttcgtctctggagggtgcgaggttggacagcaggtgtcggtacctctggagggtgcgaggttgggcagcaggtgccggtacctctggagggtgcgaggttgggcagcaggtgccggtacctctggagggtgcgaggttgggcagcaggtgccggtacctctggagggtgcgaggttgggcagcaggtgccggtacctctggagggtgcgaggttgggcagcaggtgccggtacctctggagggtgcgaggttggacagccgttgtggaactgtggtgggggtcggggaggcagctcactgagcgcgtctcgtcttacgcagccgcgggtcagagcaggggtctgtgttcacgcaggaaaggaggggcttgccgtgcaaccagagcttctagctttgaaccataggtgaaggcgatgaacaga

SEQ ID NO: 90059 - DNA, 2427 bp, Homo sapiens
tttcgtagcagcccgcgcccgggcaggaatagaagatgaacaaacccataacaccatcaacatatgtgcgctgcctcaatgttggactaattaggaagctgtcagattttattgatcctcaagaaggatggaagaagttagctgtagctattaaaaaaccatctggtgatgatagatacaatcagtttcacataagatgctgttcccaaaactgctaatacactaccttctaaagaagctataacagttcagcaaaaacagatgcctttctgtgacaaagacaggacattgatgacacctgtgcagaatcttgaacaaagctatatgccacctgactcctcaagtccagaaaataaaagtttagaagttagtgatacacgttttcacagtttttcattttatgaattgaagaatgtcacaaataactttgatgaacgacccatttctgttggtggtaataaaatgggagagggaggatttggagttgtatataaaggctacgtaaataacacaactgtggcagtgaagaagcttgcagcaatggttgacattactactgaagaactgaaacagcagtttgatcaagaaataaaagtaatggcaaagtgtcaacatgaaaacttagtagaactacttggtttctcaagtgatggagatgacctctgcttagtatatgtttacatgcctaatggttcattgctagacagactctcttgcttggatggtactccaccactttcttggcacatgagatgcaagattgctcagggtgcagctaatggcatcaattttctacatgaaaatcatcatattcatagagatattaaaagtgcaaatatcttactggatgaagcttttactgctaaaatatctgactttggccttgcacgggcttctgagaagtttgcccagacagtcatgactagcagaattgtgggaacaacagcttatatggcaccagaagctttgcgtggagaaataacacccaaatctgatatttacagctttggtgtggttttactagaaataataactggacttccagctgtggatgaacaccgtgaacctcagttattgctagatattaaagaagaaattgaagatgaagaaaagacaattgaagattatattgataaaaagatgaatgatgctgattccacttcagttgaagctatgtactctgttgctagtcaatgtctgcatgaaaagaaaaataagagaccagacattaagaaggttcaacagctgctgcaagagatgacagcttcttaaaactttattggaaaagactcttgactttttatatacacctatctcaaccatttttttaactgatttttttcctaaatattcttctttacctttaacaaggcataggctgttgcaggacagtggttattaaagcatgggttgaacttccaaaatataaaaatagagccaccatatcaacacttagccctacccattagtatcacccccagttcttacagtaatccctgagaaatctccttcaagcatcaccaaacacagtttgaaaattacagggttagcaaaaagagcctgggctgtatgtagggtggaaacactctgatctgaagcccagctgactccactactaatttgctgtaaagctttggacatacacttagctgctgtgagccactaataacattgggctaatatctgctgtgcttctctgacaggtagtcatgaaaatcaaatgatgcaaaatatatacaagcactttgtaaattgtaaaatgatacaaaatttaaagtttatagagccagttacaaaatcctattagtcatatatttatagattgtgttcacagcaatcatttaaccacaaataaaatatcccttgatgatactgccataatgatatgtccattattagattatgttacatgacaaagttgaaggaatttggcagatgcagttaaggttcctaaacaactcactttgagactgttgaaagggcctgacctaatcaagtgaacccttgcaagaagaattctccttgtaagccttgaagaagtatgtgagagggccacattggctaaaacctaaaggtggcctctaggagatgagacctaccttccagttgtcagcaagcaggaaaaaaaaattgggacctcagttgcaaccacaaggaactgaattctgccaaaaatctgagtcagcttagaagagtactccaagcttcagatgataaccacagcctgggctgacacctggatttcagctttgcatgatcctcagtatgagaatctatctgttctgtgctggacttctaatatatagaactgtgagataatgggtcacattggctggatgtggtggctcatacctgtaaatcccaaagtgccagtatttaaagtttaatgtctttccagctggttttcagactgccaggatcctgttg

SEQ ID NO: 90060 - DNA, 4487 bp, Homo sapiens
cctcggaaatcccgggtcgacgatttcgtcggccggcggcgggagatcgcgggcgagcggagcgcaacactcgcttggttggggagatcggcgcttggccggatgagcacaagcctgggagatggcagtgatggaaatggcctgcccaggtgcccctggctcagcagtggggcagcagaaggaactccccaaagccaaggagaagacgccgccactggggaagaaacagagctccgtctacaagcttgaggccgtggagaagagccctgtgttctgcggaaagtgggagatcctgaatgacgtgattaccaagggcacagccaaggaaggctccgaggcagggccagctgccatctctatcatcgcccaggctgagtgtgagaatagccaagagttcagccccaccttttcagaacgcattttcatcgctgggtccaaacagtacagccagtccgagagtcttgatcagatccccaacaatgtggcccatgctacagagggcaaaatggcccgtgtgtgttggaagggaaagcgtcgcagcaaagcccggaagaaacggaagaagaagagctcaaagtccctggctcatgcaggagtggccttggccaaacccctccccaggacccctgagcaggagagctgcaccatcccagtgcaggaggatgagtctccactcggcgccccatatgttagaaacaccccgcagttcaccaagcctctgaaggaaccaggccttgggcaactctgttttaagcagcttggcgagggcctacggccggctctgcctcgatcagaactccacaaactgatcagccccttgcaatgtctgaaccacgtgtggaaactgcaccacccccaggacggaggccccctgcccctgcccacgcaccccttcccctatagcagactgcctcatcccttcccattccaccctctccagccctggaaacctcaccctctggagtccttcctgggcaaactggcctgtgtagacagccagaaacccttgcctgacccacacctgagcaaactggcctgtgtagacagtccaaagcccctgcctggcccacacctggagcccagctgcctgtctcgtggtgcccatgagaagttttctgtggaggaatacctagtgcatgctctgcaaggcagcgtgagctcaagccaggcccacagcctgaccagcctggccaagacctgggcagcacggggctccagatcccgggagcccagccccaaaactgaggacaacgaggggtgtcctgctcactgagaaactcaagccagtgggattatgagtaccgagaaagaagtccacttgggccacgcaccagctccgcctgggcagaggctccttcggagaggtgcacaggatggaggacaagcagactggcttccagtgcgctgtcaaaaaggtgcggctggaagtatttcgggcagaggagctgatggcatgtgcaggattgacctcacccagaattgtccctttgtatggagctgtgagagaagggccttgggtcaacatcttcatggagctgctggaaggtggctccctgggccagctggtcaaggagcagggctgtctcccagaggaccgggccctgtactacctgggccaggccctggagggtctggaatacctccactcacgaaggattctgcatggggacgtcaaagctgacaacgtgctcctgtccagcgatgggagccacgcagccctctgtgactttggccatgctgtgtgtcttcaacctgatggcctgggaaagtccttgctcacaggggactacatccctggcacagagacccacatggctccggaggtggtgctgggcaggagctgcgacgccaaggtggatgtctggagcagctgctgtatgatgctgcacatgctcaacggctgccacccctggactcagttcttccgagggccgctctgcctcaagattgccagcgagcctccgcctgtgagggagatcccaccctcctgcgcccctctcacagcccaggccatccaagaggggctgaggaaagagcccatccaccgcgtgtctgcagcggagctgggagggaaggtgaaccgggcactacagcaagtgggaggtctgaagagcccttggaggggagaatataaagaaccaagacatccaccgccaaatcaagccaattaccaccagaccctccatgcccagccgagagagctttcgccaagggccccagggccccggccagctgaggagacaacaggcagagcccctaagctccagcctcctctcccaccagagcccccagagccaaacaagtctcctcccttgactttgagcaaggaggagtctgggatgtgggaacccttacctctgtcctccctggagccagcccctgccagaaaccccagctcaccagagcggaaagcaaccgtcccggagcaggaactgcagcagctggaaatagaattattcctcaacagcctgtcccagccattttctctggaggagcaggagcaaattctctcgtgcctcagcatcgacagcctctccctgtcggatgacagtgagaagaacccatcaaaggcctctcaaagctcgcgggacaccctgagctcaggcgtacactcctggagcagccaggccgaggctcgaagctccagctggaacatggtgctggcccgggggcggcccaccgacaccccaagctatttcaatggtgtgaaagtccaaatacagtctcttaatggtgaacacctgcacatccgggagttccaccgggtcaaagtgggagacatcgccactggcatcagcagccagatcccagctgcagccttcagcttggtcaccaaagacgggcagcctgttcgctacgacatggaggtgccagactcgggcatcgacctgcagtgcacactggcccctgatggcagcttcgcctggagctggagggtcaagcatggccagctggagaacaggccctaaccctgccctccaccgccggctccacactgccggaagcagccttcctgctcggtgcacgatgctgccctgaaacacaggctcagccgttcccagggatctgccagcccccggctcagcagtgggaccagggcctcgcagcagcaaggtgggggcaagcagaatgcctcccaggatttcacacctgagccctgccccaccctgctgagaaaacactccgccacgtgaagagacagaggaggatggcaggagttacctcgggaaacaaacaggatcttctctgccctgctccagtcgagttggcctgacccgcttggatcagtgaccatttgctggcagacaggggagagcagcttccagcctgggtcagaaggggtgggcgagcccctcggcccctcaccctccaggctgctgtgagagtgtcaagtgtgtaagggcccaaactcaggttcagtgcagaaccaggtcagcaggtatgcccgcccgtaggttaagggggccctctaaaccccttgcctggcctcacctggccagctcaccccttttgggtgtaggggaaaagaatgcctgaccctgggaaggctccctggtagaatacaccacacttttcaggttgttgcaacacaggtcctgagttgacctctggttcagccaaggaccaaagaaggtgtgtaagtgaagtggttctcagtccccagacatgtgcccctttgctgctggctaccactcttccccagagcagcaggccccgagccccttcaggcccagcactgccccagactcgctggcactcagttccctcatctgtaaaggtgaagggtgatgcaggatatgcctgacaggaacagtctgtggatggacatgatcagtgctaaggaaagcagcagagagagacgctccggcgccccagccccactatcagtgtccagcgtgctggttccccagagcacagctcagcatcacactgacactcaccctgccctgcccctggccagagggtactgccgacggcactttgcactctgatgacctcaaagcactttcatggctgccctctggcagggcagggcagggcagtgacactgtaggagcatagcaagccaggagatggggtgaagggacacagtcttgagctgtccacatgcatgtgactcctcaaacctcttccagatttctctaagaatagcacccccttccccattgccccagcttagcctcttctcccaggggagctactcaggactcacgtagcattaaatcagctgtgaatcgtcagggggtgtctgctagcctcaacctcctggggcaggggacgccgagactccgtgggagaagctcattcccacatcttgccaagacagcctttgtccagctgtccacattgagtcagactgctcccggggagagagccccggcccccagcacataaagaactgcagccttggtactgcagagtctgggttgtagagaactctttgtaagcaataaagtttggggtgatgacaaatgttaaaaaaaaaa

SEQ ID NO: 90061 - DNA, 419 bp, Homo sapiens
tttcgtgcgtggagatatggcgcaactgcggcgtttttacttgacattcagggacgaggccataggattctcttttgaggagtggaaatgcctggaccctgtgcagaaggctttatacagggatgtgatgtcggagaactacaggaacctggtctccctgagaatctgtcttcctgacctgagtattatctccatgatcgaagcaaaggacagacccctggactgtggagaatgaaatgacagtaacaaaacatccagataggtgggacgcggtctaacatatctacacagggaggagctgcgccttgagaacctgagccggaatcaagcctattaccaatgaacttggattagcctttcagatacctatgccagaactggagatatttcaaggcgaagggaagatttatgaatgtact

SEQ ID NO: 90062 - DNA, 2129 bp, Homo sapiens
ttttttttttttatttctgaaatgtttcttttaatcaatacatattaagtatataatttccttaaaaattaacaaataactctgattttcactgttaggacactgttacagagaaggaaacatattgctcttctaacttttcttctttttacatttatccacattccaagtagattatcatagtaaggttcttctgtgttacttttgtccaagttgtgacaactgttttatgaactgtgtagcattaaaaagctcactgcagccatataaaatgtgtttgccttgtttcccctttatgtagtcaacaagattctgatattcaatgtagttgcctcctcccaccacaaaaacaatggcctcttggaatggatttttatttctgggaactgagctgtcattgccccgcagcattttgggatcaaaatatctatagtcatcagtttcggggtttgacttcatctccataagattgtccaaaatacgagtaacaggtagattttgctgtttcaaaaccaggttcttcactccttccatcacaaactgtgatcctgtattcatgactcgtgataaaagacccattggtttagtggtagtgctgccatagctggccggagctgaggccatcttggtaaaagccttccactgtttgatatattgtaaaggattaaggttgcatcctgcatcagttaaagcttttttatattgctccaaatcagcctcagaaggtgcttgctgtgtgcttatataatagataagaaacaacctcattttatcttctggagttcctgcatcagggtctgatattatatctagaagagatttatccagagtagttttgctcattattttttcttcatattcaaaatatacatccaattttcttgcctttatatgttctaaaacagcagtggcaacatttgtatggagatcaataagtctttttttctcaaggagttctgagcaaagaactaacagctgatgttagcttagcggtattgtcagaaagcatacttatggctccttcatcttccccttctagtcccataatgcttttaagtcgtttgacctcatcttcctgtgctctgtaagattctagttcttgctgaactgattctgcaacttctgggaatggacttcctttatgtttttgccaaaatttatcaaccggagttaaatcataagacttcttgttttttctctttggtctagcaccagctggagagttttccactcctgaagattcttccaaattaaccctgtttaaatggaaatccagtacatcgtgcaccaatgcttgatatgtccaagtatgatgtaaaggagttgccaaatctatgtttctgtcaacaaggactaataagggcctctggaagctgaattggccagctccaagtgtatcacctgtaaaaagactgtttcttgcatctcttagattttctcgaagtttcttgtctagtttcactgctaccatttctgctgctgttcctcttgaacatctgattataggaacagcacccagagtaacaaaaaagcagaagaggctgtcaactatagtgtccataacagtttccatttccgtgtctgtgatatctggcctgttaatggcacgatatgaaacaagctccttattttgattacataatacaaacatatcatcttccaaagtaataaaattgagatattggtccccaaaccttggctacttgtgttactgcactagctgctaacgctgcatttgcaatatcttccagtttacttcttgaaatagcagaaataaaatttaaataatatgattcatatagttgatttcgaagatcctggcacattctgtcaatattttcttcaggtggcattacaaagtatactgcaggaacatctggaataggatctcgatcagagtgtaaaagcagatgcagagtgattcccatgtctcttagctcccttacagatagcagaggagagaatatatcttggccaaatctgtgcataagtgagtaccttccatatgggtgctcctgtgctgtttttaatatgaggcacattgaaagacaataaacgcatgagagcaactggctgtctttcctgaatgaaggctgactgctgctgctgtcctgccgccgccatcttgg

SEQ ID NO: 90063 - DNA, 3584 bp, Homo sapiens; identical to SEQ ID NO: 61358

SEQ ID NO: 90064 - DNA, 3586 bp, Homo sapiens; identical to SEQ ID NO: 80212

SEQ ID NO: 90065 - DNA, 4099 bp, Homo sapiens
gcggccgcccgggcccgggcccgcgtcgggcgcctggctctgtacgcgagcccggggatctgcggccttcgtgccccccctcccccgcccgccctctcgtggagcccggcgccggcggcggctgcccgggcggggggttgcggcgctcaggagaggccccggctccgccccgggcctgcccagggggagagcggagcggtccgcagccgggtcgggtcggggcccctcccgggaggagcgtggagcggcggcggcggcggcggcagcagaaatgatggaagaattgcatagcctggacccacgacggcaggaattattggaggccaggtttactggagtaggtgttagtaagggaccacttaatagtgagtcttccaaccagagcttgtgcagcgtcggatccttgagtgataaagaagtagagactcccgagaaaaagcagaatgaccagcgaaatcggaaaagaaaagctgaaccatatgaaactagccaagggaaaggcactcctaggggacataaaattagtgattactttgagtttgctgggggaagcgggccgggaaccagccctggcagaagtgttccaccagttgcacgatcctcactgcaacattctttatccaatcccttaccgcgacgagtagaacagcccctctatggtttagatggcagtgctgcaaaggaggcaacggaggagcagtctgctctgccaaccctcatgtcagtgatgctagcaaaacctcggcttgacacagagcagctggcgcaaaggggagctggcctctgcttcacttttgtttcagctcagcaaaacagtccctcatctacgggatctggcaacacagagcattcctgcagctcccaaaaacagatctccatccagcacagacagacctcagtccgacctcacaatagaaaaaatatctgcactagaaaacagtaagaattctgacctagagaagagggagggaagaatagattgatttattaagagccaactgtgatttgagacggcagatttgatgaacagcaaaagatgctagagaaatacaaaggaacggttaaatagatgttttgacaatgagccaagaaacttccttatagaaaagtcaaaacaagagaagatggcgtgtagagataagagcatgcaagaccgcttgagactgggccactttactactgtccgacacggagcctcatttactgaacagtggacagatggttatgcttttcagaatcttatcaagcaacaggaaaggataaattcacagagggaagagatagaaagacaacggaaaatgttagcaaagcggaaacctcctgccatgggtcaggcccctcctgcaaccaatgagcagaaacagcggaaaagcaagaccaatggagctgaaaatgaaacgttaacgttagcagaataccatgaacaagaagaaatcttcaaactcagattaggtcatcttaaaaaggaggaagcagagatccaggcagagctggagagactagaaagggttagaaatctacatatcagggaactaaaaaggatacataatgaagataattcacaatttaaagatcatccaacgctaaatgacagatatttgttgttacatcttttgggtagaggaggtttcagtgaagtttacaaggcatttgatctaacagagcaaagatacgtagctgtgaaaattcaccagttaaataaaaactggagagatgagaaaaaggagaattaccacaagcatgcatgtagggaataccggattcataaagagctggatcatcccagaatagttaagctgtatgattacttttcactggatactgactcgttttgtacagtattagaatactgtgagggaaatgatctggacttctacctgaaacagcacaaattaatgtcggagaaagaggcccggtccattatcatgcagattgtgaatgctttaaagtacttaaatgaaataaaacctcccatcatacactatgacctcaaaccaggtaatattcttttagtaaatggtacagcgtgtggagagataaaaattacagattttggtctttcgaagatcatggatgatgatagctacaattcagtggatggcatggagctaacatcacaaggtgctggtacttattggtatttaccaccggagtgttttgtggttgggaaagaaccaccaaagatctcaaataaagttgatgtgtggtcggtgggtgtgatcttctatcagtgtctttatggaaggaagccttttggccataaccagtctcagcaagacatcctacaagagaatacgattcttaaagctactgaagtgcagttcccgccaaagccagtagtaacacctgaagcaaaggcgtttattcgacgatgcttggcctaccgaaaggaggaccgcattgatgtccagcagctggcctgtgatccctacttgttgcctcacatccgaaagtcagtctctacaagtagccctgctggagctgctattgcatcaacctctggggcgtccaataacagttcttctaattgagactgactccaaggccacaaactgttcaacacacacaaagtggacaaatggcgttcagcagcgggtttggaacatagcgaatccgaatggatctgatgaaacctgtaccaggtgcttttattttcttgcttttttcccatccatagagcatgacagcatcgattctcattgaggagaaaccttgggcagctccggccaggccttgtaggaaaaggccccgcccgaggttccagcgtcaacggccactgtgtgtggctgctctgagtgaggaaaaaattaaaaagaaaaactggttccatgtactgtgaacttgaaaacttgcagactcaggggggtccctgatgcagtgcttcagatgaagaatgtggacttgaaaatacagactgggctagtccagtgtctatatttaaacttgttcttttcttttaataaagtttaggtaacatctcctgaaaagcttgtagcacaaaggctcagctggggatggtgtttgacttcggaggaaaaaagttgctattgcccgttaaaggcactagagttagtgttttatccctaaataatttcaatttttaaaaacatgcagcttccctctccccttttttatttttgaaagaatacatttggtcataaagtgaaacccgtattagcaagtacgtggcaatgttcattccaatcagatgcagctttctcctccgtctggtctcctgtttgcaattgcttccctcatctcagtagggaaaaaaattgagtgggagtactgagatgtgtgggtttttgccattggacaaagaatgaggttagaagactgcagcttggagtctctctaggttttcaactatttcttcacaatttgaacacttgacggttgtcccttttaatttatttgaagtgctatttttttaaataaaggttcatctgtccatgcagtcctcttggattctctgaatgtagtaactatgaagctatgccaaaggtaggcagaaaatgggcttgggagccagacactccagggatcagtagttcctacccatagtctttgtgtgcttgctaaatggtgtacatttcttgttaaccacgttattaaaacttgatcagcacataagctttcttctgttagatcttttggcagcaaacaaccttccccccaaacctctgaattttgtgggtgtgtggtggtgtgtgtctgtgtgtgcatgtacacacacactttgtctagctcactttaaaagattcatcaaatggaattttaaaaataatctgaaaagaaatagatatttcaggccgggcctggtggttcatgcctgtaatcccagcactttgggaggccgaggtgggtggatcacgaggtcgggagttcgagatcagtctggtcaacatggtgaaacgccatctctactaaaaatataaaaattagcctggcgtggtggcgtgtgcctctagtcccagctacccgggaggctgaggcaggagaatttctggaacccaggaggcggaggttgcagtgagccgagatggcaccactgcaatccagcctaggcaacagaatgagactctgtctcagaaaaaaa

SEQ ID NO: 90066 - DNA, 1731 bp, Homo sapiens
  misc_feature (1)...(1731): n = a,t,c or g
ttttttttttttgctagctatcataactttattaaacaagaaaagccctgacgcgtaaataaaaaacacctgagttctgatgaccccgccccgcccagtcccgcccgccgaggtccgtgtccaagtcccgngtttttcaggagctatgtttctgccgcttccaaaagcgcttgacgtcgctgtgcccggccggggtcaccaccatgagccgcttggccggagtttctcgaacacgagcacgcccagcttcggggcgtgggccagcaagcagctcaaagtccacttgcgacaggaactggttatacaggacaccctcagtgaaccggagtctgtccctttccagctcccagagccggatctggtcggtgatggtggggggcagcacaggtgtctgtttgagcatcactgggtgggctcttgtccttaggaaatggattatctgctgggctgtgatgccactggcgattgcctgctgcacactctccccgggtcaccctcgccaaccaccatgttgggggaacggataaagcatctcagagaagagggcaatgagggcaatctgcagctccgactccgtgtaggcatacagtcggtaattggtttccacggacaatgaaacctggctgatgcacagtgcccccagctccagagacacctgatgagagattgatggccaaggcggtgtggggtagtaacgccgagatttcctcttcctctggaaaacaagcccaaactcacgcagatgttgcaggaagttcaacagagaatcactcataccttccacagagtaatccttgcccagagtagagaagctgagctggaagaggaaggagagaatctctaccaggtccatgccccggctctgggctgtctgcaaatactgcaacataaagtaccagagctgagccggggtgtccagcaacaggaactggaagccagcggaagtaatgcagggcggctctccaggttcagtactcttcatgagcccagcctggctgaggagctgagccaagtcctggctgacagctgcactgggggagcccaccatgaagtgcaagaccacctcccatcgctcctcggcgtacttgtcaagggagggaacgtcccgggcatgcttgtctggtcccagctgacttgtgtcatcagaccaggccttccccccacccagaagggcaatgcggaggttctggcggaaaatggggttgaggatgaggccctggagcccgcctgggagcagctgtgtgtgccagatccggaggccgctcagcagccctgtactttcctcctgagccttgctgaattccttctttacccacagagctacagcagcctgtggcaaaggctgctccagaaagagcatccgcatcacccagttcttagccaaggatgggagctccctgaagacagccagacatgtggcagggtgcccatacaatcggtccaataccccagggctcaggccccctaagaattcctgcagattcctgcattgtaggtgtactcggttcagtccccttgaaggggtgctctccatcaccactctgtcgatcctcctcgcgcaccccaagtctcgggccgtcgcttaatcggagccaaagtctcgcattggctcctggagattgagggaaagatggtgaaaaaatgcgaggaaaagatggggaaagcaaagaaagatttcacaggcaagagcccagaatggagaattcagaagagaagggaggtaaggggagg

SEQ ID NO: 90067 - DNA, 4082 bp, Homo sapiens; identical to SEQ ID NO: 60657

SEQ ID NO: 90068 - DNA, 1817 bp, Homo sapiens
  misc_feature (1)...(1817): n = a,t,c or g
agtgtatcatgaccacataataatttacttatgaattttcttaggtaagaaacggttggactggatgcaatttttatcacagcttgtgtaagactgcctctgtccctcctctcacatgccattggttaaccagcagacactgtgctcaggggcgttgccagctcattgctcttatagcctgtgagggaggaagaaagaaacatttgccagccaggctagtgacagaaatggattcgaaatatcagtgtgtgaagctgaatgatggtcacttcatgcctgtcctgggatttggcacctatgcgcctgcagaggttcctaaaagtaaagctttagaggccaccaaattggcaattgaagctggcttccgccatattgattctgctcatttatacaataatgaggagcaggttggactggccatccgaagcaagattgcagatggcagtgtgaagagagaagacatattctacacttcaaagctttggtgcaattcccatcgaccagagttggtccgaccagccttggaaaggtcactgaaaaatcttcaattggattatgttgacctctaccttattcattttccagtgtctgtaaagccaggtgaggaagtgatcccaaaagatgaaaatggaaaaatactatttgacacagtggatctctgtgccacgtgggaggccgtggagaagtgtaaagatgcaggattggccaagtccatcggggtgtccaacttcaaccgcaggcagctggagatgatcctcaacaagccagggctcaagtacaagcctgtctgcaaccaggtggaatgtcatccttacttcaaccagagaaaactgctggatttctgcaagtcaaaagacattgttctggttgcctatagtgctctgggatcccaccgagaagaaccatgggtggacccgaactccccggtgctcttggaggacccagtcctttgtgccttggcaaaaaaagcacaagcgaaccccagccctgattgccctgcgctaccagctacagcgtggggttgtggtcctggccaagagctacaatgagcagcgcatcagacagaacgtgcaggtgtttgaattccagttgacttcagaggagatgaaagccatagatggcctaaacagaaatgtgcgatatttgacccttgatatttttgctggcccccctaattatccattttctgatgaatattaacatggagggcattgcatgaggtctaccaaaaggccctgcgtgtggatggtgacacagaggatggctctatgctggtgactggacacatcgcctctggttaaatctctcctgcttggtgatttcagcaagctacagcaaagcccattggccagaaaggaaagacaataattttgttttttcattttgaaaaaattaaatgctctctcctaaagattcttcacctactttcgtctccataacttctatgttttctttccttctgacacactagtgcccctaaattgtgatttgcctatacgtttagggccggggttggaagatgttaacaaccatttaagattcatttctgcagtgggagtgggtggagtttcaccctctgggaaaggggcaggtgacaggtatttatcagtcagtgcctctctagctcttgtaggaagaagcacacgcaggatggagtctagaggatgagcgatattgactagcaattcatggggctcccctccagcagtgcgagggtcagagtttctgggagccttggggagggaggcatccctgttgagggggnggttaggggagatggggagggcaccagggnaaagtgatttaggagtcaggta

SEQ ID NO: 90069 - DNA, 894 bp, Homo sapiens
tttttatgtttcatgaatttaattctattaaggtaaggcttactacgttcaaaactccaaccccctcccttttttcttgccctttaacaaggcaccatccggttttctttactaacaaaatgtcagtgttcaagttcagtcttggtgcaagatcgatggcagatgtcaggggctggccgggatggcttacattgatatcatcatacgtaggtccttctcatagatgtcagggatgttacctaccggcgagttgatcatgcgcacggtgttgttattaaacagcttgaattcgtaattgatgagctgttcccaaaagccgttgttgggccggatgatggggcggcgcgactttgggcccatgtatgggcgtccagcagccgacatggagtggtatttcatgaggtacgcaaggcacagtgaggcggaacggctcattcccagccatgcagttcagcagcgtacggccctgcctcatactgacggtgtggataagatcagcaatggggtcaaaaaagtcgtagagacgcgagtcacgagcatcggtaacaggcacctttatgtactgaatgccctcgaagaatacgttgaccacttcccaccgaggcattgacaatggcggtgatgcgattgctggacagaaggagtttgtcgttggcggccacaccattgctgagaaacaagcttctggttatttgggagaagctgtagatggagggctgctggacaccctgagatgatgaaaaggaggacgcggatgctgtcatcaaggcggctggtccgaggtctctctacgctggttcgggacacaacacttaccaagctagttcaggatagcagccgcgccgccaagtctcaggctaggtgttggagaaagaggaccagctatcggccacc

SEQ ID NO: 90070 - DNA, 735 bp, Homo sapiens
gtctctctttcaaattttggtagcacttaatatctgaaacatgaaatttagcactttattatattttgtttgaagaagcccctttctaatgtgtaaaatccttattttaaatatttaaatatattttataggaatactggaaaacagtatggaatcggagagttgaggtatctgatgctatttgattttatatggttgctaagtggtcatttagcaaaaaaccagcaacagtgtctaccttattctttcctgtggtagggatacaatgtgatgaaccattgccacttgcttcccaggtctcatttgtgacctcatgtgtgagatacctggcctgggttaagtctctattgcgtgggcatggaaatttctgccaagcgtaggagtttttcatgtgttctggaaaggaataagtgagatccaatagtaattacagataacgtttctgaagttaaaagacctggttctaaaccaatctatgtatgccacactaatcttggaaatatgatgtagcctatttaaaggtcattttattcatctggcaaatgaagataaaaatagtgcttacttgatcgtgtttttgtacaattcaagtgagctaacacgcataaaggacctaatatagtagtgcctggtacagaagtaaacacttaggttaatcttaaatggccctttccatggttttaaaaggtaaaaactactggcccttttttaacccccccctcaaaaaagggaaag

SEQ ID NO: 90071 - DNA, 453 bp, Homo sapiens
ctgcagtagctcagaattcggcacgaggttaaatgcccaggcatgccacagtaccaagcgttaccagtaccagctcacattcctttccttatttggaaagaggactaactttctagctcattacagacaccccttccccttcctctccactttcttttacatgcccaccctatctaaaaaaaaatcaaatgttcagtcaactgggattagtttatattgtatgaccccggccagtggggaaagggtacaggggccggacttgcatcaggaataaaggcggtagagcccctttgttcacgtgtgctctcatggcaactggccaaggaggtacccctctgcgcagaagtacaattgctttgctaagaatcctttgtttgagtgttcagtttccttaggattttgagcgttattcctaacatgctcacagataaaccccaagtgcccagaataatg

SEQ ID NO: 90072 - DNA, 1817 bp, Homo sapiens
ttttttttttttactggggcttctgcaatttcaaatcagcactttgcagggagacaacggggtttttgaatagtatcacctggtatgaaaagttttcccaagaaaccacaaacgattgttcattttttctccttttttgttaactttttgccacactcaagtcagtttaagtcctagcaaaaagacggtagttaggataccactgtggctgtagatgatgtgacactggttgaatttgtgctggcgtttgtgtaaacttccctcgctgtttgtgtttgattccgttagggggcaccctggcttgaattggctcgaaggattgctcctgctggcactgcaatgtggcccgcggccctgggttctggtgtgtaggtaaaggtaaggctggtggaataaatgattccatcatttcggaccaaagttactggaacctggactggttgccggacccatctccaaccttctcggaatgcagaaatgtctgggacgacacagagcatactctctccacacctgtacatagtttcagcttctacatccccaaaccacactcgtaaatttggagtgaaattctgtcctgtaagttcaagcattgctacgtccccaccgccattcaactgaaggctctctaccacaggcacaggagtgactggggcaaggacagggcccattccctcataaaatgtatactctgccttatctgtgctaatgattgtccaggaagcgccatcatttatcatctctctcactaggtgctattggacatggagtggcctgaaattgaattattctttcttgagaaaggcacaaatacattctttctgtatccttaaggtaaaatgcacatttatggagttgtgacacaggatcatctgcatccaataatgcggtctgcttatcaactttcataattatcaatcttgggagtgccatgccagtaactgagcacacaagtttgcatgtttgtccataatggatgtagacatctcggactgtgaattcttctccttctgattcatcatcatccaagagatgaataaaaaaggctccccactgctgtgaactggcatgaaaattacctccttctacatgcaagtatctggtactaactgtctgggatcgtagtcgattaaacagagccacctttgttcctgaggcaatgcataagtcagcatttttcaatgactgcttctttttggaaggtttggagatgacttttatccgcttgctgaggaacacaccaatgtcatcactgttgccatagaacatctttacagacaacatgaagtgctttcgcttgtctgagtcagatatatacaatgttttggctgtgcaatagttctttccttccaagtttagctgctgcatttcttggtcactatttcctatcccaataaatgcacacggttgagactcttgttcagaacaaccatcgcgttccatttgttctttttttttcttccatccgctgcccataagatatacacaaggaggtgggcaaaaaaaccttttttcatttccatatgacttctgtgcaacttttgcatgaagaataagtactgtttgatcccctcgctcttttaaataatttcgcatagcttccctagtaagtcgtttaggtggaggccgctcaccaaatttcccaggcgatggagcatgcgcaggcggctcctccgcgggcgagccctccgtgtggtccatggggagcgctccggttatccgggttttaggacgcgctttgagggacgtacgtggagactgcagccccccatctttcccctcctttgctctttcctttcctagagattcccacgaaa

SEQ ID NO: 90073 - DNA, 2053 bp, Homo sapiens
tctctttcaaggtttctgctgggtttctgaactgctgggtttctgcttgctcctctggagatgcagcgtctgttgactccagtgaagcgcattctgcaactgacaagagcggtgcaggaaacctccctcacacctgctcgcctgctcccagtagcccaccaaaggttttctacagcctctgctgtccccctggccaaaacagatacttggccaaaggacgtgggcatcctggccctggaggtctacttcccagcccaatatgtggaccaaactgacctggagaagtataacaatgtggaagcaggaaagtatacagtgggcttgggccagacccgtatgggcttctgctcagtccaagaggacatcaactccctgtgcctgacggtggtgcaacggctgatggagcgcatacagctcccatgggactctgtgggcaggctggaagtaggcactgagaccatcattgacaagtccaaagctgtcaaaacagtgctcatggaactcttccaggattcaggcaatactgatattgagggcatagataccaccaatgcctgctacggtggtactgcctccctcttcaatgctgccaactggatggagtccagttcctgggatggtcgttatgccatggtggtctgtggagacattgccgtctatcccagtggtaatgctcgtcccacaggtggggccggagctgtggctatgctgattgggcccaaggcccctctggccctggagcgagggctgaggggaacccatatggagaatgtgtatgacttctacaaaccaaatttggcctcggagtacccaatagtggatgggaagctttccatccagtgctacttgcgggccttggatcgatgttacacatcataccgtaaaaaaatccagaatcagtggaagcaagctggcagcgatcgacccttcacccttgacgatttacagtacatgatctttcatacacccttttgcaagatggtccagaagtctctggctcgcctgatgttcaatgacttcctgtcagccagcagtgacacacaaaccagcttatataaggggctggaggctttcggggggctaaagctggaagacacctacaccaacaaggacctggataaagcacttctaaaggcctctcaggacatgttcgacaagaaaaccaaggcttccctttacctctccactcacaatgggaacatgtacacctcatccctgtacgggtgcctggcctcgcttctgtcccaccactctgcccaagaactggctggctccaggattggtgccttctcttatggctctggtttagcagcaagtttcttttcatttcgagtatcccaggatgctgctccaggctctcccctgggacaagttggtgtccagcacatcagacctgccaaaacgcctagcctcccgaaagtgtgtgtctcctgaggagttcacagaaataatgaaccaaagagagcaattctaccataaggtgaatttctccccacctggtgacacaaacagccttttcccaggtacttggtacctggagcgagtggacgagcagcatcgccgaaagtatgcccggcgtcccgtctaaaggtgttctgcagatccatggaaagcttcctgggaaacgtatgctagcagagcttctccccgtgaatcatatttttaagatcccactcttagctggtaaatgaatttgaatcgacatagtagccccataagcatcagccctgtagagtgaggagccatctctagcgggcccttcattcctctccatgctgcaatcactgtcctgggcttatggtgcctatggactaggggtcctttgtgaaagagcaagatggagcaatggagagaagacctcttcctgaatcactggactccagaaatgtgcatgcagatcagctgttgccttcaagatccagataaactttcctgtcatgtgttagaactttattattattaatattgttaaacttctgtgctgttcctgtgaatctccaaattttgtaccttgttctaagctaatatatagcaattaaaaagagagaaagag

SEQ ID NO: 90074 - DNA, 4093 bp, Homo sapiens; identical to SEQ ID NO: 60807

SEQ ID NO: 90075 - DNA, 959 bp, Homo sapiens
  misc_feature (1)...(959): n = a,t,c or g
gttcgccctccctgacagggagttgtaaataccaggtacttntgagagctttctaacttaacgtgattttttccatcaataaaatgtccatctctgttttaaaacatgattttaattaaaaaattcactctttaataaacaaggcgtttgacaccctccaaagaagtctgcctgaaggccctgccgtctcttaattgttattatgtaacatcctttaaagggctaaagtatgaaggtcaagcgggaactgaagcagcagtcaagtcttgtgatgccgggaggaagcgtccagtgaatctctagtctctcattttccaaagtggcagcgagaggagggcggctctgggcgttaaggtgttggccagtttaaaaccgctctgtgctcccagggagcttctgttcctaaggcttcccaagccaaggcaggaggaaacggcagggctttgagagctgagcagcggtgaggtgggaaaagaccgagggcaggggtttggaaataccgcatcctgtgctacacacaaagaaaatgctcactttgggatggggcactagcagtgtcggcgggtgccaaggggcaacgactagaactgggagtgcattctccacagggtgacaggctcctctctcctgcggccagcgccacaagcagcgggttcctggctgatcggagggtgggaacggggctgcggaccccgttgcgctccaggaggagcgccggcccttacctcgcccgtccggcttcatcagcagcgcgtggcccaccagtgggtaggcgcgggccaccgtggggatgggccgcatctgctgccatttccgcgcgtagctcgccaccctctgcagcaggctcaggaccagactggcgccggccagggaaagggcactcgccgcgccccacagcagcagcttctgccacacgagccccagccagagccccgccatcgccccggctggcggccgct

SEQ ID NO: 90076 - DNA, 2210 bp, Homo sapiens
gtccggacttcccgggtcgacgatttcgtggcggggacgccatgcgagccagcgtctcccttctctcctggacagaatgccgtgtcctgggacttctctgatggcgagaggctgcggctgtaccaggaagaaacatattgccgagtggatgccgccgcgcagcgtgtttgcttgaggcagaagcttcagcatctgctgggataactggaggaagaaatatgaagccttagcggctttacccgggaagcgagtttcgagatggcggctcagcggatccgagcggccaactccaatggcctccctcgctgcaagtcagaggggaccctgattgacctgagcgaagggttttcagagacgagctttaatgacatcaaagtgccttctcccagtgccttgctcgtagacaaccccacacctttcggaaatgcaaaggaagtgattgcgatcaaggactattgccccaccaacttcaccacactgaagttctccaagggcgaccatctctacgtcttggacacatctggcggtgagtggtggtacgcacacaacaccaccgaaatgggctacatcccctcctcctatgtgcagcccttgaactaccggaactcaacactgagtgacagcggtatgattgataatcttccagacagcccagacgaggtagccaaggagctggagctgctcgggggatggacagatgacaaaaaagtaccaggcagaatgtacagtaataaccctttctggaatggggtccagaccaatccatttctgaatgggaacgtgcccgtcatgcccagcctggatgagctgaatcccaaaagtactgtggatttgctcctttttgacgcaggtacatcctccttcaccgaatccagctcagccaccacgaatagcactggcaacatcttcgatgagcttccagtcacaaacggactccacgcagagccgccggtcaggcgggacaaccccttcttcagaagcaagcgctcctacagtctctcggaactctccgtcctccaagccaagtccgatgctcccacatcgtcgagtttcttcaccggcttgaaatcacctgcccccgagcaatttcagagccgggaggattttcgaactgcctggctaaaccacaggaagctggcccggtcttgccacgacctggacttgcttggccaaagccctggttggggccagacccaagccgtggagacaaacatcgtgtgcaagctggatagctccgggggtgctgtccagcttcctgacaccagcatcagcatccacgtgcccgagggccacgtcgcccctggggagacccagcagatctccatgaaagccctgctggaccccccgctggagctcaacagtgacaggtcctgcagcatcagccctgtgctggaggtcaagctgagcaacctggaggtgaaaacctctatcatcttggagatgaaagtgtcagccgagataaaaaatgacctttttagcaaaagcacagtgggcctccagtgcctgaggagcgactcgaaggaagggccatatgtctccgtcccgctcaactgcagctgtggggacacggtccaggcacagctgcacaacctggagccctgtatgtacgtggctgtcgtggcccatggcccaagcatcctctacccttccaccgtgtgggacttcatcaataaaaaagtcacagtgggtctctacgggcctaaacacatccacccatccttcaagacggtagtggaccatttttggggcatgactgtgcccccaaagacgctcctggggtcaggcgagggtcacacgccaggcacccaaccctgccccggtggccctgcagctgccccaggatctcaaggtctgtatgttttccaatatgacgaattacgaggtcaaagccagcgagcaggccaaagtggtgcgaggattccagctgaagctgggcaaggtgagccgcctgatcttccccatcacctcccagaaccccaacgagctctctgacttcacgctgcgggttcaggtgaaggacgaccaggaggccatcctcacccagttttgtgtccagactcctcagccaccccctaaaagtgccatcaagccttccgggcaaaggaggtttctcaagaagaacgaagtcgggaaaatcatcctgtccccgtttgccaccactacaaagtacccgactttccaggaccgcccggtgtccagcctcaagtttg

SEQ ID NO: 90077 - DNA, 2074 bp, Homo sapiens
ttagttaggagcccagaggctgatctgtgggcgcccggcgagagaggccccgccccgccctggaggccctggcagctccgggctgagagcagttccggtgccaaaacccttccctcccccgctcccccggaagtgcttttccaggattcgggccggagagaggccttgtaggcacagcggctgagactcgatctgctccaagtaggggctccagcgcgggtcggagtctgggggttcgcgcccgccgacccgcgccctgctccctctcagcacctgggcggacgaaatgaccattaagaagtagatgcccagatgcaaaagtgatgaaacagtccatttgtcataaagtaagatgcagctgtggcatgtcaaccagcttggaacaaaattgtatctgtttttctcagaagagaattccacaaggttaaatcagcaaacaaagaaaacatggtattttgaaatatgattaaactcctgatgctgcagcagaggctaagaatattaatggccagatctagtgcacacatggtcttctgaagaagccatgggtagctgttgtagctgtccagataaagacactgtcccagataaccatcggaacaagtttaaggtcattaatgtggatgatgatgggaatgagttaggttctggcataatggaacttacagacacagaactgattttatacacccgcaaacgtgactcagtaaaatggcactacctctgcctgcgacgctatggctatgactcgaatctcttttcttttgaaagtggtcgaaggtgtcaaactggacaaggaatctttgcctttaagtgtgcccgtgcagaagaattatttaacatgttgcaagagattatgcaaaataatagtataaatgtggtggaagagccagttgtagaaagaaataatcatcagacagaattggaagtccctagaacacctcgaacacctacaactccaggatttgctgctcagaacttacctaatggatatccccgatatccctcatttggagatgcttcatcccatccgtcaagcagacatccttctgtgggaagtgctcgcctgccttcagtaggggaagaatctacacatcctttgcttgtggctgaggaacaagtacatacctatgtcaacactacaggtgtgcaagaagagcggaaaaaccgcacaagtgtgcatgttccattggaggcaagggtttctaacgctgaaagcagcacaccaaaagaagaaccaagtagtattgaggacagggatcctcagattcttcttgaacctgaaggagtcaaatttgttttagggccaacccctgttcaaaagcagttaatggaaaaagagaaactggagcaacttggaagagatcaagttagtggaagtggagcaaataacacagaatgggacactggctatgacagtgatgaacgaagagatgcaccctctgttaacaaactggtgtatgaaaatataaatgggctatctatccctagtgcctcaggggtcaggagaggtcgtctgacatccaccagtacctcagatacccagaatatcaacaactcagctcagagaagaactgcattattaaactatgaaaatctaccatctttgcctcctgtttgggaagcccgcaagctaagtagggatgaagatgacaatttaggaccaaagaccccatctctaaatggctaccataataatctagatccaatgcataactatgtaaatacagagaatgtaacagtgccagcaagtgctcacaaaatagaatattcaaggcgtcgggactgtacaccaacagtctttaactttgatatcagacgcccaagtttagaacacaggcagcttaattacatacaggttgacttggaaggtggcagtgactctgacaaccctcagactccaaaaacgcctacaactccccttccacaaacccctaccaggcgcacagagctgtatgccgtgatagacatcgagagaactgctgctatgtcaaatttgcagaaagcactgccacgagatgatggtacatctagggaaaactagacacaatagtacttgatctgcccctgtgag

SEQ ID NO: 90078 - DNA, 2860 bp, Homo sapiens
tttcgtgctttgggcaggcaggagcgaaagggccaggggttgcctgtcctcccccaccctgttgaggccttcctccccctctgctgagcctcggttaattataactctgacctaagtgccctgtgacgtcaagcccgggccagccctgcccaggagacccagcaaccaggtccatgtctcagccatgctccccacggaggtcccccaatcccacccgggcccctcagcgttgcttctgctgcagctgttgctgccccccacatctgccttcttccccaacatctggagcctgctggctgcccctggctccatcacccaccaagacctaactgaggaggcagcgctcaacgtcaccctgcagctcttcctggagcagccacccccaggccgcccccctcttcgtcttgaggacttcctgggtcgaacactccttgctgatgacctctttgccgcctactttggacctggttcttctcggcggttccgagcagccttaggtgaggtgtctcgtgccaatgcagcccaggacttcctgccaacttccaggaatgaccccgacctgcactttgatgctgagcgactgggtcagggacgcgcgcgcctggtaggggctctgcgggagaccgtggtggcagccagggcccttgaccacaccctggctcgccagcgcctcggggctgcacttcatgccctgcaggatttctacagtcatagcaactgggtggagctgggcgagcagcagccacaccctcacctcctctggccaaggcaggagctccagaacctggcacaagtggccgatcctacctgctccgattgcgaggagttgagctgccccaggaattggctgggcttcacactcctcacctctggctactttggaactcatcccccgaaacctccagggaaatgtagccacgggggccattttgaccggagcagctcccagccaccgaggggaggcatcaacaaggacagcacatccccaggcttctcccctcaccacatgctgcacctccaggctgcaaaactggcccttctagcctccatccaggccttcagccttctgcgaagccgcctgggagacagggatttctccaggctgctggacatcaccccagcctccagcctgagctttgtcctggacaccacgggcagcatgggtgaggagatcaacgctgccaaaatccaggctcgccaccttgtggagcagcggagaggcagccccatggagcctgtccactatgtcctggtgccttttcatgacccagggttcggccctgtctttacaaccagtgaccctgacagcttctggcaacagcttaatgagatccatgccttggggggtggagacgagcctgagatgtgcctgtcagccctgcagctggccctgctgcacacacctccactctcagatatctttgtcttcacggatgcctcccccaaggatgcctttctcaccaaccaggtggaatccctgactcaggagcggcgctgccgggtaacattcctggtgactgaagatacatcaagggttcagggtcgagctcggcgtgagatcttgtcccctctgcgttttgagccatacaaagcagtggccctggcctcaggaggagaggtgatcttcaccaaagaccagcacattcgagacgtggcagccattgttggggagagcatggctgccctggtgactcttcccctggaccctcctgttgtggtgcctgggcagccacttgtgttcagcgtggatgggctgctccagaagatcacagtccggatccacggagacatcagcagcttctggatcaagaaccctgcaggggtctcccagggccaggaggaaggcgggggtcctctaggtcacactcgccgctttgggcagttctggatggtgaccatggatgaccctccacagacaggaacctgggagatccaggtcacagctgaggacacccctggggtgagagtgcaagcccagacctccctggacttcctcttccactttgggatccccatggaggatggaccccaccctggcctctaccccctgactcagccagttgcaggtcttcagacccagctgctggtagaagtgacagggttgggttccagagccaatcctggggatcctcagccgcatttctcccacgtcatccttcgaggggtcccagagggtgccgaactaggccaggtgcccttggagcccgtgggacctccggagcgaggtctcctcgcagcctcgctgtcgcccacgctgctgtccacccctagacccttctccctggagctgattggccaggacgcagcgggtcggcgcctgcacagggctgcccctcagcctagcactgtagtccctgtccttctggagcttagtggcccctcgggtttcttggccccgggcagcaaagtcccgctcagtctccgcatcgccagcttctcgggccctcaggatcttgaccttaggactttcgtcaaccccagcttctccctcacctccaacctctccagggctcacctggaactgaatgagtcggcctggggccgcctgtggctggaggtcccagattcagcggccccggattccgtggtgatggtgactgtgactgcagggggacgagaagccaacccagtacccccgactcatgctttcctccggctcctggtatcggccccagccccgcaggaccggcacaccacccctaccggctcatctgacccgatcctcaccacggccacccctgccttttcccccttcacattggtgactcaaggcagggctggggcagggctggctgcgggcagcccctggtggggcacagttggaggggtgctgcttctgataggcctggcctcctggtga

SEQ ID NO: 90079 - DNA, 8152 bp, Homo sapiens
  misc_feature (1)...(8152): n = a,t,c or g
tttgcagtcattggccagtgtggtggaattcgcaaaggtaaaagcacctcgctccgcagcatccagacctggaggggctgcgaccacgggccgagcccacccattccccagccaaaggacgggcccgccgctctccatggtactgcggagagctcagctccgcccttctctttcagaaggacagcacccggcgtcacgtaacccagccttctcaggctccaccaccgccttttccttcccagctctttccctctcctccccctcctcctttananctnctnctcctcctcctgctcccctccgttgcctgttctcccctcccgcactcctggagatagacgctcaagcctgacgcctctgaaaaggcagcagcagtcgccttatccatagacctcaggaaattcgctttgaccgatgcatgcttcaggctctggctcgagctgaggggaataaccgggcagatgtctgagtccttaaaaaagacaagataaaaccaaaatgcatcaccaacacacaaccaattgatgtgctggcatcttagcttggccctgcagaggcagagagaaaagaagaggagctgttgcgatttccacatctaacagcttctggctatttcgcaactgctgggtttgagtcctactgttgccgtggctgaaaagagaagtaaaatccaacttgtgagaccacgcacaaggaattaggctttggctgcagcggtgctgaagcccatgctatgacagaagaagcaggcctttgaagctatcctcgggttaagaaatggtgccctaaagaggcaagcatccctttctccgttctgctgtaagacaccacatctgaaggagacagacttgaggcattcacaagcatccaaggatactggctcactgctggcttcctgtactttcttgagaaaagtgttttctttttactgactctcactgcttccttttggcctggtaccactggtggaacctggcagataatgggatttgaggagttaagtatctgttgacactgcagatactcttaaattagttaatcagactcaaatgggtcagtgctttcccttgatcttttgttgaagccttttccagaacgttgtctccaaagtgcatcctccctttggtctggaagttctgtggctaccctgtaccactggggtcaacgttttccagttggaagaggactacagggagagagggcggggttattggaagaagaagaagaaaaaaagaactagataaaggagggcacatccctctcactcccgcctttccccttacctttctgtctctcgggacccttatttcttcgtcacggtgtccaggaccattttgaccctgtcggccccggcacccccccgccgcaccccagccccgagcatggggacggcgctgctccagcgcgggggctgttttcttctgtgcctctcgctgctgctcctgggctgctgggcggagctgggcagcgggctggagtttccgggcgccgagggccaatggacgcgcttccccaagtggaacgcctgctgcgagagcgagatgagcttccagctcaagactcgcagcgcccgcggcctcgtgctctacttcgacgacgagggcttctgcgacttcctggagctgattctgacgcgcggcggccgcctgcagctcagcttctccatcttctgcgctgagcctgcgacgctcctggccgacacgccggttaacgacggcgcctggcacagcgtgcgcatccgccgccagttccgcaacaccacgctcttcatcgaccaggtggaggccaagtgggtggaggtcaagtccaagcgcagggacatgacggtgttcagcggccttttcgtcggggggctgcccccggaactgcgcgccgcggcgctcaagctcaccctggcctcggtgagggagcgggagcccttcaaggggtggattcgtgacgtgagggtcaactcctcgcaggtcctgcccgtggacagcggcgaggtgaagctggacgatgagccgcccaacagcggcgggggaaggcccgtgcgaggcgggcgaggagggcgagggcggggtgtgcctcaacggaggtgtgtgctccgtggtggacgaccaggccgtgtgcgactgctcgcgaaccggcttccgcggcaaggactgcagccaagaagacaacaatgtggaaggtctggcgcacctgatgatgggcgaccaaggaaaagaagaatatattgccacgttcaaaggatctgaatacttctgctacgacttgtctcaaaaccccattcaaagcagcagtgatgaaataactctgtcatttaaaacccttcagaggaatggactgatgcttcacactgggaaatcggctgattatgtcaatcttgccctgaaaaatggagctgtctctctggtcattaatttgggatcaggggcctttgaagcactagtggagcctgtgaatggaaagtttaatgataatgcctggcatgatgtgaaagtcaccaggaatctgcgtcagcactcaggcattggacacgctatggtgacaatatcagtggatgggattcttaccacaacgggctacacgcaagaagattataccatgctggggtctgatgactttttctatgttggaggcagtcccagcacagccgaccttccagggtcaccagtcagtaacaactttatgggctgtctcaaagaggttgtatataaaaataatgatgtgaggctggaattatctcgacttgccaagcaaggagatcctaagatgaagatccatggagtggtggcatttaaatgtgagaatgttgcaactttagacccaatcacctttgaaaccccagagtctttcatctctttgcctaaatggaatgcaaagaaaactggctccatatcatttgatttccgtacaacagagccaaatggcctcatcttatttagccatggcaagccaagacatcagaaagatgccaagcacccacagatgataaaggtggacttctttgctattgagatgctagatggccacctctacctcctcctggacatggggtcaggtactataaaaataaaagccctgttgaagaaagtgaatgatggagaatggtatcatgtggacttccagagagacggacggtcaggtaccatttctgtcaacacgttgcgtactccctacactgctcctggtgagagtgagattctggacctggatgatgagttgtacctgggggggctgccagaaaataaagctggccttgtcttccccaccgaggtgtggactgctctgctcaactatggctacgtgggctgcatcagggatttgttcatcgatggccaaagcaaagatatccggcaaatggctgaagttcaaagtactgctggagtgaagccttcctgctcaaaggaaacagcaaaaccgtgccttagcaacccttgcaaaaacaatggcatgtgcagggatgggtggaacagatatgtctgtgattgttccggaacaggctatcttggcaggtcctgtgagagagaggcaacggttttgagctatgatgggagcatgtttatgaaaattcagctccccgtagtcatgcatacggaggctgaggatgtttccttacggttccgatcccagcgtgcatatggcattctgatggcaaccacttctagagactctgctgacaccctccgcctggagctagacgcaggacgtgtgaaactgacggtcaatctagattgtatcaggattaactgtaattccagcaaaggtcccgagactctttttgctggctataacctcaatgataacgagtggcacacagtgcgtgtagttcggcgtggaaaaagtttaaagttaacagtggatgaccaacaggccatgacaggtcaaatggcaggtgatcatactaggctggagttccataacatagagactggcatcatcacagaacgacggtatctttcttctgtcccctccaacttcattggacacctgcagagcttgacatttaatggaatggcatacattgacctgtgtaaaaatggcgacatagattactgtgagcttaatgccagatttggcttcaggaacatcatagcagatcctgtcaccttcaagaccaaatcgagctatgttgccttagctaccttgcaagcctacacttctatgcatctttttttccagttcaagacaacatccctagatggattaattctatataacagtggggatggaaatgactttattgtggttgaattagttaaagggtacttacattacgtgtttgatttgggaaatggtgctaacctcatcaaaggaagctcaaataaacctctcaatgacaatcagtggcacaacgtgatgatatcaagggacaccagcaacctccacactgtaaagattgacacaaaaatcacaacgcaaatcaccgccggagccaggaacttagacctcaagagtgacttatatataggaggagtagctaaagaaacatacaaatccttaccaaaacttgtacatgccaaagaaggctttcaaggctgcctggcatcagttgatttaaatgggacggcttccgggacctcatctccgatggttctttttcttgcaacgggacagattcgaggagagggatgtggaaggggcccagcacaacctggccaagaggactcatgttccaatcaaggtgtgtgcttgcaacaatgggatggcttcagctgtgactgtagtatgacttccttcagtggaccactctgcaatgaccctgggacgacatatatctttagcaaaggtggtggacaaatcacgtataagtggcctcctaatgaccgacccagtacgcgagcagacagactggccataggttttagcactgttcagaaagaagccgtattggtgcgagtggacagttcttcaggcttgggtgactacctagaactgcatatacaccagggaaaaattggagttaagtttaatgttgggacagatgacatcgccattgaagaatccaatgcaatcattaatgatgggaaataccatgtagttcgtttcacgaggagtggtggcaatgccacgttgcaggtggacagctggccagtgatcgagcgctaccctgcagggcgtcagctcacaatcttcaatagccaagcaaccataataattggcgggaaagagcagggccagcccttccagggccagctctctgggctgtactacaatggcttgaaagttctgaatatggcagccgaaaacgatgccaacatcgccatagtgggaaatgtgagactggttggtgaagtgccttcctctatgacaactgagtcaacagccactgccatgcaatcagagatgtccacatcaattatggagactaccacgaccctggctactagcacagccagaagaggaaagcccccgacaaaagaacccattagccagaccacagatgacatccttgtggcctcagcagagtgtcccagcgatgatgaggacattgacccctgtgagccgagctcaggtgggttagccaacccaacccgagcaggcggcagagagccgtatccaggctcagcagaagtgatccgggagtccagcagcaccacgggtatggtcgttgggatagtagccgctgccgccctgtgcatccttatcctcctctatgccatgtacaagtacagaaaccgggatgaaggctcataccatgtggacgagagtcgaaactacatcagtaactcagcacagtccaatggggctgttgtaaaggagaaacaacccagcagtgcgaaaagctccaacaaaaataagaaaaacaaggataaagagtattatgtctgatcccaagatcttaaatggacacttgtatagaaatagtcttcattttatctgagacataatataaacttatttactttcctttttatgaagcacatacaaaagaagacagggaatgcaatcaggaaggaaagactttttaaaaaataaaaacaagtatctcatgctcttgtttctcaaaaaagaaaaacaaaaaacaaaaaacaggggccaataaattccctaacatccacagtgttttcatttactctgcttgtctttatgttgctggaacatttctaaaagacagtgatgaccgcacgcattcataaagcaaaggagtactacagcatcaaggcacaacacaaaaaccaacacaaaacataacacaaaaaagaagctacctatgatcctggatttagccaaaagtgctagcgctttcctgagaagtcagttcaatttgcagagaaagactgtccttttgaagtgactcaacctgcaaaccctttaaaagtttgccgcctggtgcaactggagcagtggttggaacttgcatttgaaacaaagtgctggcttttttgaagacttgtgtaggaacacattcaaaaagcccctttctggttgtgagagaggaaaaaaaagtatggaggccttattttcaaaaatgtgaaatataaggcacgttttcacacaaaatttcaaaacaaaaacaagagggcatagatgcaatcattgggaaattttcatgcacgcttattatgttattacatatgtttatataaaatccatctctgtgggctttctggactgtgataagtgacgttttatagcctgttgtatagaaaatgcaaaatatatctctgctcttcagccatttttggtaaattcaatgttataagtgttgctaagtatagggagttttatgacatcagagcaacaattatttcagttgggtttttctttttttttgccaccattataaattgccacaattacttacttttattttttaaagaaattacagtgtagtgtttattctaaggaagatatgtatgaatgtatatacaaagactcagctacttcttttcttatatgtacagccttcattctgttgcaattaagttttagtacttgtatgaaaggtgtgaattagaaagtcacatatatacatatgtatcttataatcttttctccctgaaatactcacattcccacatacattcactattttcacacacacacacacacacacacacacacacacacacgaatccacagcaatccatcagatatgctggaagatccaaacgtgcatacagtagcaaatatttattgacaaattgaaaagcaggaaggaagagggttgtgcccaaggtattgatgacaaatggggtgatttgcttcattgagatcttgctcccaggtaaccttaagaagattttagtccctaaagaaatgaacctttccttatcaaatagaatatcactgatatactgctgcatgaataagaaccattatgtgggcaggttatggaagcaaaattggttaatctacaccttaactctggctgctgcaattgaaaactttctttctaataaaataatatatatatctctgaatctgatgtgcatgatgaacatttctggaaagtaaacactttctctcgactaagaaagtatttttcagtaatttttgattctgtattactacccacttaaaaaatcattctctgttaattattgactatgttttaacttttctggttttacatatatatcattaaatatagttttagtttaacacattaagtagtggaaaagtatagattatacacttgttttgcatattattcaatgatgttcacagcaataaattactaatatgagaaggtagtgcaaaaaatgcattattacattgcaagttgatgtttcaggaaaaattggttgcattacttgaataccttctaaaagaacgataaaaaattttgtagaagagaagaatatctttccaattagctttaatcagcaaaggcaaaaaatgcaaaacatcttttgtgatactttagttgatgaaaaaaaagccaagaagtggcctggatttcagacatacagcaccttagaaatatgtataattcatagcaaatcaccactatctatggttgccaagtaattgttgtgtacaaagaaatttagtggctttttatgacccagaaagtagaaggtataaaatgaaaatttaatatccattgsttytttttytagattttcattttttttaatttgccacattaaataattcacgagtcttttcttttccccgtctcattcagtcttactcaggggaagccagttaaataaga

SEQ ID NO: 90080 - DNA, 404 bp, Homo sapiens
tgggctcaacccaggacagaaggtatttttgttcttccaggacaatgggtttctgcctgggcctgctgggctgcagctccagatacttccctgtgaggaagagaagcagccctggggagaggcccctgcagatgccacagcccagagggtccctcacagcagatgccacagccacgggcccagagggtccctcacagcagatgccacagccacgggcccagaggggtccctcacagcagatgccacagccacgggcccagaggggtccctcacagccagcaccagggcaggtgcgtgagaggcacggctcccgcagcccctcatgagtcaccacctcctgaacctcaagtctccccagccgaggccccaggtaccagcaacagaactaagcctgctgctgtgag

SEQ ID NO: 90081 - DNA, 1061 bp, Homo sapiens; identical to SEQ ID NO: 61192
  misc_feature (1)...(1061): n = a,t,c or g

SEQ ID NO: 90082 - DNA, 417 bp, Homo sapiens
ttgatttttaagagctctcaaactgtcaattcactggaagctcagagccactgaaagctcagagcctctagaagctcagagccactggaagctcagagccacttctccagccttccactttctgtgtctggaccatggaacatctctcttctgcagggctgttcccttccttgatgcatctgcttttccctttctcactttaggcagcttctgtctctgatttgcagggtccttcttaggcctggtctctggttttggaggggtaggtttagaaaataatcctgctgatctcctctgtaactcaaactagcctttactttgtcactcatagcaccttcactgggctttctcttaggcatgatgatgacagtgaatggcaggtgggctggctttcatagtccaagggttacctccatc

SEQ ID NO: 90083 - DNA, 744 bp, Homo sapiens
ctcctctctagggtgtatacctgtagatatcaaatgacatgtaaaaattgtgttcacatcagcacttttcaagatagccccaagctggaaacaatccaagtgtcatcaggagtacagcagataagtaaattgtggcatattcatacattggaatactatatagcagtgctttcttaacctacctgtaggtgaggaaccagatttttttccctaaaaatctgtcaggatgaaactcttgtgtaatacaatattacatacaacgccaaactgctcaaaagtttctaaatgttcacacataccttctgtactcatggtgttgcaggccagtgatgaacagggtggggaccagcagtggtacacaaacatacttcaaatagcactgctctcaaacaatgacaaagaacagactgcaactacacagagtagtgtgaatgaatctcacaagccaacacaagagtctgtattttatgattccaaacggtgtaaagttcagtagcaaccaaaatactaacctgtgacattaacaagttagaattacccttgaggagcagaagatggtcatttgtagggggtatggaaagaattctgggattcttaatcttggcattgcatgatttttatgttggctatatgggtatgctcattttgtcaaaatttagctgtgtgcttatgatttgtgcacttttctgtatgtacattatacttaacatttacattaaaatttattgatgacctattaaacac

SEQ ID NO: 90084 - DNA, 4413 bp, Homo sapiens
  misc_feature (1)...(4413): n = a,t,c or g
actcggccggcagcggaccgcagccaccagccgcccgcgccctccagccccgtccgggagtccccggcccgctgcggtgccgtgagtacctccaaccccctgcgccccggagggaggccgaggggcttagccaccagggctcggaagtgggggccgaatccggtgcgagacccaaggagaggggagcagagccggagttggggagactgtggctgaaaactgtgtcttcctggagactaggctggcattttgactttggggttgctgaaaagccaggagtcaaaatgactgagcgctttgactgccaccattgcaacgaatctctctttggcaagaagtacatcctgcgggaggagagcccctactgcgtggtgtgctttgagaccctgttcgccaacacctgcgaggagtgtgggaagcccatcggctgtgactgcaaggtgcaacattagaggaaatcaatcagcactgggactggctggaacaaaatctcctccacaccttgtctgtctttgataataaagatgacattgccagttttgtcaaagggaaggtaaagccgtgtgtctgggtggctgacggatgacacagctgagccattctcctcatcaggtgtgactgtcgttgaagcagcgcacacttctcgggggcctgtgcacctcagtccctcctgcttcctgtcccttgcaccccctgccttcccattgctggctcactgagcagggactgtcatctctgtgtgtcaggctctgatagccgaggagaccagcagcaggctcgccgagcaggaggaggaacccgagaaattccgagaagccctggtgaagttcgaggccaggttcaacttccccgaggcggagaagctggtcacctactactcctgctgctgttggaagggcagggtgccccgccagggctggctgtacctcagcatcaaccacctctgcttctactccttcttcctgggcaaggaacttaaacttgtggttccgtgggttgatatccagaaattagaaagaacgtccaatgtctttctgacggataccatccgaatcaccacgcagaataaggagcgtgacttctccatgttcctgaacctggatgaggtgtttaaggtcatggagcagctggccgacgtgacgctgcgaaggctgctggataatgaggtctttgacctcgaccccgatctgcaggagccgagccagatcaccaagagggacctggaagccagagcacagaatgagttcttccgggctttcttcaggttgccgaggaaggagaagctgcacgcggttgtggactgttcgctctggacgccgttcagtcgctgtcacaccgcggggcggatgttcgcctctgacagctacatctgctttgccagcagagaagatggctgctgtaagatcatcctgccactcagagaggtggtgagcatcgagaagatggaggacacgagcctgctgccgcatcccatcattgtcagtatcagaagcaaggtggccttccagttcattgagctccgggaccgagacagcctggtggaggcgctgcttgcgaggttgaagcaggtccacgccaaccaccccgtgcactacgacacctctgcggatgatgacatggcttcactcgtgtttcattcaacaaggcatgtgccagtgaccacagatttggggatcctgaaataatgtcttctcaaaatagcgaggagagtgagaaagagaagagcccgctgatgcaccccgatgnccctggtcaccgccttccagcagtcaggcagccagagccctgactcccgaatgtccagagaacagataaaaataagcctgtggaatgaccactttgtggaatacggcagaaccgtgtgtatgtttcgcacagagaagattcggaagctcgtagccatgggcatccctgaatctttgcgagggagactctggcttctcttctcagatgcggtgacggatcttgcctcacaccctggttactacgggaatctggtggaggagtccctggggaaatgctgcctggtaaccgaggagatagaacgagacctgcaccgctccctgccagagcaccccgccttccagaacgaaacgggaattgctgctttgaggagagtcttgacggcctatgcccaccggaaccccaagattggatactgccagtccatgaacatcctgacctccgtgctgctgctgtacaccaaggaggaggaagccttctggctgttggttgctgtgtgtgagcggatgctgcccgattacttcaaccaccgagtgatcggggcacaagttgaccagtctgtcttcgaggagctcatcaagggtcatctcccagagctggcagagcacatgaacgacctctcagccctggcgtccgtctctctctcgtggttcctgaccctgttcctcagcatcatgcctctagagagtgcggtgaatgtggtagactgcttcttctatgatggcatcaaagccatcttccagctgggactggctgtgcttgaggccaatgctgaggacctgtgcagcagcaaggatgatggccaggccttgatgatcctcagcaggtttctagatcacattaagaatgaggacagcccagggcccccagttggcagccaccatgcctttttctccgacgaccaggagccctaccctgtgactgatatttcggacctgatccgggattcctatgagaaatttggagaccagtctgtggagcagatcgagcacctacgttacaagcacaggatcagggtcctccaaggccacgaggacaccacaaagcagaacgtgcttcgagtcgttatcccggaagtctcaattcttcctgaagacctagaggagctctacgacttattcaagagagaacatatgatgagctgttactgggagcagcccaggcccatggcctcacgccacgaccccagccggccctatgctgagcagtaccgcatagacgcccggcagtttgcacacctgtttcagctagtctcgccctggacctgcggggcccacacggagatcctcgccgaaaggacgttcaggctcttggatgacaacatggaccagctcatcgagttcaaagcgtttgtgagctgcctcgatattatgtataatggagaaatgaatgagaagattaaactattatacaggcttcatatccctccagcactcactgaaaatgaccgagacagccagtcgccgttgaggaatcctctgttgtcaacatcgagacccctggttttcgggaaacccaatggtgatgcagttgattatcagaaacagctgaagcagatgattaaggatttagccaaagaaaaagataaaactgagaaagaattgcccaaaatgagccagagagaatttatccagttctgtaaaactctgtacagtatgttccatgaagatccagaagaaaatgatttgtatcaagccatcgccacagtcaccacactgctgctgcagatcggggaggtggggcagcgaggcagcagctctggaagctgctcccaggagtgtggggaggagctgcgggcttcagctccttctcctgaggactcggtttttgcagacactgggaagacgccccaggactcccaggcacttccagaggcggcagaaagggactggactgtctcccttgaacatattttagcttcacttctgactgaacagtcattagtcaacttttttgaaaagccactggacatgaaatccaaacttgaaaatgccaagatcaatcagtacaatctcaaaacttttgaaatgagccaccaatcacaatctgaacttaagctgagtaacttgtagcaagacagcagctgctatgcacactggagtccaccataccaaagcacgaaccagactgtttcttggggtcagccctaaaccgagatttcagtctaccttaccaatggggcatctggctaaacaacctgacaaactgtggccaggggaaccgacacaaccctcaagcatttctatgtattgagaattgtcagtgccctaaggtatccattggttcccttgatgccaacttacaatttttaccggatttgctgaaatgggcacttctgctgtgatgctagtgttgattttgctctcagatgaacacaatgtctcatactaaccaagaagcaagaaaagccccatgctttcatttttcacttggagtgacaatgggagaggtcaggaatcaagttcactttcaagatctaagggagtccactatctgtgcaattgtatttggcttttttttgcactgtttcaatgctggtaattgaaaccattttaatatatttggttgtattcactttatatgtccttccaaaaatgttgttgtgtacataccatgctttcaatgttggcttccaagttttttaataagaaactttttgtaaaaaaaaaa

SEQ ID NO: 90085 - DNA, 436 bp, Homo sapiens
accaatttcagtcacaggacaggaaaagactttgaagtatcaggaagtaatagtcttgacttaaaacatgttacatatttgagagtttctggaagaaaggaatcccttaaacatggctgtggcaaacacttcagaatgagttcacaccactatgactacaagaaatatgggaaggggctcagacacatgattgggggcttcagcctacatcagagaattcatagtggactgaaagggaacaaaaaggacgtgtgtggaaaagacttcagccttagctctcatcaccaacgtgggcagagtcttcacacagtgggagtgtcatttaagtgcagtgactgtggaaggactttcagtcatagctcccatcttgcgtatcatcagagacttcacactcaagagaaagcatttaaatgtagggtgtgcgggaaagccttca

SEQ ID NO: 90086 - DNA, 4016 bp, Homo sapiens
aatggtcagtcaatacattataacataatacaccaaatgctagaatagaaggggaggggggcacacataatgactcactgctggaagaagggtgcatcagtgaattaaaaaatgtccctcccctcttcagcactcagcgcgcagctatttccttctgccagtctctttgaactctggatctttgcttttgctcgctgctctcctgtttttcattctccacattttctcaatcctctttctttatccttagccaccctgcttttttcctccttttttaaaaaatcggagatttcgtcttaaaatgatttgtcttccttaccttcgtccatttcaacactgaaggctgcaaagaacttcacctttcccctagtggtatttaaaaattctcaatccgtaaaaagtctttttgaaaggcaaaggaacaggacccagaccctctcgacacccttgatccgagtcagatctgcactagcaaccagaactaatatttcatttaacccaccaaaagggggaggcgagaggagccagaagcaaacttcatctgtctcagacggatccgtggttcctacatttggaggagccgcgtgtcagaaggcgtaggaccccaaggggggacaaggaggactcccgagtctcccttctccgctctccgagaccgaagaggtggactgagccgctcgggacagcggcaccggaggaggctcggagaagatgcggggctcggggccccggggtgcgggacaccggcggcccccaagcggcggcggcgacacccccatcaccccagcgtccctggccggctgctactctgcacctcgacgggctcccctctggacgtgccttctcctgtgcgccgcactccggaccctcctggccagccccagcaacgaagtgaatttattggattcacgcactgtcatgggggacctgggatggattgcttttccaaaaaatgggtgggaagagattggtgaagtggatgaaaattatgcccctatccacacataccaagtatgcaaagtgatggaacagaatcagaataactggcttttgaccagttggatctccaatgaaggtgcttccagaatcttcatagaactcaaatttaccctgcgggactgcaacagccttcctggaggactggggacctgtaaggaaacctttaatatgtattactttgagtcagatgatcagaatgggagaaacatcaaggaaaaccaatacatcaaaattgataccattgctgccgatgaaagctttacagaacttgatcttggtgaccgtgttatgaaactgaatacagaggtcagagatgtaggacctctaagcaaaaagggattttatcttgcttttcaagatgttggtgcttgcattgctctggtttctgtgcgtgtatactataaaaaatgcccttctgtggtacgacacttggctgtcttccctgacaccatcactggagctgattcttcccaattgctcgaagtgtcaggctcctgtgtcaaccattctgtgaccgatgaacctcccaaaatgcactgcagcgccgaaggggagtggctggtgcccatcgggaaatgcatgtgcaaggcaggatatgaagagaaaaatggcacctgtcaagtgtgcagacctgggttcttcaaagcctcacctcacatccagagctgcggcaaatgtccacctcacagttatacccatgaggaagcttcaacctcttgtgtctgtgaaaaggattatttcaggagagagtctgatccacccacaatggcatgcacaagacccccctctgctcctcggaatgccatctcaaatgttaatgaaactagtgtctttctggaatggattccgcctgctgacactggtggaaggaaagacgtgtcatattatattgcatgcaagaagtgcaactcccatgcaggtgtgtgtgaggagtgtggcggtcatgtcaggtaccttccccggcaaagcggcctgaaaaacacctctgtcatgatggtggatctactcgctcacacaaactatacctttgagattgaggcagtgaatggagtgtccgacttgagcccaggagcccggcagtatgtgtctgtaaatgtaaccacaaatcaagcagctccatctccagtcaccaatgtgaaaaaagggaaaattgcaaaaaacagcatctctttgtcttggcaagaaccagatcgtcccaatggaatcatcctagagtatgaaatcaagcattttgaaaaggaccaagagaccagctacacgattatcaaatctaaagagacaactattactgcagagggcttgaaaccagcttcagtttatgtcttccaaattcgagcacgtacagcagcaggctatggtgtcttcagtcgaagatttgagtttgaaaccaccccagtgtttgcagcatccagcgatcaaagccagattcctgtaattgctgtgtctgtgacagtaggagtcattttgttggcagtggttatcggcgtcctcctcagtggaagttgctgcgaatgtggctgtgggagggcttcttccctgtgcgctgttgcccatccaatcctaatatggcggtgtggctacagcaaagcaaaacaagatccagaagaggaaaagatgcattttcataatgggcacattaaactgccaggagtaagaacttacattgatccacatacctatgaggatcccaatcaagctgtccacgaatttgccaaggagatagaagcatcatgtatcaccattgagagagttattggagcaggtgaatttggtgaagtttgtagtggacgtttgaaactaccaggaaaaagagaattacctgtggctatcaaaacccttaaagtaggctatactgaaaagcaacgcagagatttcctaggtgaagcaagtatcatgggacagtttgatcatcctaacatcatccatttagaaggtgtggtgaccaaaagtaaaccagtgatgatcgtgacagagtatatggagaatggctctttagatacatttttgaagaaaaacgatgggcagttcactgtgattcagcttgttggcatgctgagaggtatctctgcaggaatgaagtacctttctgacatgggctatgtgcatagagatcttgctgccagaaacatcttaatcaacagtaaccttgtgtgcaaagtgtctgactttggactttcccgggtactggaagatgatcccgaggcagcctacaccacaaggggaggaaaaattccaatcagatggactgccccagaagcaatagctttccgaaagtttacttctgccagtgatgtctggagttatggaatagtaatgtgggaagttgtgtcttatggagagagaccctactgggagatgaccaatcaagatgtgattaaagcggtagaggaaggctatcgtctgccaagccccatggattgtcctgctgctctctatcagttaatgctggattgctggcagaaagagcgaaatagcaggcccaagtttgatgaaatagtcaacatgttggacaagctgatacgtaacccaagtagtctgaagacgctggttaatgcatcctgcagagtatctaatttattggcagaacatagcccactaggatctgggggcctacagatccagtaggtgaatggctagaggcaatcaagatgggccggtatacagagattttccatgggaaaatgggatacagttcaatggaccctgtggctcaggtgaccttggaggatttgagacggcttggagtgactcttgtcggtcaccagaagaagatcatgaacagccttcaagaaatgaaggtgcagctggtaaacggaatggtgccattgtaacttcatgtaaatgtcgcttcttcaagtgaatgattctgcactttgtaaacagcactgagatttattttaacaaaaaaagggggaaaagggaaaacagtgatttctaaaccttagaaaacatttgcctcagccacagaatttgtaatcatggttttactgaagtatccagttcttagtccttagtct

SEQ ID NO: 90087 - DNA, 4408 bp, Homo sapiens
tttcgtttctcgcgcggatggtgaagctgaatttggttcgctttaccctcggacaggagagcacggctgggcacggggggactcaccgccagtgagagtagggacgaaggctcagggaaggcgagcttcggtccaagccgttggggtgtggggaggggaatccatttcgtagacagctctgccgaggcacggagaggggcggtgctgcttggggtcaactgggatttagggcttggattcatttaagaacctgagcttccttcaccaaacctagacagcaagagagagacaagcccgaggcctgacttctagcactcctgagtttgagccctatgagcagtggaacctagggaccaccaaggatccagatataattctttcctcagtaatagaaaaaagaatctgggatctaagaagatacctactcattttctaagtgactggccatgtcattgtcccacttataccgggatggggaaggccgcattgatgatgatgatgacgagcgggagaactttgagatcactgactgggatctccagaatgagttcaaccccaaccgacagcgccactggcagaccaaggaagaagccacctacggggtgtgggcagagcgagactcggatgatgagaggcccagctttggaggcaaacgggcccgtgactactctgcgccagtcaacttcatcagcgcagggctcaagaaaggggcagcggaggaggcagagttggaagattctgatgacgaagagaaacctgttaagcaggacgactttcctaaggattttggaccaaggaagctaaaaacgggtggcaattttaagcccagccagaaaggttttgcaggaggaaccaaatctttcatggacttcggcagctgggaaagacacacaaaaggaattggacagaagcttcttcagaagatgggctacgtccctggacggggcctcgggaagaatgcacaaggtatcattaacccaattgaagccaagcagagaaagggaaaaggtgctgtgggggcttatggatccgagcgcaccactcagtccatgcaagacttccctgtggttgactcagaggaagaagctgaagaggagtttcagaaggagctgagccagtggaggaaagacccaagtggaagcaagaagaagcccaaatactcttacaagaccgtggaagagttgaaggccaagggcaggattagcaagaagctcactgctccccagaaggaactttctcaagtcaaggtcatagacatgacaggccgggagcagaaggtctactacagctacagtcagatcagccacaagcacaacgttcccgatgatgggctgccgctacagtcccaacagctgccacagtctggcaaagaggccaaggcccccggcttcgcgctgcccgagctggagcacaacctgcagctgctcatcgacctcacggagcaggagatcatccagaatgaccggcagctacagtatgagcgggacatggtggtcaacctcttccatgagctggagaagatgaccgaggtcctggaccacgaggagcgggtcatctcgaacctcagcaaggtcctggagatggtggaggagtgcgagcggcggatgcagcccgactgcagcaaccccctcaccctggacgagtgtgcccgcatcttcgaaaccctgcaggacaagtactatgaggagtacaggatgtccgaccgtgtggaccttgctgtggccatcgtctatccactcatgaaggagtacttcaaggagtgggatcccctcaaagactgcacttatggcaccgagatcatctctaagtggaaaagcctcctagagaatgaccagctcttgtcccatggcggacaggacctctcagcagatgcctttcacaggttgatatgggaagtctggatgccttttgttcgaaatattgtcacccagtggcagccaaggaactgtgacccgatggtggactttttggatagttgggtgcacattattcctgtgtggatcttagataacatactggaccaactcatcttccccaagctgcaaaaggaggtggaaaactggaacccgctcacagacactgttcccatccactcttggatccacccatggctgccccttatgcaggcacggctggagccactctattcccccatccgtagtaagctgtccagcgccctgcagaagtggcaccccagcgactcctctgccaagctcatcctccagccctggaaggatgtcttcactcctggctcctgggaagcattcatggtcaaaaacatagtgcccaagctggggatgtgtcttggtgagctagtcattaacccccaccagcagcacatggatgcattctattgggtgattgactgggaagggatgatctctgtctctagcctggtgggacttcttgaaaagcacttcttccccaagtggcttcaggtgctgtgctcttggctcagtaacagcccaaattatgaggagatcaccaagtggtacctgggttggaagtcgatgttctcagaccaagtgctggcacatccatctgtcaaggacaaatttaatgaggcacttgatatcatgaaccgggcggtgtcctccaacgttggtgcctacatgcagcccaggagcacgggagaacattgcctatctcacccacacggagcggaggaaggacttccagtacgaggccatgcaggagaggcgggaggctgagaacatggctcaaaggggcattggcgtggccgctagctctgtgcccatgaactttaaggacctcattgagaccaaggctgaggagcacaacattgtcttcatgcccgtcattgggaagcgacacgaagggaagcagctctacacctttggccgcattgtgatctacatcgaccggggagtggtctttgtccagggcgagaagacgtgggtgcccacctcactgcagagcctgatcgacatggccaagtgaactgtggcaggtccagaaccagtcagagacttgcccctaagagggatgtactgtaaataaacagtatttttagatcaccttcaaaagggtaacttctttactcaggagctactccacatcaggccaggtcatgagggaaggatgtaaaacgggacaatgccacggtagggcaggaatctttataccaagtcctcatgtggggtatcgtcctcaaaacaggacagccaagttgatgttctttcctggcaaaggagttctctggtagttcctccatagcagccttccctttagtctctggtggcaagcttctacctcagccaacactgagtacctcacaacgagttcagtcagtagcagaaggatcttctctcttgttcctgatgatttcaaggtcctcacagtcctgataatctggttcttcccgaaactccccaaatatcctatggagagctggttctagcttttgcacagggaaccagtggacagaggtatcattaaatatgtccatgtattgtgaagtctgaggaaactcaagctcctccagtccttttaaaatctgagcagaaaaattcaagtataaaaacttcagatagtcacagtaatccccactcttttgggataaatttccactttacttgtcatccccactttactttttaaaaaaataacaaatagggtattttgatttaaatgcttttgcccaatgaattggggcgccccaaggacagtggatatcatggactgtgatactaagaataaaggaaataaggaaaaaacttagagatgcatttaagagtcatagctttctggaacacagacccatggagagagctgacagtacacttgcgccacttaggccatgagtttcctcctacggctgtaaagaaagatagaattcttctcagtttcacacccttttccatcccagcccctttattcagatagatacctttgcaatgtagggataatttttctgcagaatccttgccaacaacctagaaattaaaaaaaaccaaaaaaacaaaaaaaaaaaccatgattaggaggtatgaggatagtttcattcaacttttaaaacacataaaagggcaagatgattgaagcatagtaagaattcaggaaaaaactcaagatgtggagtaaaccagttaaatagttgaaaatgtgggccaggcgcaggtaatcccagcacttcaggagactgaggcgggcggatcatttgaggtcaggagttcaagaccagcatggccaacatggtaaaaccccatctctactaaaaatacaaaaatcagccgggcgtcctggtgtgcatctgtaatcccagctactcattaggctgaggtaggagtatcgcttgaacccaggagacagaggttgcagtgagctgagaccataccactgcactccagccggggggacagagtgagactccatctcaaaaaaaaaa

SEQ ID NO: 90088 - DNA, 1986 bp, Homo sapiens; identical to SEQ ID NO: 75542

SEQ ID NO: 90089 - DNA, 3501 bp, Homo sapiens; identical to SEQ ID NO: 60942

SEQ ID NO: 90090 - DNA, 1201 bp, Homo sapiens; identical to SEQ ID NO: 61274

SEQ ID NO: 90091 - DNA, 703 bp, Homo sapiens
gcaggcactcggccggaattcccgggtcgagtggcgtccatccagggccggccccaggacacaaagcctggcgtgaaaaggactgtcacgcacaggacaaacaggggtggtggagacgggccccacatcagctccaaggtcagggtgattaagctgtcaggtgggcagggaggagagagcgatggcttttttcacccagaaggccagccccagcggcttccccagcctccggaagtgggaccacagcctgcccgcaaggtgacgctgaccagggggggcctccagcagcccccacatctgccagcggggccccacgcacactcgcctgtccctccagggatcaaaagcatccaaggaattcacccggcgaagaaggccatcatgcacggacgaggcagaggagtggccggtcccatgggccgggggcgcctgatgccaaacaagcagaacctgcgggtggtggagtgcaagccccagccctgcgtggtgtctgtggaggggctgtcctcgtccaccacggatgcccagctgaagagcctgctgatgtcagtgggacccattcaggtagccgcctgggggtggcatctgtgccacgggtagttgtgtcccaagacaaaatcatttcttgatttaaaacacagtgccctttgtgttggctacttcatattaaaataatacttgggaagtaagacaaataaaaaaa

SEQ ID NO: 90092 - DNA, 1123 bp, Homo sapiens; identical to SEQ ID NO: 60566

SEQ ID NO: 90093 - DNA, 3156 bp, Homo sapiens; identical to SEQ ID NO: 61089

SEQ ID NO: 90094 - DNA, 1206 bp, Homo sapiens
ttttttttttttcttatgtacacaatggtttattaaaggaatgtatggcccacatcaacctagcaaggattctactggtaaaccttcccatggccaaaggaaaaacaagcaggagttgagtggctggggtggggtgcaggcaatggagagagggcagaagggtgtagaagctgaagggggctagaagcttactcctgagtttcttccttctgtcttcaaatctttacttcttatggccaaagacccagctgtttcataggctggagatgcactcttctagactgctcgagacagccagagacaggggaggagggaagaaggatactgtggaaagggatggcggggcaaacatttagagctagaagccactactgggcccaatgctaaagtttctgtctctaagcctaaaaaagccagctgtagtaggggcccttatcactcttagtttggtaggtttcccctctgaaataatgagcagatttagccaggctagcagaaaggaagaggacggggctgtgcaggagttagcagaatcttgattcttgctctatggtcggtacttgcacaggaagtgttggcgcttgttgcattcgttgctgctccaagttaaaaagttgttattggagctcatctcagcacagtgcttgttcccacccatggacttgccagaccaggatctgtacagatacatggccccatcaatccactgccactgctgcctcttctgtgggtcgtgcaggccaatccatatcggctggcttctctgatagccacttatgtactctgctatggtgctggcttcctttaaactcaggatagatgccaggtgggctccgtttccgtaagactgacactcgaagctcggcatcagaccagttcctcagcttcctgaagtaaccatagcaattggacttgtggtaaaaccatccaggagcacagctgggtctcatgatgatatcacccaggactcctgttttggccaggcagctcagcaataggagcagccgcatgcttctggaagccatcttcctcctaccctgaggatgtagctagtgcaaggatctcagagaccttactagcgcttctttgaaactcctgggttctccttgatctgcaaatctgtttggcaaccaagactctaagggcccctgccttcttcagtgtctccagtggtcccagtcaacgtttctggagcttttatatctt

SEQ ID NO: 90095 - DNA, 763 bp, Homo sapiens
  misc_feature (1)...(763): n = a,t,c or g
cccatatgggccaccagatgttacggggggtggagggggtctttgttcttagagctcccaagatgcgacgggccgctctcaagatgggggtgggctgctcccaagatggctgcaagccttttgttctctgacctggggttcttggcctcaaggattccaaagaatggaaccttgggccatgtggtcagtgttatagctctagtagaagtcatgggtcacggaagagaactgtggaacccagtgactagtgttcagctcgattaggatgaaccctgggcccttagccatgcaggaacaatggtcagcctctagcccgattgggagcggcaatggacacctctctggatcagaagcacagcggacaccctgctggatccagtgggtggaagtcaatggtgggtctgggacagcagtgaacagcagtggtggacagtgagcgaaagctcagctcgagctgtaacaaacacagaccagaagagtgtgcagttgcaagatttaacagaatgaaaacagctcccatacaatgggaggggatgcaaagggggtttcccacttcctgctcaaatgcctgggtttatatcccaatcattgtccctacccctgtactctcaggcgatatgtgatttgactatttctctacttccttcctttagcctagtttgtaatttagtgagccctctttgctacctgattggtcgggtgtgngctgagttacaagcctcgtgtttaagggtaggtgtgtcaccttccccngctagcttag

SEQ ID NO: 90096 - DNA, 2815 bp, Homo sapiens
ccgggtcgacgatttcgtggagagagcaaacaaaggggtcaggagggaaaataatgcactggcttcctgagcccctgcagaggctgagcagggagagggggccagggccagaggggacagaggctggcggcagacgggccgggacaggcaggtcctaaatggcattgtttgaaggggccggctaattgcacagagcagtctgagcctgagaccccagccctggcctccccactctgtcctgggtgctggcgtctgagccttcgggacagcctgtccacatggaaccaagtcctgagcctccaagcttggaaagcatgaagggagacaccaggcatctcaatggagaggaggacgccggcgggagggaagactcgatcctcgtcaacggggcctgcagcgaccagtcctccgactcgcccccaatcctggaggctatccgcaccccggagatcagaggccgaagatcaagctcgcgactctccaagagggaggtgtccagtctgctaagctacacacaggacttgacaggcgatggcgacggggaagatggggatggctctgacaccccagtcatgccaaagctcttccgggaaaccaggactcgttcagaaagcccagctgtccgaactcgaaataacaacagtgtctccagccgggagaggcacaggccttccccacgttccacccgaggccggcagggccgcaaccatgtggacgagtcccccgtggagttcccggctaccaggtccctgagacggcgggcaacagcatcggcaggaacgccatggccgtcccctcccagctcttaccttaccatcgacctcacagacgacacagaggacacacatgggacgccccagagcagcagtaccccctacgcccgcctagcccaggacagccagcaggggggcatggagtccccgcaggtggaggcagacagtggagatggagacagttcagagtatcaggatgggaaggagtttggaataggggacctcgtgtggggaaagatcaagggcttctcctggtggcccgccatggtggtgtcttggaaggccacctccaagcgacaggctatgtctggcatgcggtgggtccagtggtttggcgatggcaagttctccgaggtctctgcagacaaactggtggcactggggctgttcagccagcactttaatttggccaccttcaataagctcgtctcctatcgaaaagccatgtaccatgctctggagaaagctagggtgcgagctggcaagaccttccccagcagccctggagactcattggaggaccagctgaagcccatgttggagtgggcccacgggggcttcaagcccactgggatcgagggcctcaaacccaacaacacgcaaccagagaacaagactcgaagacgcacagctgacgactcagccacctctgactactgccccgcacccaagcgcctcaagacaaattgctataacaacggcaaagaccgaggggatgaagatcagagccgagaacaaatggcttcagatgttgccaacaacaagagcagcctggaagatggctgtttgtcttgtggcaggaaaaaccccgtgtccttccaccctctctttgagggggggctctgtcagacatgccgggatcgcttccttgagctgttttacatgtatgatgacgatggctatcagtcttactgcactgtgtgctgcgagggccgagagctgctgctttgcagcaacacgagctgctgccggtgtttctgtgtggagtgcctggaggtgctggtgggcacaggcacagcggccgaggccaagcttcaggagccctggagctgctacatgtgtctcccgcagcgctgtcatggcgtcctgcggcgccggaaggactggaacgtgcgcctgcaggccttcttcaccagtgacacggggcttgaatacgaagcccccaagctgtaccctgccattcccgcagcccgaaggcggcccattcgagtcctgtcattgtttgatggcatcgcgacaggctacctagtcctcaaagagttgggcataaaggtaggaaagtacgtcgcttctgaagtgtgtgaggagtccattgctgttggaaccgtgaagcacgaggggaatatcaaatacgtgaacgacgtgaggaacatcacaaagaaaaatattgaagaatggggcccatttgacttggtgattggcggaagcccatgcaacgatctctcaaatgtgaatccagccaggaaaggcctgtatgagggtacaggccgggtgttcttcgaattttaccacctgctgaagtactcacgccccaaggagggtgatgaccggccgttcttctggatgtttgagaatgttgtagccatgaaggttggcgacaagagggacatctcacggttcctggagtgtaatccagtgatgattgatgccatcaaagtttctgctgctcacagggcccgatacttttggggcaacctacccgggatgaacaggatctttggctttcctgtgcactacacagacgtgtcccaacatggggccgtggtgcccgccagaagctgctgggaaggtcctggagcgtgcctgtcatccgacacctcttcgcccctctgaaggactactttgcatgtgaatagttccagccaggccccaagcccactggggtgtgtggcagaccaggacccaggaggtgtgattcctgaaggcatccccaggccctgctcttcctcagctgtgtgggtcataccgtgtacctcattccctcttgctcagtgggggcagagccacctgactcttgtaggggtagcctgaggtgccgcctc

SEQ ID NO: 90097 - DNA, 2898 bp, Homo sapiens; identical to SEQ ID NO: 60840

SEQ ID NO: 90098 - DNA, 663 bp, Homo sapiens
cgccggacgtcccggaacgacccacgcgtccgggaagatggcgtaccagagcttgcggctggagtacctgcagatcccaccggtcagccgcgcctacaccactgcctgcgtcctcaccaccgccgccgtgcagttggaattgatcacaccttttcagttgtacttcaatcctgaattaatctttaaacactttcaaatatggagattaatcaccaacttcttattttttgggccagttggattcaattttttatttaacatgatttttctatatcgttactgtcgaatgctagaagaaggctctttccgaggtcggacagcagactttgtatttatgttcctttttggtggattcttaatgaccctttttggtctgtttgtgagcttagttttcttgggccaggcctttacaataatgctcgtctatgtgtggagccgaaggaacccctatgtccgcatgaacttcttcggccttctcaacttccaggccccctttctgccctgggtgctcatgggattttccttgttgttggggaactcaatcattgtggaccttttgggtattgcagttggacacatatattttttcttggaagatgtatttcccaatcaacctggtggaataagaattctgaaaacaccatctattttgaaagctatttt

SEQ ID NO: 90099 - DNA, 428 bp, Homo sapiens
tttcgtgccggggctgagccaggcttatttattgcagtttccttcacaagggtagttctgaggatatcacggtcccccttggtgaccaaggggatcctctaccagctgccgacaccccactggccagggggagtttggaatgagtttgggtcctggggaggagaggacgtgtttgatgccatcgggcctggcaccttcctggagcaagggccactctggtggctttggggatgtgtgaatgagtctggagcaggggtggctctggtggctttggggttgtgtgaatgagtctggagcagaggtggctctggcggctttggggatgtgtgaatgagtctggagtgggggccactctggtggctttggggatgtgtgactgagtccctttgtctctcatttccttaacagagggacattttccttccctg

SEQ ID NO: 90100 - DNA, 1316 bp, Homo sapiens; identical to SEQ ID NO: 75478

SEQ ID NO: 90101 - DNA, 4213 bp, Homo sapiens; identical to SEQ ID NO: 60888

SEQ ID NO: 90102 - DNA, 2346 bp, Homo sapiens
  misc_feature (1)...(2346): n = a,t,c or g
gcggccgcctgaggcgggcggtcggtatagagcgggcggcaggaggcaagcagcgaaaccttcccggccgccgctcccgtcccgacggcggcttccccaaggcggcaggactcggcgcgccatggacaggccggcggcggcggcggcggcgggctgcgagggcggcgggggcccgaacccggggccggcgggcggcaggaggcctcctcgggccgcggggggcgccaccgccggctcccggcagcccagcgtggagaccctggacagtcccacaggatcacatgttgaatggtgtaaacagcttatagctgctacaatttctagtcagatttcaggttcagtgacatcagaaaatgtgtccagagattacaaggctctaagggatggaaataagctggcacagatggaagaggctccacttttcccaggagaatcaattaaagccattgtgaaagatgtcatgtatatctgcccatttatgggagcagtgagtggaaccctgacagtgacggactttaagctgtacttcaaaaatgtcgagagggacccgcattttatccttgatgttccccttggagtgatcagcagagtggagaagattggagcacagagccatggagacaattcctgtggtatagagatagtgtgcaaggatatgaggaacttgcggcttgcttataaaacaggaagaacagagtaaactagggatatttgaaaacctcaacaaacatgcatttcctctttctaacggacaggcactatttgcattcagctataaagaaaaatttccaattaatggctggaaagtttatgatccagtatctgaatataagagacagggcttgccaaatgagagttggaaaatatctaaaataaacagtaattatgagttctgtgacacctaccctgccatcattgttgtgccaactagtgtaaaagatgatgacctttcaaaagtggcagtttttttagcaaaaggcagagtccctgtgttgtcatggattcatccggaaagtcaagcaacgattacccgttgcagccagccacttgtgggtcccaatgataagcgctgcaaagaggatgaaaaatacttgcaaacaataatggatgctaacgcacagtcacacaagcttatcatctttgatgctcgacaaaacagtgtcgctgataccaacaagacaaagggtggaggatatgaaagtgaaagtgcttacccaaatgcagaacttgtgttcttggagatccacaacattcatgtcatgcgagagtcactacgcaaattaaaagagattgtgtacccttcgatcgatgaggcgcggtggctctccaatgtggatgggacgcattggctggaatatataaggatgctgcttgctggggcagtaagaattgctgataaaatagaatctgggaaaacatctgtggtggtgcattgcagcgacggttgggaccgaacagcccagctcacatctctggctatgctaatgttggacagttactacaggaccattaaaggatttgaaactctcgtagaaaaggagtggataagctttggacacaggtttgcactgcgagtgggccatggtaatgacaaccatgcggatgctgaccgatctcccatatttctgcagtttgttgattgtgtttggcaaatgacaaggcagtttccttcagcattcgagtttaatgagctattcttgattacaattttggatcacctttatagctgtctttttgggacctttttgtgcaactgtgaacagcagcgattcaaagaggatgtatatacaaagacgatatctttatggtcgtatatcaatagccagctagacgagttttctaatcccttctttgtgaattatgaaaaccacgtgttatatcctgttgctagtctgagtcatttggaattgtgggtaaattattatgtacgatggaatccacggatgagacctcagatgcccattcaccagaatctcaaggagctgctggccgtcagggcggagctgcagaagcgtgtggagggtctacagcgggaggtggccacgcgcgccgtctcatcctcatctgagcggggctcctcgccctcccacttcgccacctccgttcacaccttggtctgatgggcgaggtcagcctgctgctccactgtctcccggtggctcaagaaagggacctggcgatcactgttatggctgtagcttgtgatcttgtcttttaggattaggcccagggaccatttgtgtggctaggtgacagctcccactgttggcaaccgttaccctcctgtcagcggtttcacaggggagccgtctgtnacggccaccctgtgaagcaacttctggcatt

SEQ ID NO: 90103 - DNA, 1012 bp, Homo sapiens
ggcggcattcgaggctcggcgctcaggaagcatggcactctggcgggcataccagcgggccctggccgctcacccgtggaaagtacaggtcctgacagctgggtccctgatgggcctgggtgacattatctcacagcagctggtggagaggcggggtctgcaggaacaccagagaggccggactctgaccatggtgtccctgggctgtggctttgtgggccctgtggtaggaggctggtacaaggttttggatcggttcatccctggcaccaccaaagtggatgcactgaagaagatgttgttggatcaggggggctttgccccgtgttttctaggctgctttctcccactggtaggggcacttaatggactgtcagcccaggacaactgggccaaactacagcgggtgagctgggcaggattatcctgatgcccttatcaccaactactatctatggcctgctgtgcagtttagccaacttctacctggtcccccttcattacaggttggccgttgtccaatgtgtgtctgttatctggaactcctacctgtcctggaaggcacatcgggctctaagcctgcctcactccatcgtttccaccttgcaagtgatgcagcttgacccctggaacgggtcagacaaccctcctcaaaagtgggcataccagtttcccacgggggttgggttgccggtcaggagcttaagaggactagcaccctgcaaatgcccctcttcactctaaaatgtacactgactgctttagagcccttgataatagtcttaattcccaccacatactaaggcactccataaatatctgttgaaccttcatgaccttatcaacttttacacccaatatcccagcaaatgccactcatccccactcttcatagacacatttgttactctaaccctgcctaggcttcttgtagctccagctctttagagactcccggaaccctttatatggtgcctcagtaaatatgttattaaatatgtaatccggaaac

SEQ ID NO: 90104 - DNA, 5860 bp, Homo sapiens
gtcgacgatttcgtctcacagacaacagccaagcacagaggaaatattagctggcagagataacgaagagaaaacactcggtgacagatgcaccatctgtcagtttctgaggagcagttttcaagaaagctgaaaatgaattgaagaagagaggggttttgtttgaaaggtacagcacagcctaaggacaattttaaacaaaaaattgaggcaaaagaagcatgtgactggctccgtgctgccgggttcccgcaatacgctcagttatatgaggattcacaatttcccatcaacattgtggctgtcaagaatgatcatgattttcttgaaaaggaccttgtagaacctctttgcagacgactaaatacgttgaacaagtgtgcctcaatgaaacttgatgtgaacttccaaaggaaaaagggtgacgactccgatgaggaagatctttgtatcagcaacaaatggactttccaaagaaccagtcgcaggtggtctcgtgtggacgacctctacacgctgctccctcgaggagacagaaatgggtcaccgggaggcacggggatgaggaacacgaccagcagtgagagcgtcctcacagacctgagcgagcctgaggtctgctccattcacagcgaaagcagtggaggcagcgacagtcgcagccagccgggccagtgctgtacagacaacccggtcatgctggatgccccactcgtcagcagcagcctcccacagccccccagagatgtcctcaaccaccccttccaccccaagaatgagaagcccacgagggctagggccaaatcatttttgaaacgcatggaaacactccgagggaagggagcccacgggaggcataaggggtctgggcggacaggtggcctggtgatcagtgggcccatgttgcagcaggagccagagtcctttaaggctatgcagtgcatccaaataccaaatggagatctccagaattcgccgccacctgcctgcagaaaagggctcccatgctctggcaagtcgagtggcgagagcagcccgtcggagcacagcagcagcggggtgagcacgccctgcctgaaggaacgcaagtgccacgaggccaacaagcgcgggggcatgtacttggaggacctagatgtgctggcggggacagcactgccggatgcaggggaccaaagccgtatgcatgagtttcactcccaagagaatttggtggtgcatattcccaaggatcacaaaccaggaacattccccaaggcactttctattgaaagcctctctcccacagatagtagcaatggggttaattggaggaccggtagcatctccctgggcagagagcaggtccctggtgccagggagccccggctcatggcgtcctgccacagagccagccgagtcagtatctatgacaatgtccctggctcccatctgtatgccagcacaggagatcttttggacttggagaaagatgaccttttccctcacttggatgacattctgcagcatgtcaatgggctccaagaggtagtcgatgactggtccaaagatgtcttgcctgaactgcaaactcatgatacattggttggggaacctggcttatccacctttccatctcctaatcagatcaccttagattttgaaggtaactctgtctcagaaggtcggacgacacccagtgatgtggaaagagatgtaacatctcttaatgaatctgagcctcctggggtcagagacaggagggattctggtgtaggggcctctctgaccaggccaaacaggcgactccgatggaacagtttccagctgtcgcaccagccccggccggccccagcatcgccccacatcagcagccagacggccagccagctgagcctgctccagcgcttctcactgctccgcctcacggccatcatggagaagcactccatgtccaacaagcacggctggacatggtcagttccaaagttcatgaagaggatgaaagttcccgactacaaagacaaggctgtctttggcgttcctctcatagtccacgtccaaagaacgggacagcccctgcctcaaagtattcagcaagcactgagatatctacgcagcaactgcctcgatcaggtgggtctttttcgcaaatcaggagtgaagtctcgaatccatgcccttcgccaaatgaatgaaaacttccctgagaacgtcaactatgaagaccagtctgcttatgatgtggcggatatggtgaaacagttcttccgggacctccctgagcctcttttcaccaacaagctcagtgagacctttctccatatctatcagtatgtctccaaagagcagcggctgcaggccgtgcaggctgccatcctgctactggccgatgagaacagggaggtcctgcagacgctcttgtgtttcctgaacgacgtcgtcaacttggtggaagagaatcagatgacgcccatgaacctggcagtgtgtctggccccctccctctttcatcttaatttattgaagaaagaaagctctccacgagtcatacagaagaaatatgccactgggaagccagatcaaaaggacctcaacgagaatctggcagcagctcaggggctagcgcacatgatcatggaatgcgacagactttttgaggttccacacgagttggtggcccagtctcgtaactcgtatgtggaggctgagatccacgtgccaaccctggaagaattggggacacagctggaggagagtggggcaactttccacacttacctgaaccatctcatccagggcctccagaaagaagccaaggagaagttcaaaggatgggtcacgtgctccagcacggacaatacagatcttgctttcaaaaaggtgggcgacgggaacccgctgaagctgtggaaggcttctgtggaggtggaagcacccccctcagtggtcctgaaccgcgtgctgagagagcgccacctgtgggacgaggactttgtgcagtggaaggttgtggaaactctagacaggcaaacagagatctaccagtatgtgctgaacagcatggctccccatccttccagagactttgtggttctcaggacctggaaaactgatttgcccaaaggaatgtgtaccctggtgtccctctccgtggagcatgaggaagcccagcttcctgggtggtgtgcgagcagtggtgattggactcgcagtacttgatagaaaccgtgtggctcttggcaagtcaagactgactcacatctgcaggattagacctgaaaggtcactccccagaatggtacagcaaaggctttggacatctgtgtgcagcagaagttgccaggattagaaactctttccagcccctcattgctgagggcccagaaactaaaatctgagttttgcccagtgtgacatcaaactcagggaagaggaagctaaagtgacgagtgtggcagagagtgtgcatgtgagaaagcgagagaaagaggaactgaaggacgcggttaatgcctaaaaatggaaacgttaagaagttggaatgttggagatgcaagaatttccaagaactttcttagccttcctggagatggctacatccctactaatataattttaaaatgagaactttatatatattacttaaaattaaatggactattccttgtgcattgcctaatttgctatttaaaggcttctaagaagcgtatacctaactgtaaataaatgtatgtatagcatatgtacatatgtgtgtatatctccatctttactgtatatatgtaaaataccaattttatatagaattgtgtgttttgaaaatgacggtgtctgactcagtgagtcccttcctcacacagttctttccaagtggctctgggccccatctctccactgtcctgtaagctgtgcagaacctgctgctaacaccaaggtgtgaacatgccctgatgcctaaccaaagatgagttaaccaaaggaaaataacattaaaggagacttatgtgttaacgctttgtttctgctattcaaaaactgagagtggagatctgggataaagcaaggaaataataattactcctccttaaagcaaatgggggggtgagaagtcattaccaaatttaaagctagatgaggagttgccactgggcccagtaagatggaatttcagtgagatatggaccaccggagtcagcgagagtgactgaaacagaagcgatacctctcgctcccatgcccatcactacagaccccaagtcaagatgaatatcatagcctttacttcttcacagccaaagggagcccctgtgttgtctcaagtttttataaatacatttcataatgttattaaatgtcattctatttgaccagtggcctatttggtcacagttaattggtgttttcttattgcactgaattcaactccagacaccatacaaagggagatgatggccattccgttcaaatcctagatcgttacagcttcagggaattcatattttgttatgtgtaggatactcttaaaatgtaattcattaaacttttacaatctgaaagacagggtttttaactaacatgagaccaaaactatgttctttgattagttttagatagtataatcgggtttattaattcttctgtgtttcttcactagccagtccaagctacctatgcatttgacccaaccttatttattattgtacagatgaagcgaattgactccctttagccaactgctaatgggatcggaatgtggctttttattgtaattcaacagctatagagagaaagataacttattgtgtgtttgatttcagggagagagattttctttggtcatccataatagagattgataagatttagcaactggtgttggagaaaaaaagaaaagcaaatgagtgttttcaggtttttttgcattatatgcatttatgtaatgtttctgttatcagcaatgtgcaattattttattgagaggaataaaaaagctttctatgagtttggtatggggcgaggaaaatcttacagtttgaattatgacctaaaaatttttcattcccatgtctacctaagaaggaagcagtaaatccataatttaccttttgggcaatgctttgtgagcaaaacaaagtcacttctgccataacatcttgaatttaaccatatatgccagattactttatatgcatcaacaagatcaccagtgaagtttaatctagctaaacactggtcctgctcctgagatgggatcctatgtgtttggaaaacgtgataggcacacgaggatgagtggctttgtatcgcccagagaggtgcttgtccagatttcacatgcacatgaattgcctggggatcttgtgaaactgcagactctgctccaagtaatctgggctgggcctgagattctgcatttctaaggagtctcagggatgcctatgctgctggcctaaaaccacactcagaaacgaggacctagaagatccctaaaacagaataagaacaaatgtgattgtatttctgattctccctctctttcgaattatctggacttttttgtttttgtggcacatagtaattcatattcaccgctggcattaacaacacagtggcatcttttttaaaacaagggaaaaggggaaaaaagggaggaaaaaacggtggcttcaagcttgttttgtccaattaccacagtattttattccattgttatcttgccaatggaaataaagtatgatattgcatttaaatattatatttatacctcatgtatatttttacctcaattgttgatatcaatcatcaattgtaaataaataatgtccaaggcaaataaatttatatatattaaatatttcctattttctataaaataaaa

SEQ ID NO: 90105 - DNA, 2451 bp, Homo sapiens
ggctccagcatcaagatccgtctgacagtgttatgtgccaagaaccttgcaaagaaagacttcttcaggctccctgaccccttttgcaaagattgtcgtggatgggtctgggcagtgccactcaaccgacactgtgaaaaacacattggacccaaagtggaaccagcactatgatctatatgttgggaaaacggattcgataaccattagcgtgtggaaccataagaaaattcacaagaaacagggagctggcttcctgggctgtgtgcggctgctctccaatgccatcagcagattaaaagataccggataccagcgtttggatctatgcaaactaaacccctcagatactgatgcagttcgtggccagatagtggtcagtttacagacacgagacagaataggaaccggcggctcggtggtggactgcagaggactgttagaaaatgaaggaacggtgtatgaagactccgggcctgggaggccgctcagctgcttcatggaggaaccagccccttacacagatagcaccggtgctgctgctggaggagggaattgcaggttcgtggagtccccaagtcaagatcaaagacttcaggcacagcggcttcgaaaccctgatgtgcgaggttcactacagacgccccagaaccgaccacacggccaccagtccccggaactgcccgaaggctacgaacaaagaacaacagtccagggccaagtttactttttgcatacacagactggagttagcacgtggcacgaccccaggataccaagagaccttaacagtgtgaactgtgatgaacttggaccactgccgccaggctgggaagtcagaagtacagtttctgggaggatatattttgtagatcataataaccgaacaacccagtttacagacccaaggttacaccacatcatgaatcaccagtgccaactcaaggagcccagccagccgctgccactgcccagtgagggctctctggaggacgaggagcttcctgcccagagatacgaaagagatctagtccagaagctgaaagtcctcagacacgaactgtcgcttcagcagccccaagctggtcattgccgcatcgaagtgtccagagaagaaatctttgaggagtcttaccgccagataatgaagatgcgaccgaaagacttgaaaaaacggctgatggtgaaattccgtggggaagaaggtttggattacggtggtgtggccagggagtggctttacttgctgtgccatgaaatgctgaatccttattacgggctcttccagtattctacggacaatatttacatgttgcaaataaatccggattcttcaatcaaccccgaccacttgtcttatttccactttgtggggcggatcatggggctggctgtgttccatggacactacatcaacgggggcttcacagtgcccttctacaagcagctgctggggaagcccatccagctctcagatctggaatctgtggacccagagctgcataagagcttggtgtggatcctagagaacgacatcacgcctgtactggaccacaccttctgcgtggaacacaacgccttcgggcggatcctgcagcatgaactgaaacccaatgggcagaaatgtgccagtcacagaggagaataagaaagaatacgtccggttgtatgtaaactggaggtttatgagaggaatcgaagcccagttcttagctctgcagaaggggttcaatgagctcatccctcaacatctgctgaagccttttgaccagaaggaactggagctgatcataggcggcctggataaaatagacttgaacgactggaagtcgaacacgcggctgaagcactgtgtggccgacagcaacatcgtgcggtggttctggcaagcggtggagacgttcgatgaagaaaggagggccaggctcctgcagtttgtgactgggtccacgcgagtcccgctccaaggcttcaaggctttgcaaggttctacagggcgcggcagggccccggctgttcaccatccacctgatagacgcgaacacagacaaccttcggaaggcccatacctgctttaaccggatcgacattccaccatatgagtcctatgagaagctctacgagaagctgctgacagccgtggaggagacctgcgggtttgctgtggagtgaaaagcaaccaaaggcaacagagtctagctcatggccaccagaccaaaagcatccagcttctgtgcacctcctgcaaagctggcagaggccctggaattccagatcacctgaggggaaagggttgtctctctcctttctgttgggggagggggatgggggacttttgttggtggctcccacccatatatccctcctttaccatagtactcccacccacttccatcacccatccaataaaatgcagccaggtttagcctttggctttggtcacacaggaaa

SEQ ID NO: 90106 - DNA, 1150 bp, Homo sapiens
tttttttacgtgtgttccatgggtttactgaggctctgtggggagcagggtcggagggagccgacgggctcagtttggcatccaggatcttctgcacccaaggtatgagcttggcgaccacgggcgtacacagcgggcgctggtggtagagcaggtgcggctgccccaggacacaatgcccaccagggtccaggctccgtccttctggcagaccagggggcctccagagtcacccatgcaggatggagacgccactggccccggcacagatcatcaccgtcggtgatcctccctgccccaagacttctttgcaattcggccatttggacaaggagggggcagggctgccctgctgcaggcttgctcaaggggtctttgttggcgtttgtactttggtctttgcccccagccttgtggtggcacaacagttttccccgcggggagaagtccgtcgtcggcgactgggcagagcacacggcgtgagagctgtctgggaagaagccgggaaggtgttggccagccttcgcaggggtgatgtccattgttcagcgtccggattctgaaacttggggttctttaaagaccttggcgatcttcaggacctggatgttctcctcgtcagagccctggtttaaactccccagcccacgaccacgtcggaggtcctgacccccgcagtgggcagcggtgaccacccagtcctacgctgatgagggagcccccgcagaagtggaagccggttttgtcctgcagggacacctgccagggccaggagccggggacggcgtcctccccattcacgatcctggacaggccgctgaggacagggtggatggcggggaccccgcagcctgggggggagtggggtgaataagggctgaggccccaaacccacctgggcctcacctgcctgcgtgcagctctcccggttctaccccagtccactgaagccagctcaggacctccctggcacatgccgcctccgcctccctggtccccaagtctctaggctcaaacgttcccaactctcggcctgctggctccagtcatccttccaggatgcagagcgtcatgtctcctcctacctggggcctgtccagcctgaagaagcagaaaacaggccgggctgtaagactgcctgggctcagcc

SEQ ID NO: 90107 - DNA, 2031 bp, Homo sapiens
ctggctattagtgtttatttatttgatggagtttcgctcttgttgccagggctggagtgcaatggcgtgatcttggctcactgcaacctccgcctcccgggttcaagcaattctcctgcctcagcctcccaagtagctgggattacaggtgtctgccaccatgccaggctaatttttgtattttcagtagagacggggtttctccatgctggccaggctggtctcgaactcctgacctcaggtgatccacccgcctcagcctcccaaagtgctgggattacaggcaaaagccaacacacccggcctggatatgaatttataataccctacagtgcagcacaagaagatgcactcaaagcactgatgtgaggaagtacttgccccgtagcagctattcactctaccagtgtaaacaaactctaagctagggcaagacagcacagacacaagtatatactaaccaggggtttaatataaatacaaccagcatagaaagacccaaaactatacagaaaccaaaaccagaatgccatgtggtggaggcaaagggcagaatttctgacccctttggctcagctgcccttccccacaaataaaaaccaacaaagaggacaaatcaggacaataaagaagattcatgctaagctgtggcagaggggggaaggtatgatcgggtgggggtgggacaaggaacggccatggaagatcactgggtcaggttggaccctgggctgggagcgggagggcaaggcccctcaccacaacttaacccaaacctaagctgcccccaggtgccataggtccctgtcccagcagggaggctgatgggcctgggcccatgcccctccccacctttgggggtcagaaagtggccacccaggcctgctgggatggggcctgacacaggctctgcatgcccattcagggtgcctgtggagaaagaatggagtcactgtttaaccatggtacctgcctcagccccagcagaccacaggaggttggccccagactcactgagtgcctgcagcagccgtacagacacagcatccttggccacctcatgcccatcccggccatctagggtcagcacaacccagatgaggccgctgaagggcaccggatgcccaggaatcaccacctggtaccagaagcggtgccagccagcaggtcctatgcccaaacacttggtgaggaacacagggctgcccagcttcattcgttggcacagcaactgcagggtagcccgagccccttggaaccctaacttgtcccttgccaaagccaactggctgccctctggctgtggggaccgcaagaagggacccacaagctgctggcgaagtcgctgcttcaggtctggcttgagccactccacagccacctgctctccacagaggtgtgactgccctgtaggaaaaatgcaaagacaagggcaggtctaaaccctgggcccaagcctccaggtggtgagccctttggagctacacagtcctgttatttgtagccttcccatttcctggtagtgtgaccatgggtaagaaaagacaatgaagccttcaccctccattatttgcaaagggagtataacacactgctaccttacaagtttcccttggagaagtactggttaattgccaggcctttgtcctgccctccataacccatccataatggcctaatcctttacctgggaaaaacttgcctgtaagtcagtccagtgtgcctaagtaccgtacaccccattatgttacttaaattctcataacagtcctgaggaaacagattcctatagtagtaaaaaggctcagttggattccccttgagcaaatcaatttctctaacagtttcctcatagccttgagggtccctgtgccctattttgcggtgtgggggtgggggaaggttgagaattaagtccaggaggtaatgctcgggaagtgtcacaaatttaggtaagcggtggtggtagcaccattggaagttttaaaaatctgaggtgcaaatagtaaaaggttgcaaattcaaaaaaaa

SEQ ID NO: 90108 - DNA, 6867 bp, Homo sapiens
ggatcttgtacatcaacccggcagacttgggatggaaccctccagtgagcagctggattgagaagagggaaatccagacagagagagccaacttaaccattttgttcgacaagtatcttccaacctgcctagacacactcagaaccaggtttaagaagatcattcccatcccagagcagagcatggttcagatggtgtgtcaccttctggaatgtctcctgaccacggaggacatccctgcagactgccctaaggaaatttatgagcattattttgtgtttgctgccatctgggctttcggcggagcaatggtccaagatcagcttgtggactaccgggcagagttcagcaaatggtggctgactgagttcaaaacagtcaagtttccttcccaaggaaccatctttgactattacatcgacccagagaccaagaaattcgagccttggtccaagctcgtcccccagttcgaatttgaccccgagatgcccttgcaggcgtgtttggtgcacacgagtgagaccatccgtgtgtgctacttcatggagcggttgatggcgcggcagcggcctgtcatgctggtgggcacggctggcactggcaagtcggtgctggtgggagctaagctggccagccttgaccccgaggcatacctggtgaaaaacgtgccattcaactactacaccacgtcagcaatgctgcaggctgtcctggagaagcctctggaaaagaaggctggcagaaactatggccctccagggaacaagaaactcatctatttcattgatgacatgaacatgcctgaggtggatgcctacgggacggtgcagccccacaccatcatccggcagcatctggactatggccactggtatgatcggagcaagctgtccctaaaggagatcacaaatgtacagtatgtttcctgtatgaaccccacggcaggcagcttcaccatcaacccccggcttcagcgtcacttcagcgtgtttgtcctctccttcccgggggcagatgccctgtcctctatctacagcatcatcctcactcagcatctgaagctcggaaacttcccggcgtccctgcagaaatccatccccccactgatcgatctggccctcgccttccaccagaaaattgctaccaccttcctacccacaggaatcaaattccactacatcttcaacctcagagattttgccaacattttccagggcattctcttctcctcagtggaatgtgtgaaatccacatgggatcttataaggctctatctgcatgaatcaaatcgagtttatcgggataagatggtagaagaaaaggactttgatctttttgataaaatccagacagaagtgctcaagaaaacttttgatgatattgaagaccctgtggagcagacccaaagcccgaacctgtattgtcactttgcaaatggtattggggagcccaaatacatgcctgtacagtcttgggaacttttgacccagactctggtggaggccttggagaaccacaatgaagtcaacacagtgatggacctagttctctttgaggatgccatgcgccatgtctgccatatcaatcgcatcttggagtccccgcggggaaatgctctgctggttggtgtaggtgggagcggcaagcagagcctgacaaggctggcagctttcatcagctccatggatgtcttccagatcacactgcgcaaaggctaccagatccaggacttcaagatggacctggccagcctgtgtctgaaagctggagtgaagaatctcaacacagtgtttctcatgactgatgcccaagtggctgatgagaggttccttgtgctcatcaatgatcttttggcatctggggagatcccagatctctactctgatgatgaagttgaaaacatcataagcaatgtgaggaatgaagtcaagagccagggtctggttgacaacagagagaactgttggaagttctttatagatcggatccggcgacagctgaaggtgactctctgtttctcccctgtgggaaacaagctaagagtccgcagcaggaagttcccagccattgtgaactgcacagccatccactggttccacgagtggcctcagcaagcattggagtctgtcagcctccgcttcttgcagaacacagagggcattgagcccacagtaaagcagtcgattagcaaattcatggcctttgtccacacaagtgtcaaccaaacatcccagtcttatctgagcaatgaacagcgctacaactatacaactcccaagtcctttctggagttcatcagactctaccagagcttgttgcacaggcacagaaaagagctcaagtgcaagacagagcggttggagaacgggctgctgaagctgcatagcacctctgcccaggtggatgatctgaaagcaaagctggctgcccaggaagtagagctgaagcagaaaaatgaagatgcagacaaactgattcaggtcgtgggtgtggagactgacaaagtgagcagagagaaagccatggcagatgaagaggagcagaaggtggccgtcatcatgctagaggtgaaacagaagcagaaggactgtgaggaggacctggcaaaggctgagccagcactcacagcagcgcaggcagctctcaacaccctgaacaagaccaacctgacagagctgaagtcatttggctctccgcctctggccgtcagcaatgtcagcgctgcggtgatggtactgatggctcccaggggtagggtgcccaaggaccggagctggaaggctgctaaggtcaccatggccaaagtggatggcttcctggactcgctaataaacttcaacaaagagaacattcacgagaactgcctcaaagccatcaggccgtatctgcaagacccggagttcaatcctgagtttgtggccaccaaatcctatgcggctgcaggcctctgctcctgggtcatcaatattgtgagattttatgaggtgttctgtgatgtggaacccaagcgccaggcactgaacaaagccaccgcggacctcacagctgcccaggagaagctggctgccatcaaagccaagatcgctcaccttaatgaaaacctggcaaagctcacagccaggtttgagaaagcaacagcagacaaactcaaatgtcagcaagaagccgaagtgaccgcagtcaccatctcccttgccaaccgcctggttggaggactcgcttctgaaaacgtgaggtgggcagatgccgtgcagaacttcaaacagcaggaaaggacgttatgtggagacattttacttataacggctttcatttcctaccttggcttcttcacaaagaaataccggcagagcctcctggacagaacttggaggccctacctgagccagctgaaaactcccattccagtcaccccagccctggatcccctgaggatgctgatggatgatgctgacgtggctgcctggcagaacgagggcctcccagccgaccgcatgtccgtggagaatgccaccattctcatcaactgtgagcgctggccactcatggttgaccctcagctacaaggcatcaaatggatcaagaataaatatggtgaagatctccgggtcacgcagattggtcagaaaggctaccttcaaatcatagagcaggccctggaagctggagctgtggtgctgattgaaaatctagaggagtccattgatcctgttctgggacccctgcttgggagagaagtcattaaaaaaggacgattcattaaaattggagacaaagaatgtgaatacaatcccaagttccggctcatcctccacaccaagctggctaatcctcactaccagcctgagctgcaggctcaggccaccctgatcaacttcaccgtgaccagggatggcctggaggaccagttgctggccgctgtggtcagcatggagaggccagacttggagcagctgaagtccgatctcacaaagcagcagaatggattcaaaattaccctgaaaacgctggaagacagtcttctctctcgcctctcctccgcctctgggaacttcctgggagaaacagtgctggtggaaaacctagagatcaccaagcagactgctgccgaagttgagaaaaaggtccaggaggccaaggtgactgaagtgaaaatcaacgaggcccgagagcactaccggccagcagctgccagggcctcactgctctacttcatcatgaacgacctcagcaagatccatccaatgtaccagttttctctcaaggccttcagtatcgtcttccagaaggctgtggagagggctgctcctgacgaaagcctcagggagcgggtggccaacctaatagacagcataaccttctctgtgtaccagtacaccatccgcgggctctttgagtgtgataagctgacctaccttgcccagctcacctttcagattctcctcatgaaccgagaagtcaatgcagtggagttggatttcctgcttcgatctccagtgcagacgggcaccgccagccccgtggagttcctctcccatcaggcgtggggagctgtcaaggtactttcatcaatggaagaattctctaatctggatcgggacatagagggatctgctaagagctggaaaaagtttgtggagtccgaatgtcctgagaaagagaagctcccacaggagtggaagaacaagacagccctgcagcgcctctgcatgctgagagccatgcggcccgaccggatgacctatgctttgcgagattttgttgaagagaagttaggaagcaaatacgtggtgggaagagccctagattttgcaacctcatttgaagaatcgggaccagccactcctatgtttttcatcctgtctccaggggtggacccactgaaggatgtagaaagtcaaggaagaaaacttggatacaccttcaacaatcagaactttcacaacgtgtctttggggcaaggacaggaagtggtggctgaggctgcgctggacctcgctgccaagaaaggtcactgggttattttgcagaacactctggagatgtgttctcgggagacggagtttaagagcatcctctttgctctttgttacttccatgcggtggtggcagaaagacgaaaatttgggccccagggatggaatcgctcatacccctttaacactggagacctcactatctctgtgaatgtcctctacaacttcctggaggccaacgcaaaggtcccctatgatgatttgcgctacctgtttggagagatcatgtatggaggccatatcacagatgactgggacagaagactctgcagaacctacctgggggaattcattcgaccagaaatgttagaaggagaactgtctttggccccagggttcccactcccaggcaacatggactacaatggttatcatcagtacatcgatgctgagctgcccccagaatccccctacctctatggcctccacccgaacgcagagattggcttcctgacccaaacctcagaaaagctcttccgcactgtgctggagctgcagcctcgggacagccaggccagagacggagcgggcgccacaagagaagaaaaggtcaaggcacttctggaagaaatattggagcgggtgacagacgagtttaacatcccagaactgatggccaaagtggaggagcgcaccccttacattgtagttgccttccaggagtgtggccggatgaatatcctcaccagagagattcagcgctcactgagggagctggagctcggcttaaagggggagctgactatgaccagccacatggagaacttacagaatgccctgtacttcgatatggtgccagagtcctgggctagacgagcctacccttccacagcaggcctggcagcctggtttccagacctcctcaacagaatcaaggagctagaggcttggacgggtgactttacaatgccctccactgtgtggctgacaggcttcttcaacccccagtcgttcctgactgccatcatgcagtccacggctcgcaagaatgagtggccactggaccagatggccctgcaatgtgacatgacgaagaagaacagagaagagtttaggagtcctcctcgggaaggggcctacatccatggcctcttcatggaaggtgcctgctgggacacacaggctgggatcattacagaggcaaagctgaaggatctgacaccccctatgcctgtgatgttcatcaaggccattcctgcagattaggcaggactgcggccatgtctattcctgtcctgttaccaagactagtcagccgggaccccacctacgtgtggactttcaacctgaagactaaggaaaacccatccaagtgggttctggctggagtagccttgcttctccagatttagcatcctgcagagccaccgagaaaataaaaaagctgggcttggaggctgcctagagggacaggtgggtgaagggtcaccacagacacttagaacggtaagaaaccatgagcactcacaattctgtagaattcctctagggaacttggagaggtgtgcctaaggtgaggctgagctgaaggaatgtgggcccaggtttcttaataaaatgatttactcttcaactgtgtctggcccaggatttgagagctgctgaatcataaatgatcatgtagagaccaagagaaacaaaccacaagggccctgaccttgttacacaacactatcctaggtgctcttcttccaggctaccccacgcagtccttggaccagtggtattggcatcacccatgaaccagaatctccattttaacaatctctctggaaaatctgtatgcacattatagtttgagaaacactaccctggagcaggggtcaccaac

SEQ ID NO: 90109 - DNA, 4402 bp, Homo sapiens
tgaattcaacccagggcttcccaatgctcacaaaatatggtggccaactgggagtgtgtgtacattaaggaggtggtaataatagaattgctaagccttacatggtttaaccttcacactttaggcaccccccaaaaaatggtgcctaatttattgcagaaaataataacttgtttatgttaaatgttagcttttagaagacttaacaaaggatgaatgcttctgttaaggcaccaaacaggagggagattttgctacaccttttattattttaaatatagatcaatgaattacactcaaaactacaagcaacaattagtataaataatactttaatcagtggcagcaaaacattggtcaattctattaaaaaagcatctcgtgtgaacagacatcatgggctgactgacagtgtcatctcccaacaaaaggctgcgatggacaaagtgagatgggagtcagaggagcaatgtcctcagcaaacacttcactctccccctcccccagtcaggaccccaacacggtttttgtttttgtttttaaaacaccaacacaaacacttctggctcatatttaaaggaacaaactggaaacaaataatagcaaatgggcattggagcttttccacacctagctttctccaaagcacgttctcagatggaaacccatttccttccctgccctaagtggttacggggccctaccccttccctggcccactcctgtgggcccaaatggatgctggggtccgactgggacctcagggttgggggctgcactctgggccatccaggctccattaacatttcaaaagaatccctcctagctgagaaggagagctgagacttataaacaaagaagttgtttctctgattaagttactttccaaagtagtggggctatgtttgagaaggagctttggttttcctcatgaaaacatgtttcttggctttcctctggggcagggatgcagtcagttaagcctgtgtggcatttggtatgaaactgggggtgagtaacctgaacttctgaggtgggggaaaatctatacaacaaatctctattatatatatgtaattggatgttgtgaaaatatatacctttttccccttctcaaagagaaggttcaatgtatagacagatttgggttttaggaaagcagcttagcaactttccaacttgcctaaggatagcggctcctttcaaatggtacatccaaagactgctctccatgttagagaggaaaaaagaagagaagggtagttagagtccaaaaggttaggggtttagaggtcagtcctcccggctgaaatacagctaatcaaatagaaaatttgtcctctggatgaacctgattctgtaatttacccgaacttcggtaaaataccttttcagcttctcaacgtgagggcgtcagaaaaaagacgtcttgactatgtatgaactctgtgctttttgtcatagaaacaatgatgtgaataatgcacgaatatccatctttaatatcccgacgtggtgacattcaagtattgccatgtgcaagtctgagagccaggctcaccccaaggagaaacaaagagcagtccccagggtctaatacaaaagaccaaggcttggaagacacttcagagaagcggaatttcagcctagggactgcagtgaatacctgccctcagctctcaggagacacagccaaagaacaagcctacagagaaactcttttttccctcccacttaaatatattttttaaattacaacagaaaccttctaaagtgtttttgaagtactgaaaaaaataccccccttctggatcttaaaattaaattttaagcttatcctttctccctttcccactttggtcactttttgatagctacaaccttttttggagcctgaggccttgggaagactggtttcatctgagtatatgaactctggccattaactttgacttcttcctccttatgcttgagggtcagcattttagaaaaatgaactttgaacccttcccaggagaggcagaagaaaaacgactagaggacatctcccctgttgagagtgattctttaaaaaaccactattctcaaggcaaagacgagtgcttgaaaacttttatacttttacaaattctgcttctaattaatgagctgaggaaaacttccttagatttggtttttaaaaaaattaaaacttcagggggaaaaaaactctaaggctaacttttgtggacttctagattcaattagggttttttttttttccttcttaaagcaagagttcctcaccttcccactttctccccactgcacagcccctcccctacacgggccatacactaattcctgtaaaacactgctatatgagggtatttagggcatttggaatccagttggaacagaaaattcagtcattatctaatgacccagtgcatagaggttttgttttctttccccagaaggaaaatgttggaccatttgttggtttttttccctttcctttaatcacccagaactggttgtaagcacagtgctgaaaaaaacacatgtggaaatatattttcaagaatgcaactttgagtgaatcctttgcttccttctggaagggttaaggcccccctatatacatttccagagagtggggaggggtggagttcagaagtaagtgcacatatctctgattctgctccctgaagttcagcccctttcacctttttaagatttttggcatgaaggtgtcagttatttctgtaccacatttcccaacaaataaatatttaagcaaatatctaaacataaaataacccatttttacttccttcttagacccatttctttggaggtggggccactgggagcaaaatatatattttttaatcacatgaaattccatagacaacccagaaagtccagaaatcctgacccagctctctggcttccactgaaagcacctagcacaggggtggccaaccttctgcctcaactcccccacattattaagccacaaagcaccctggaggggtggagtgggggagaatgtccaaattcacagtgggataaagcatccaaccttcatttgcaaattcaaaatccaagagcggtgattttcataagtttaatgactcgccaagattttatgttctcagtagctcctgccatataatatacttagagagagaatcccgccccccctcccatccccatcccgctctagggagggggctgccctcgggcaggatgctaacctagtccgagggcggcctgcttgtcccaggtccaccccacagtaccttagagcccagcgaggtgacagcaggcccggcctgcccccgcagcttcggctcagcctggtgcgcagggaagagatgggcccagggtccccacttctataaggtcgtcaggtccgtgtggggggtctttggccatcggctgtaaatgctggctgggggcgactgaggaggagcaagatgaggaggaagatgaggacgatgacctgccctttagtgttgggcagcttatgatcatttttccacttcactctccggttctggaaccagatcttgatctggcgctccgacagacacagggtgtgagcgatttcaatccgacggcgccttgtcagatacctgttaaaatgaaattctttttccagttctaggacttgctgccgggtgtaggccgttcgggaccgcttgggttccccaccggtgtagttggggttcaccgaattcacgtgcaccttcttcatccaggggtagaccacggccggctgcttgagtgccgtcccggagggcggctgcttggggtcggactgactgtaggcccgggcgccaggcaggggcgccggcggaggcgccgggggagctgggcaaggctctcctggagcggcgtagtgaccgccggggccgcctggctcttgtccgtgaccccgcgcaggcagcgccgagccaggcccggggccgctgcctccgaaaggctgctcaccgaagtcgggccgtgggtagagccccgggggctggaagtctgcgccctgcgcgccgccgccgtagtagtcggcgccctgctcgcctaggtagccgccctgcaaatactcctcgcacggagggaacttggggtccacatacttggagttcaccatatacgaactcatgaccattaatttcagaaggtagaaaatactaatttttctcgtgttgtctttttttctccttccatagggccctcctacttgctgtcaactgaataaagttgggcagccatgtgaccaggccagccaatggcgagggagcaagtttatcaccgggttggtgagcatctcataattttcacaaatttaactaaataacatacgtgtaatcaagtagcttgctatggcacatttgagagcccctgccagatattaatg

SEQ ID NO: 90110 - DNA, 2145 bp, Homo sapiens
gtcgcaggccttggcccttgccagacattagcaccatgagctgtggtggcatacgaggagctgatcaaggagggtgacacggccatcctgtcactgggccatggtgcaatggaggcagtgcgtgtgcagcgtggggcacagacccagacccggcatggtgtcctgcggcactcagttgaccttatcggccgccccttcggctccaaggtgacgtgcggccgaggtggctgggtgtatgtgctgcaccccacgcccgagctctggacgctgaacctgccgcaccgcacgcagatcctctactccacagacatcgccctcatcaccatgatgttggaagcttcggcccggctctgtggtctgtgagtctggcaccggcagtggctctgtgtcccacgccatcatccgcaccattgcacccacgggtcacctgcacacggtggagttccaccagcagcgggcagagaaggcccgggaggagttccaggagcaccgtgtgggccgctgggtgactgtgcgcacccaggacgtgtgccgcagtggctttggcgtgagccacgtggccgacgccgtcttcctggacatcccatcaccctgggaggccgtgggccacgcctgggacgccctcaaggtcgaaggcgggcgcttctgctccttctcaccgtgcatcgagcaggtgcaacgcacatgccaggcgctggcagcgcgcggcttctcagagctgagcaccctggaggtgctgccacaggtctacaacgtgcgcactgtcagcctgccaccgcccgacctgggcacaggcacagatggccctgccggctccgacaccagccccttccgcagcggcacgcccatgaaggaggccgtgggccacaccggctacctgaccttcgccaccaagaccccaggctagggggccgcctcccagggcaccagggagctgggagcactgaagggctgggcagggaggccagaggcaccttatatggtcagcgatgcctgccagacacagacggtggggtggggcttgggggcctcctgggtggccagagtgggacagcaggaagggcggctgtgatggaggagcagtgctggggctgggcctcagccattcctgtccagccctgtggcccatcccagctgctgtttgttgccaatatgaagtatccactgccacaggctcccctgggtgttgaagccaaagggtgcaggtgggggagtctgaccccctcccaggtgggcctaagcaggaagggggtggaggagggaggggggcattgaccctgagaccacgctgcgtctgacccctgggcccccacggccctggctgccccacggggcctgagaccatctcgtgcttctccagtccccgggccgaggctccagccttggccagaagctggggtgagctgacccagaatccctgccctgctctccccagcgctaggagaccaggccagcccaggaaccagggaggtgaccctgctctctggcctcctggctgatgtcacagcactgagctcagcccaggccttcgtccactcatgtccaagaggcggggcatcccccacccagccagagcccctgacatgggctgcactcgctgaggccaggcagcgctgcggagaggagcggcagagtgggttgtctgccgcaggcaaccaggcaagtgtgtcggggctggggtgtgaatgccagcctgtgagtcccggaactatgtgggtacccctacccctcacagaagccaagggcatggaggaggtccctccacagtgacaacggtgtggggtaggggaggtgcattcaggacaccacccagggacagtgcctatgtgatcacctcttaaaggctaagcttaggggcatttcccaaagtggggacagagggcaggacgcccaggctgggggctctcctcgcccgccctggtgtctgacagcctcaaggaaggagcagtgcctgtgtcagccatggggcccttggagctgccactggtgcctagggggcctgggtttctgcccaggcagccagtggctgttgggagcctctgtttcccctgtgctgggggccttgagtgctatgctagcaggggcctggccccaagtgtgagtgatgagcaataaacgtaccgtccccctctaaaaaaaaaaaaa

SEQ ID NO: 90111 - DNA, 3932 bp, Homo sapiens
caggagtgatcgggcagcagtcggccggccagcggacggcagagcgggcggacgggtaggcccggcctgctcttcgcgaggaggaagaaggtggccactctcccggtccccagaacctccccagcccccgcagtccgcccagaccgtaaagggggacgctgaggagccgcggacgctctccccggtgccgccgccgctgccgccgccatggctgccatgatggatcggaagtgagcattagggttaacggctgccggcgccggctcttcaagtcccggctccccggccgcctccacccggggaagcgcagcgcggcgcagctgactgctgcctctcacggccctcgcgaccacaagccctcaggtccggcgcgttccctgcaagactgagcggcggggagtggctcccggccgccggccccggctgcgagaaagatggcggacctggccgagtgcaacatcaaagtgatgtgtcgcttcagacctctcaacgagtctgaagtgaaccgcggcgacaagtacatcgccaagtttcagggagaagacacggtcgtgatcgcgtccaagccttatgcatttgatcgggtgttccagtcaagcacatctcaagagcaagtgtataatgactgtgcaaagaagattgttaaagatgtacttgaaggatataatggaacaatatttgcatatggacaaacatcctctgggaagacacacacaatggagggtaaacttcatgatccagaaggcatgggaattattccaagaatagtgcaagatatttttaattatatttactccatggatgaaaatttggaatttcatattaaggtttcatattttgaaatatatttggataagataagggacctgttagatgtttcaaagaccaacctttcagttcatgaagacaaaaaccgagttccctatgtaaaggggtgcacagagcgttttgtatgtagtccagatgaagttatggataccatagatgaaggaaaatccaacagacatgtagcagttacaaatatgaatgaacatagctctaggagtcacagtatatttcttattaatgtcaaacaagagaacacacaaacggaacaaaagctgagtggaaaactttatctggttgatttagctggtagtgaaaaggttagtaaaactggagctgaaggtgctgtgctggatgaagctaaaaacatcaacaagtcactttctgctcttggaaatgttatttctgctttggctgagggtagtacatatgttccatatcgagatagtaaaatgacaagaatccttcaagattcattaggtggcaactgtagaaccactattgtaatttgctgctctccatcatcatacaatgagtctgaaacaaaatctacactcttatttggccaaagggccaaaacaattaagaacacagtttgtgtcaatgtggagttaactgcagaacagtggaaaaagaagtatgaaaaagaaaaagaaaaaaataagatcctgcggaacactattcagtggcttgaaaatgagctcaacagatggcgtaatggggagacggtgcctattgatgaacagtttgacaaagagaaagccaacttggaagctttcacagtggataaagatattactcttaccaatgataaaccagcaaccgcaattggagttataggaaattttactgatgctgaaagaagaaagtgtgaagaagaaattgctaaattatacaaacagcttgatgacaaggatgaagaaattaaccagcaaagtcaactggtagagaaactgaagacgcaaatgttggatcaggaggagcttttggcatctaccagaagggatcaagacaatatgcaagctgagctgaatcgccttcaagcagaaaatgatgcctctaaagaagaagtgaaagaagttttacaggccctagaagaacttgctgtcaattatgatcagaagtctcaggaagttgaagacaaaactaaggaatatgaattgcttagtgatgaattgaatcagaaatcggcaactttagcgagtatagatgctgagcttcagaaacttaaggaaatgaccaaccaccagaaaaaacgagcagctgagatgatggcatctttactaaaagaccttgcagaaataggaattgctgtgggaaataatgatgtaaagcagcctgagggaactggcatgatagatgaagagttcactgttgcaagactctacattagcaaaatgaagtcagaagtaaaaaccatggtgaaacgttgcaagcagttagaaagcacacaaactgagagcaacaaaaaaatggaagaaaatgaaaaggagttagcagcatgtcagcttcgtatctctcaacatgaagccaaaatcaagtcattgactgaataccttcaaaatgtggaacaaaagaaaagacagttggaggaatctgtcgatgccctcagtgaagaactagtccagcttcgagcacaagagaaagtccatgaaatggaaaaggagcacttaaataaggttcagactgcaaatgaagttaagcaagctgttgaacagcagatccagagccatagagaaactcatcaaaaacagatcagtagtttgagagatgaagtagaagcaaaagcaaaacttattactgatcttcaagaccaaaaccagaaaatgatgttagagcaggaacgtctaagagtagaacatgagaagttgaaagccacagatcaggaaaagagcagaaaactacatgaacttacggttatgcaagatagacgagaacaagcaagacaagacttgaagggtttggaagagacagtggcaaaagaacttcagactttacacaacctgcgcaaactctttgttcaggacctggctacaagagttaaaaagagtgctgagattgattctgcatgacaccggaggcagcgctgctcagaagcaaaaaatctcctttcttgaaaataatcttgaaccagctcactaaaagtgcacaaaccagttggtaccgtgataatgcagatctccgctgtgaacttcctaagttggaaaagcgacttcgagctacagctgagagagtgaaagctttggaatcagcactgaaagaagctaaagaaaatgcatctcgtgatcgcaaacgctatcagcaagaagtagatcgcataaaggaagcagtcaggtcaaagaatatggccagaagagggcattctgcacagattgctaaacctattcgtcccgggcaacatccagcagcttctccaactcacccaagtgcaattcgtggaggaggtgcatttgttcagaacagccagccagtggcagtgcgaggtggaggaggcaaacaagtgtaatcgtttatacatacccacaggtgttaaaaagtaatcgaagtacgaagaggacatggtatcaagcagtcattcaatgactataacctctactcccttgggattgtagaattataacttttaaaaaaaatgtataaattatacctggcctgtacagctgtttcctacctactcttcttgtaaactctgctgcttcccaacacaactagagtgcaattttggcatcttaggagggaaaaaggacagtttacaactgtggccctatttattacacagtttgtctatcgtgtcttaaatttagtctttactgtgccaagctaactgtaccttataggactgtactttttgtattttttgtgtatgtttattttttaatctcagtttaaattacctagctgctactgcttcttgtttttcttttcctattaaaacgtcttcctttttttttcttaagagaaaatgggaacatttaggttaaatgtctttaaattttaccacttaacaacactacatgcccataaaatatatccagtcagtactgtattttaaaatcccttgaaatgatgatatcagggttaaaattacttgtattgtttctgaagtt

SEQ ID NO: 90112 - DNA, 4777 bp, Homo sapiens
  misc_feature (1)...(4777): n = a,t,c or g
ttttttttttttggtaaggttgaatgcacttttggtttttggtcatgttcggttggtcaaagataaaaactaagtttgagagatgaatgcaaaggaaaaaaatattttccaaagtccatgtgaaattgtctcccattttttggcttttgagggggttcagtttgggttgcttgtctgtttccgggttggggggaaagttggttgggtgggagggagccaggttgggatggagggagtttacaggaagcagacagggccaacgtcgaagccgaattcctggtctggggcaccaacgtccaagggggccacatcgatgatgggcaggcgggaggtcttggtggttttgtattcaatcactgtcttgccccaggctccggtgtgactcgtgcagccatcgacagtgacgctgtaggtgaagcggctgttgccctcggcgcggatctcgatctcgttggagccctggaggagcagggccttcttgaggttgccagtctgctggtccatgtaggccacgctgttcttgcagtggtaggtgatgttctgggaggcctcggtggacatcaggcgcaggaaggtcagctggatggccacatcggcagggtcggagccctggccgccatactcgaactggaatccatcggtcatgctctcgccgaaccagacatgcctcttgtccttggggttcttgctgatgtaccagttcttctgggccacactgggctgagtggggtacacgcaggtctcaccagtctccatgttgcagaagactttgatggcatccaggttgcagccttggttggggtcaatccagtactctccactcttccagtcagagtggcacatcttgaggtcacggcaggtgcgggcggggttcttgcggctgccctctgggctccggatgttctcgatctgctggctcaggctcttgagggtggtgtccacctcgaggtcacggtcacgaaccacattggcatcatcagcccggtagtagcggccaccatcgtgagccttctcttgaggtggctggggcaggaagctgaagtcgaaaccagcgctgggaggaccagggggaccaggaggtccaggagggccggggggaccaacaggaccagcatcaccagtgcgaccgcgaggaccagggggcccaatggggccagggagaccgttgagtccatctttgccaggagcaccagcagaagccagggggacctcggggaccagcaggaccagaggctccagagggaccttgttcaccaggagatgccaggatgggcagggggaccctggaggccagagaagccacggtgaccctttatgcctctgtcgccctgttcgcctgtctcacccttgtcaccacgggggccttggggtccggcggggccacgggcgccaacagggccgacaggaccggcgggaccagcaggaccagtctcaccacgatcaccactcttgccagcagggccaacggggccaggggcaccaggagcaccaggagcaccagggggtccagcggggccggtctcaccacggtcacccttggcgccaggagaaccgtctcgtccaggggaaccttcggcaccaggagccccctcacgtccagattcacccagggggtccagccaatccaggggggcccatgggaaccagggggaccacgttcaccacttgctccagagggaccttgtttgcccaggttcaccagaggggccaggaagaccagggaagcctctctctcctctctgaccaggcaggccgaccacaccacgctgtccagccaataccttgaggcccgggagtaccaggagcaccagcaggaccatcagcaccaggggatcctttctcgccagcagggccagggggaccagggggaccaacttcaccaggacgtccagcagggccagtctcaccacggggacctttgccgccttctttgccagcaggaccaggagggccagggggtccagcatttccagaggggccaggaggaccgactcggccagcagcaccagggaaaccagtagcaccagggggaccagcgctgccggcgagcacctttggctccaggagcaccaacattaccaatggggccagggggtccagcgggtccggcagggccagggggaccagcatcgcctttagcaccagcatcaccaggttcgcctttagcaccaggttggccgtcagcaccaggggggccagcaaagccagcagggccggggggaccaggctcaccacggtctccgggggcaccacgagctccagtgggaccagcagggccgctgggaccactttcacccttgtcaccaggggcaccagcagggccaggaggaccaatggggccggtcagaccacggacgccatctttgccaggagagccatcagcacctttgggaccagcatcacctctgtcacccttaggccctggaagaccagctgcaccacgttcaccaggcattccctgaaggccaggggcgccctggctaccgggagctccaggggcaccagcatcacccttagcaccatcgttgccgggagcaccgttggcccctcggggaccagcaggaccagggggaccttgcacaccacgctcgccagggaaacctctctccgcctcttgctccagaggggccaggggcgcaaaggtctccaggaacaccctgttcaccaggtttgcctgcttcacctggaggaccagcaggaccagggagaccctggaatccgggggagccagcagggccttgttcacctctctcgccagcgggaccagcagggccagggggtccctgagctccagcctctccatctttgccagcaggaccgacagcgcccagggggtccgggaacaacctcgctctccagccttgccgggcttttccnagcagcacctttaggtccagggaatcccatcacaccagcctgaccacgggcaccaggtgggcctgggggtccggggcgaccatcttgaccgggcgggaaccaaggggggccagttttgccatcaggaccaagggctgccagggcttccagtcagacccttggcaccaggcagaccagcttcaccgggacgaccagcttcaccaggagatcctttggggccagcagggccaggagaaccacgttcaccagcgggacccttgggaccagcaacaccatctgcgccagggaaaccacggctaccaggtccaccacgctcgccagggggtccgggcaggccagtgggtccgggttcacctcgagctcctcgctttccttcctctccagcagggccagggggtccttgaacaccaacagggccaggctctcccttagcaccagtgtctcctttgctgccaggagcaccaggttcaccgctgttacccttgggaccaggagggccgccggggccctggggtccagaggggcctcgggcaccagggaagccaggagcaccagcaataccaggagcaccattggcacctttagcaccaggctctcccttagcaccagtgtctccagcagggccagcagcaccagcagggccaggggggccaggctcaccacgcacaccctggggaccttcagagcctcggggcccttggggaccagcttcacccttagcaccaacagcaccagggaagccaggaggaccagcggggccggtgggaccagggggcccggcagcaccagtagcaccatcatttccacgagcaccagcagggccaggggctccagggcgacctctctcaccaggcaggccacgggggcccatctgaccaggagctccattttcaccagggctgccaggctcacccttaggaccagcaggaccagcatctcccttggcaccatccaaaccactgaaacctctgtgtcccttcattccagggaggccagctgttccgggcaatcctcgagcaccctgaggcccaggaggcccacgctcaccaggacgaccaggttttccagcttccccatcatctccattctttccagggggacctgggggacctcggggacccatgggacctgaagctccaggctcgccaggctcaccagggggaccttggaagccttggggaccaggtgcaccaggggggccagggagaccacgaggaccagagggacccatggggccaggcacggaaattcctccggttgatttctcatcatagccataagacagcttggggagcaaaagtttccctccgaggccagggggtccgggaggtccggggggtccggggggtccgggaagtccaggctgtccagggatgccatctcggccaggggggcctgcgggtcccccttgggcctcgggggcccagtgtctcccttgggtccctcgacgcccggtggtttctttggtcggtgggtgactcttgagccgtcggggcagacgggacagcactcgccctcggggacttcggcgccggggcagttcttggtcttcgtcacagatcacgtcatcgcacaacaccttgccgttgtcgcagacgcagatacggcagggctcgggtttccacacgtctcggtcatggtacctgaggccgttctgtacgcaggtgattggtgggatgtcttcgtcttggccctcgacttggccttcctcttggccgtgcgtcaggagggcggtggccgcttaagaggagcaggagccggaggtccacaaagctgaacatgtctagaccctagacatgtagactctttgtggctggggagggggttagcgtccgctcatgcgtggcctcacactccgcgtgcctcctgctccgaccccgaggagaaactcccgtctgct

SEQ ID NO: 90113 - DNA, 2309 bp, Homo sapiens
gcttgaaatcgaattcgggattcgggggggacgcaccagggagggaggggtccaggcagctgggccgccgcggacacctagcggcttcagggtgaaccccgaccgcagccgtcgccgcctcgggcagagtttgcgcccttgctttgcgccccgctgcgaagccgggcgggcgatcggcgcgtgaaagcgccgcgcgggcgacctctgtcctagtctcctgctccccccgccccgcttgtcccgtgcccttgtgacccaggctttggcgccgtcgccaggccccgcaatgtagctgcccctgcgcctcggcggaggctcctgccccgcgagcgcccggggcccggagccggcctgggggctcagccgagctcgggcggggccggggcgcggtggcgatgcaccgggccgttagcgccaggagccaggcagctgaggcggggggcaagcctccctcggagagccgcgcccccggcccgcgtcccgccgcgatgctgttccacagtctgtcgggccccgaggtgcacggggtcatcgacgagatggaccgcagggccaagagcgaggctcccgccatcagctccgccatcgaccgcggcgacaccgagacgaccatgccgtccatcagcagtgaccgcgccgcgctgtgcgccggctgcgggggcaagatctcggaccgctactacctgctggcggtggacaagcagtggcacatgcgctgcctcaagtgctgcgagtgcaagctcaacctggagtcggagctcacctgtttcagcaaggacggtagcatctactgcaaggaagactactacaggcgcttctctgtgcagcgctgcgcccgctgccacctgggcatctcggcctcggagatggtgatgcgcgctcgggacttggtttatcacctcaactgcttcacgtgcaccacgtgtaacaagatgctgaccacgggcgaccacttcggcatgaaggacagcctggtctactgccgcttgcacttcgaggcgctgctgcagggcgagtaccccgcacacttcaaccatgccgacgtggcagcggcggccgctgcagccgcggcggccaagagcgcggggctgggcgcagcaggggccaaccctctgggtcttccctactacaatggcgtgggcactgtgcagaaggggcggccgaggaaacgtaagagcccgggccccggttgcggatctggcggcctacaacgctgcgctaagctgcaacgaaaacgacgcagagcacctggaccgtgaccagccataccccagcagccagaagaccaagcgcatgcgcacgtccttcaagcaccaccagcttcggaccatgaagtcttactttgccattaaccacaaccccgacgccaaggacttgaagcagctcgcgcaaaagacgggcctcaccaagcgggtcctccaggtctggttccagaacgcccgagccaagttcaggcgcaacctcttacggcaggaaaacacgggcgtggacaagtcgacagacgcgcgcgctgcagacagggacgccatcgggcccggccctcggagctctccaacgcctcgctcagcccctccagcacgcccaccaccctgacagacttgactagccccaccctgccaactgtgacgtccgtccttaacttctgtgccctggcaacctggagggccatgagcctcacagcccctcacaaacgactcttaccaaccttttctaatgactcgcaaccccctcaccccacaatttctttaaaaaagaaattatctttagttgaattccaagtgtattttaaaatagaggctttgagcaactaactaaccacattttaggatctcgcctggaaacagaggtaaaaaaaagaagtgtgcgcccggctaatgcagcggtgtggaccgaggaacaacttggaagatctacctgcaacacaacatttgtgtcactgtacagttttgtggactgagcgaggaaaaacaacaaataatttaagttggctagagcttctgtattttcaaagactgccacgtgccttaggaatactgttttatctccatactttggatgacttgttcatttttctctccctctttttctctgtatatttatgaccagagcaaaaatgtaaaaaacaaaaaaaacaacaaaaaaagtttgttactttgaatagtcctaaaaagaaaaaavagaraaaaaaaaaaggaaaaatcaaaccccctccaacggtcgctttgttgttttagaattttaaggtggaagtctgttcgaatatcagaatttgtaaaatctaaccagtaataaaaccacttattgaaact

SEQ ID NO: 90114 - DNA, 752 bp, Homo sapiens
agcccaggaagcagacacatttattacatgaggcacatatttattggggaaaacatgagagaagcccagagcagggggcatcatggagaggaatgaggcagaaactgtgcaccagcctctgtgaccctacttgtcagggtggaaccccagaagaagcccagacactttcctcactttgggaaatggatgggccttagctgtggccacgctggagcctgcagagaatgaggtctctctcacacccacctgggagagcatcggggtgggatatagaagaagccaaggtggtatgtgtggggaagggtacgatgggaagaaatccttacaatgcttccttacatcttgggcaggaggagatgtgagaggagggtaggctcaagagctggagggaagaggagaaggaagaagagaaagttccatctggtagccaggatggtggatgatggtaatatccagtccatccttacttctgtttactcttggaggcttgctgggctgagggacacttctgctgggctggaatgatggtgcctttcggtgggcattgcttcttgacctggggagcacatggatccttggttttgggtgcacatgtctcttgacatttaacagggggtggctgacaaggctgcttcacttgctgctgctgggccctctggggtgggcactgctgctgctgccgctgctgctgctgggaagacattgctctaggaacaggtgagccagaggcgacaagctggaccccaggagag

SEQ ID NO: 90115 - DNA, 2658 bp, Homo sapiens
cagctcagagcagctgcagtcctgccaggcggagatcatcgagctgagacgcacagtcaacgccctggagatcgagctgcaggcccagcacaacctggtgtgtattgttcagacctgctggtgagcgacgggaacttgggaggcagagtcccggggatgtgcttggggccacacactctccttagctcttggagcttgtgacttccttgtaatcctgtgaagaaaccctttgaaggagcagctctctgacattcccaatcttctccaccacagcgagactctctggaaaacacgctgacagagagtgaggcccgctacagctcccagctgtcccaggtgcagagcctgatcaccaacgtggagtcccagctggcggagatccgcagtgacctggagcggcagaaccaggagtaccaggtgctgctggatgtgcgtgcccggctggagtgtgagatcaacacataccggagcctgctggagagcgaggactgcaactgccacggctacaccctgcctggggcctgcaacatccccgccaatgtgagcaactgcaactggttctgtgagggctccttcaatggcagcgagaaggagactatgcagttcctgaacgaccgcctggccagctacctggagaaggtgcgtcagctggagcgggacaacgcggagctggagaaactcatccaggagcggtcccagcagcaggagcccttgctgtgccccagctaccagtcctacttcaagaccattgaggagctccagcagaagattctgtgtgccaaggctgagaatgccaggctggtggtgaacattgacaatgccaagctggcctctgacgacttcagaagcaggtaccagacggagcagtccctgaggctgttggtggagtcggacatcaacagcatacgcaggatcctggatgagctgaccctctgcaagtctgacctggagtcccaggtggagtccctgagggaggagctgatctgcttgaagaagaaccatgaggaggaggttaacaccctgcgctcccagcttggagaccgcctcaacgtggaggtggacactgcccccactgtggacctgaaccaggtcctgaacgagaccaggagtcagtatgaggctctggtggaaactaaccgcagggaagtggagcaatggttcgccacgcagaccgaggagctgaacaagcaggtggtatccagctcagagcagctgcagtcctgccaggcggagatcatcgagctgagacgcacagtcaacgccctggagatcgagctgcaggcccagcacaacctgcgagactctctggaaaacacgctgacggagagcgaggcccactacagctcccagctgtcccaggtgcagagcctgatcaccaacgtggagtctcagctggcagagatccgctgtgacctggagcggcagaaccaggagtaccaggtgctgctggacgtgcgtgcccggctggagtgtgagatcaacacgtaccggagcctcctggagagtgaggactgcaactgccacggctacaccctgcccggggcctgcaacatccctgccaatgtgagcaactgcaactggttctgcgagggctccttcaatggcagcgagaaggagactatgcagttcctgaacgaccgcctggccagctacctggagaaggtgcgtcagctggagcgggacaacgcggagctggagaacctcatccgggagcggtctcagcagcaggagcccttgctgtgccccagctaccagtcctacttcaagaccattgaggagctccagcagaagatcctgtgcagcaagtctgagaatgccaggctggtggtgcagatcgacaatgccaagctggctgcagatgacttcagaaccaagtaccagacggagcagtccctgcggcagctggtggagtccgacatcaacagcctgcgcaggatcctggatgagctgaccctgtgcaggtctgacctggaggcccaggtggagtccctgaaggaggagctgctgtgcctcaagcagaaccatgagcaggaggttaacaccctgcgctgccagcttggagaccgcctcaacgtggaggtggacgctgctcccactgtggacctgaaccaggtcctgaatgagaccaggagtcagtatgaggccctggtggaaaccaaccgcagggaagtggagcaatggttcgccacgcagaccgaggaactgaacaagcaggtggtatccagctcggagcagctgcagtcctaccaggcggagatcatcgagctgagacgcacagtcaatgccctggagatcgagctgcaggcccagcacaacctgcgatactctctggaaaacacgctgacagagagcgaggcccgctacagctcccagctgtcccaggtgcagagcctgatcaccaacgtggagtcccagctggcggagatccgcagtgacctggagcggcagaaccaggagtatcaggtgctgctggacgtgcgggcgcggctggagtgtgagatcaacacataccggagcctgctggagagcgaggactgcaagctgccctccaacccctgcgccaccaccaatgcatgtgaaaagcccattggatcctgtgtcaccaatccttgtggtcctcgttcccgctgtgggccttgcaacacctttgggtactag

SEQ ID NO: 90116 - DNA, 3281 bp, Homo sapiens
aagaaaccagctgccaaaaataatgatctaattaactcattcaccctgaagtgcaaaggctacgcccaggaggaacagctgaaagaagaggaggaaataaaagaagaggaggaggaggaggacagcggttcagtagctcaactgcagggtggcaatgacacagggacggacgaggagctagaaacgggcccagagcaaaaaggctgcttcagctaccagaactctccaggaagtcatttgtccaatcaggatgccgagaacgagtctctgctgagtgacgccagtgatcaggtgtcggacatcaagagtgtctgcggcagagatgcctcagacaagaaagcacacactcacgtcaggcttccaaacgaagcacacaattgcatggataaaatgaccgctgtctacgccaacatcctgtcggattcctactggtcaggcctgggccttggcttcaagctgtccaatagtgagaggaggaactgtgacacccgaaacggcagcaacaagagtgattttgattggcaccaagacgctctgtccaaaagcctgcagcagaacttgccttctcggtccgtctcgaaacccagcctgttcagctcggtgcagttgtaccgacagagcagcaagatgtgcgggactgtgttcacaggggccagcagattccgatgccgacagtgcagcgcggcctatgacaccctagtcgagctgactgtgcacatgaatgaaacgggccactatcaagatgacaaccgcaaaaaggacaagctcagacccacgagctattcaaagcccaggaaaagggctttccaggatatggacaaagaggatgctcaaaaggttctgaaatgtatgttttgtggcgactccttcgattccctccaagatttgagcgtccacatgattaaaacaaaacattaccaaaaagtgcctttgaaggagccagtcccaaccatttcctcgaaaatggtcaccccggctaagaaacgcgtttttgatgtcaatcggccgtgttcccccgattcaaccacaggatcttttgcagattctttttcttctcagaagaacgccaacttgcagttgtcctccaacaaccgctatggctaccaaaatggagccagctacacctggcagtttgaggcctgcaagtcccagatcttaaagtgcatggagtgtgggagctcccatgacaccttgcagcagctcaccacccacatgatggtcacaggtcactttctcaaggtcaccagctctgcctccaagaaagggaagcagctggtattagacccgttagcagtggagaaaatgcagtcgttgtctgaggccccaaacagtgattctctggctcccaagccatccagtaactcagcatcagattgtacagcctctacaactgagttaaagaaagagagtaaaaaagaaaggccagaggaaaccagcaaggatgagaaagtcgtgaaaagcgaggactatgaagatcctctacaaaaacctttagaccctacaatcaaatatcaatacctaagggaggaagacttggaagatggctcaaagggtggaggggacattttgaaatctttggaaaatactgtcaccacagccatcaacaaagcccaaaacggggcccccagctggagtgcctaccccagcatccacgcagcctaccagctgtctgagggcaccaagccgcctttgcctatgggatcccaggtactgcagatccggcctaatctcaccaacaagctgaggcccattgcaccaaagtggaaagtgatgccactggtttctatgcccacacacctggccccttacactcaagtcaagaaagagtcagaagacaaagatgaagcggtgaaggagtgtgggaaagaaagtccccacgaagaggcctcatctttcagccacagtgagggcgattctttccgcaaaagtgaaacacctccagaagccaaaaagaccgagctgggtcccctgaaggaggaggagaagctgatgaaagagggcagcgagaaggagaaaccccagcccctggagcccacatctgctctgagcaatgggtgcgccctcgccaaccacgccccggccctgccatgcatcaacccactcagcgccctgcagtccgtcctgaacaatcacttgggcaaagccacggagcccttgcgctcaccttcctgctccagcccaagttcaagcacaatttccatgttccacaagtcgaatctcaatgtcatggacaagccggtcttgagtcctgcctccacaaggtcagccagcgtgtccaggcgctacctgtttgagaacagcgatcagcccattgacctgaccaagtccaaaagcaagaaagccgagtcctcgcaagcacaatcttgtatgtccccacctcagaaggcacggtcttgtcttgacattcgccgacatgggtcaaaagttccttccccaaagccaccaccccaaaggccagcctcctcctccagggtcccccccatgaagctggaaatggatgtcaggcgctttgaggatgtctccagtgaagtctcaactttgcataaaagaaaaggccggcaggtccaactggaatcgtcagcattcttctgattctacaagcccagtttgcctcgagcctcttccagacatcagagggcaaatacctgctgtctgatctgggcccacaagagcgtatgcaaatctctaagtttacgggactctcaatgaccactatcagtcactggctggccaacgtcaagtaccagcttaggaaaacgggcgggacaaaatttctgaaaaacatggacaaaggccaccccatcttttattgcagtgactgtgcctcccagttcagaaccccttctacctacatcagtcacttagaatctcacctgggtttccaaatgaaggacatgacccgcttgtcagtggaccagcaaagcaaggtggagcaagagatctcccgggtatcgtcggctcagaggtctccagaaacaatagctgccgaagaggacacagactctaaattcaagtgtaagttgtgctgtcggacatttgtgagcaaacatgcggtaaaactccacctaagcaaaacgcacagcaagtcacccgaacaccattcacagtttgtaacagacgtggatgaagaatagctctgcaggacgaatgccttagtttccactttccagcctggatcccctcacactgaacccttcttcgttgcaccatcctgcttctgacattgaactcattgaactcctcctgacaccctggctctgagaagactgccaaaaaaaaaa

SEQ ID NO: 90117 - DNA, 2213 bp, Homo sapiens; identical to SEQ ID NO: 60567

SEQ ID NO: 90118 - DNA, 2066 bp, Homo sapiens; identical to SEQ ID NO: 75534

SEQ ID NO: 90119 - DNA, 1705 bp, Homo sapiens
cccacgcgtccggatgggcatgagggcccgggtccctaaagttgcccactccacccgaaggcccccagccgcccgcatgtggctgccacggttctccagcaagacagtgacagtgctcctcctggcacagaccacctgcctcctgctcttcatcatctcccggccagggccctcatccccagccggcggcgaggatcgtgtgcacgtgctggtgctgtcctcgtggcgctcgggctcatccttcttgggccagctcttcagccagcaccccgacgtcttctacctgatggagcccgcgtggcatgtgtggaccaccctgtcgcagggcagcgcggcaacgctgcacatggccgtgcgcgacctgatgcgctctatctttttgtgcgacatggacgtgtttgatgcctacatgccacagagccgaaacctgtccgcctttttcaactgggcaacgagccgcgcgctgtgctcgccgcccgcctgcagcgcctttccccgaggcaccatcagcaagcaggacgtatgcaagacactgtgcacgcggcagccattcagcctggcccgggaggcctgccgctcctacagccacgtggtgctcaaggaggtgcgcttcttcaacctgcaggttgctctacccgctgctcagcgaccccgcgctcaacctgcgcatcgtgcacctggtgcgcgacccgcgggccgtgctgcgctcccgggaggcggcgggcccgatactggcacgcgacaacggcatcgtgctgggcaccaacggcaagtgggtggaggccgaccctcacctgcgcctgattcgcgaggtgtgccgcagccacgtgcgcatcgccgaggccgccacactcaagccgccacccttcctgcgcggccgctaccgcctggtgcgcttcgaggacctggcgcgggagccgctggcagagatccgcgcactctacgccttcaccggcctgaccctcacgccacagctcgaggcctggatccacaacatcacccacgggtcggggatcggcaagccaatcgaggccttccatacttcgtctaggaatgcgcgcaacgtctcccaggcctggcgccacgcgttgcccttcactaagatcctgcgcgtgcaggaggtgtgcgccggcgcgctgcagctgctgggctaccggcctgtgtactctgcggaccagcagcgtgacctcaccctggatctggtgctgccacgaggcccagaccacttcagctgggcatcgcctgactgagaactctgggccttagagcaggccccgaactgtggtcgccaggcccaggaggcgactgcatggtggagagggagctggggcgcatggggaagcaggtccctactatcaaccgggagtttggggtcctcccctgaagtaggcaaggactgcacgtttctttctctcctgattctcggttttcctttgaatcttctggagctgccttctcatcaggtgcactcttcatggaaagcaactcttgcccctacctcttctgggcgcagggagtaagttactgctaaattaaattaaatgtgtgccaggccgggtgcggtggctcatgcctgtaatcccagcattttgagaggctgaggcgggtggatcacctgaggtcaggagttcgaaaccagcctggccaacatagtgaaaccccctctctactaaaaatgcaaaaattagtccggcgtggtggcacc

SEQ ID NO: 90120 - DNA, 2171 bp, Homo sapiens
atggcgtctgtgcaggcgtcccgccgccagtggtgctacctgtgcgacctgcccaagatgccgtgggccatggtgtgggacttcagcgaggccgtgtgtcgcggctgcgtgaacttcgagggcgcggaccgcatcgaactgctcatcgatgccgcccgccagctcaagcgcagccacgtgctccccgagggccgctcgcccgggcccccggcccttaagcacccggccaccaaggacctggcggcggcagccgcacaggggccccagctgccgcccccgcaggcccagccccagccgtcagggaccggcggcggcgtgtcgggccaggaccgctatgacagggccacatcatcaggccgcctccccctgccctcgcccgccctggagtacactctggggtcccgcctggccaatgggctgggccgtgaggaggccgtggctgagggggcgcgaagggccttgcttggctccatgcctggcttgatgccccctgggctgctggcagctgcagtgtctggcctgggaagccgaggcctgacgctggcacccggcttgagtcctgcccgtcccctcttcggctccgatttcgagaaagagaagcagcagaggaatgcggactgtctggcagaactgaacgaggccatgcgaggccgggcagaggaatggcacgggcgccccaaagcagtgcgggaacagctactggcgctgtccgcctgcgccccgttcaatgtgcgcttcaagaaggatcacgggctggtggggcgagtgttcgccttcgatgctactgcccgtcctccaggatacgagttcgagctgaagctcttcaccgaatacccctgtggttccggcaatgtgtacgccggcgtcctggcagtggctcgccagatgttccacgatgctctgcgggagccgggcaaggcactggcttcttcgggcttcaagtacctcgaatatgaacgccggcatggatcaggagaatggcggcagctgggcgagctgcttaccgacggcgtccgcagcttccgcgagccagctcccgcggaggccctgccccagcagtacccagagccggcccctgcggctctctgtggcccacccccgcgagccccatcccggaacctggcgcccacgccgcgccgtcgcaaggcatcccccgagccggagggcgaggcggctgggaagatgaccaccgaggagcagcagcaacggcactgggtggcacccggcggcccgtactccgctgagacccctggtgtgccctcgcccattgccgccctgaagaatgtggccgaagccctgggccactcacccaaggaccctggcggaggcggggggcctgtgcgtgcagggggcgccagccctgcagcctcctccacggcccagccgccaacccagcatcgccttgtggcccgcaacggcgaagcagaagtcagtcccacagcgggggccgaagctgtcagcgggggtggcagcggcactggggcgacccctggggcccccctgtgcttgtaccctgtgcagggagcggctagaagacacccacttcgtccaggtgccctccggtgcccgaacacaagttctgcttcccctgctcccggaagttcatcaaggcgcagggcccggccggggaaggtgtactgcccgagcggagacaagtgcccgctggtcggctcctccgtgccctgggccttcatgcagggcgagatcgccaccatccttgctggagacatcaaagttaagaaagaacgggacccctaggctaccactgcctccaggctactgccctctgcccctttgccacccaccgctgccgcggataaattattccctccccgacccagcccagtgccacctctatctgtgtacatactcccttcttccacccagatgggtcccctggggtagatgcattgtgggtggggggagaaagcttgtggctcctgtccgagggggtgtttggggtcccttggcccctccagtttccctctgtcctccttggcttggctttgctgctgcttgtagttgggggagaggtgcccccctcctccttgagaagggacctcctgaaaactcgctctttataaacgaggcaaaagcatttaattcccacccccccaccccccgctcccttctgctccttcaataaaccgaaagatgggtttttttttttc

SEQ ID NO: 90121 - DNA, 689 bp, Homo sapiens
ttttaattgttaacagaaccaatttaaatacaacttaatacacaaagcaaagctgggcggcgttccggggggccagggaaaagtgccaagagggtcaggggtgaagcagtcccgggcccggtccctggagggggctgaggctgccgtcgtgggaggggcttggctggcggaggccgggctgcctgtggaggccttgaagctttgccagcagctcatgggatgaagtcctcgacaggtttcccacatgacttcaggagtccctggattttccggcttctctcctcttcactctctaactccaacaattcatcaatgttgatctcatcgggcatgtctgcctcctagggccagggagggaggggtgcttaggatccccttccctccctccctcgcctttgtccagggctctgcaggagccccaccggccccagggcccagctggcgggttctggagcattaatgtggcagtccgggacagcactgccaagacgggacatctgggtgttgggggggaggggtgacagatgggctgagagagccccggggccctgtaccagcccgatgcctgggcccatgggccccgggagcctcggggctggcacgggtctctcgccttggctctagttcccacagaggaaaacaggcctagtggagtcctggaatgtcagattctgggattcgggagaggg

SEQ ID NO: 90122 - DNA, 578 bp, Homo sapiens
aaattgacataagttataagactttctattattttatgtgccacactaagaagaaataaatattgtaattgaactatgattcagtgctttttgttgtcatcattgtttggcatccctgggtgggtcattaaccatcagtgcttttatatgacattgatttatcctatgttactgtgtgtatttgaataaattaaaaataattggtaccatcaaccttctgggtttataaagaataagtacagtaatgtacttaaattgaggaacacagtgcctagcacattgtaagtactcaacaagtggtagccattatgttgatgttgatggtgatttgatcatgagcactctcttttaagtggtgttcattgtttaggttgttctttgggggtcagaatcattaataggttatattgatgagatttattggtggtagtcagaatgcccactcgttttgaagctgaagtagcataacagtaaaataacatgtttagttggtttttggaggcaattgttttaatgaatagcacttcattgtcaatgaaatttggtcatgggctaccggtggaggtaccctccagagt

SEQ ID NO: 90123 - DNA, 5612 bp, Homo sapiens; identical to SEQ ID NO: 80963

SEQ ID NO: 90124 - DNA, 375 bp, Homo sapiens
tcctgccaccatgtgaagaaggtgcttgtttcccctttgccttccgccatgagtgtaagtttcctgaggtctcccagtcatactgctggttaagcctgcagaacggtgtacttgtttgaaatgtatctggcccaatcgctgagcgtccgcgctgcatttctccaaactgcccagcagggggcggtgctacctcggctccgcgcagccacggcttcccgctggcgaaccaagggcgcggaatctggagagggcgaggaacatctttcctcccacctgtcccccgccaggtctgccagacccgtctcatccgtgctgctgcttctgaaaatcagaagagtgaggatgaaataaagtcttcataaaggaaaaaaaaaa

SEQ ID NO: 90125 - DNA, 2090 bp, Homo sapiens
ctgtccagcagctcccagtcttccccgccccagcggtctcggaactccttggtgttcatgcccccaatcctgtccaggtcagacttgtagatgccaagcagcccgaacccattcacctcccagtagccctcaggccactggggggtggccccacaatgcagcctcatcaccatgggggcaaaggccatctttccctccacacagtgcttccgaatggcatcgatgactccagctgggaagtggatgtggaggtcacagaggaagatgatgctgtgcgggtccttcacgaggtctatgccagcctgaagtccagctgagcgttcaaagtttccacttagcttcacgtactggtagctccgcagcttggacctcttcagtgccatctcaacatccatgtcctcactgctatagtcagtgatgacgatgttgaagtgtgggtcaccggtgacctggaacaggttttccatgtctttgatgaattgctgtacccagcgtgcctggttcttcacaggcacgacgaagtggaccacggctcggtgactccaggagaaaccctgaggccagcacagcttgggctcttgggcccgggtattcaggacctgtctcctacggttgtgtgggtcccagaccaggccttgcaggttccgggcctcgacctcctccccaccagctggatcgatgccctgccagcctcgtgcagacacatactccgagagccgcaccacgcgctggccttgttccaacagttcaagctccaggaggtagcgacccccacgtagctggtcctgacgcttttccacgttcacaatgcgctgtagctggtacctcccccggctcctctggttgagcttcttcaagaagactcgcgtgacctccagagcttcctgctctggaagcagcaggttgccagatgtgttacagctcagatcgatccagtcagtcctcagggcttggaagtcgagattccgggcactgaaggtctggtcccagtttactaccgggtcaaacacaggtacgtactcgaacacctcactcatatcctcttcctcctcctcttcttccccctcttcctctccctccacttgtccttcctggcctgcggccgccaccacttcctcctccccatgccagccccttccaggggcctgaggccgcatcctgtcaccccgtctctgctctgcgatgtacgactccacctggttcagccactgagtcttcctggggctgtcaccagcgggcctgggcctgggccccctcatctgaggcaggttcttcacagggtgcccaggaggccacttgtcggaatgaggtgaatcttggctgggctcagggctgggtttttgcttcctcttctctggctgctgcactggaatgtggctggtcctccctgggaaggacgctgtggagttccgcttggagaagggggccagcaggccctcccggggctgagccaggagtttccgcaggcttcggaggcggtagtcagtggcatcttgctccagggtggaggcaggtgtctgtcttccctcgagcatcctggcattctggttgttggaggcaggggtctcctctgccacttccccatactgggactcttctagaaggttttcctcaaaacctgctattaataacaaccattcctcatgtcaagagtttccaaccctttccaaacaagacatacaagacagaggatgatcatacatgtgacgcaccatggggctccagactggggttgaatccaggttctatcgcttactgtgtgaccctgggcaaggtactcaacctcaattaaccccagtttcttcatctgcataaagggaataatactgcatctctcatgggtttgtgaagactgagtgagataaacggcatcacatgcccggcaggtgcatagcacctgagggacccagcagatggtcccagccacgccctaatcccccaagaaaggccccagaagacagtgcttctctaaaccagaacctcccaaatggtgcgccagggacagcaagcccctccagcagtccaagtaacctcccccgggctctcactctcatccaaaagaccccagcatgctgctaaaaatagtgtca

SEQ ID NO: 90126 - DNA, 477 bp, Homo sapiens
  misc_feature (1)...(477): n = a,t,c or g
gggacttgaaaccattttgcannanncnncaaccnttnnnactacccacgcgctcgacagtaaatgattttgaaggaaatttttttgatcacccgcttaatctaggaaacctgaaaaggagaaacaatagggagaacatgaataaactcaaaagctgtttctttgaaaaacatcaataaaattgacaaaattttagccagactgatgaagaaaaaagaagatacatattaccaatatcaagtacaaaagaggaaacatctttgcatatgtcacggatcttgaaaggataagggaatattgtgaacaactttatgccatcaagtttgataacattaaatggagaaattccttgtagagaaggagtggaacagactcaagaagaaatagaaaaattgcagcccactatgaggacaagaaattgaattagtgtttgaaaatcttcctaccaagaagcgctcaggcccagatgatctcact

SEQ ID NO: 90127 - DNA, 5246 bp, Homo sapiens
gccgccggaactggctgttggtgggggtgcagcactgagccgccgacggggcgggtgggctttgctgccgagcaggcggcgccgtcttggggcctagcggcgaggcgacccgcacaggtgggcggtggcggtaggtgggtggccagcgactggcaacgcggtggcttagacgcgcgagatccggccagggtcagagtactgtaagattgatgttaaaggcatggtgttcaccccacttcatcagcgtacataagttatctcttcttttggacccttattttatgccataatgcaacaagctttagaactagctttggatcgtgcagagtatgtcattgaaagtgcccgacagagacctcctataaggaaatacctatcaagtggaagaaaatctgtatttcaaaaactttatgacttgtatattgaagaatgtgaaaaagaacctgaagttaagcagaaattaagaagaaatgtgaacttgttagagaagcttgttatgcaagagactttgtcatgtttagtgggtcaatctataccccaggaaatgagggatattctctgatgctcaggggaaaaaacggatcagattccgagaccattcgactgccctatgaagaaggagagttgcttgaatatttggatgcagaagaattacctcctattttggttgatctcctagaaaaatctcaggttaatatttttcattgcggatgtgtcatagcagaaatacgtgactacaggcagtccagtaacatgaaatctcctggttaccaaagtcggcacattctcttacgtccaacaatgcagactttaatttgtgatgtacattcaataacaagtgataaccacaaatggacccaggaagacaaacttttgcttgagagccagctcatcctagctacagctgaaccactctgtcttgatccttctatagcagtcacctgcactgcaaacagactgctctataacaagcaaaagatgaacactcgcccaatgaaacggtgtttcaagaggtattccagatcctctctgaatcggcagcaagatctatctcattgtccacctcctcctcagctgaggttacttgatttcttacaaaaaagaaaggaaagaaaagcaggtcagcattatgacctcaaaatttctaaggcaggaaattgtgtagatatgtggaaacggagtccctgtaatttggccataccttctgaagtagatgtggagaaatatgctaaagtggaaaagtctatcaaatctgatgactcacagccaacagtctggccagcccatgatgtaaaagatgattatgtatttgaatgtgaagctggtactcagtatcagaaaacaaagctgaccatcttgcagtcgcttggagatccactttactatggtaaaatacagccatgtaaagcagatgaagaaagtgacagccagatgtctccatcacactcgtccacagatgatcattcaaattggttcattattggatcaaagaccgatgctgagagggtagtcaatcagtaccaagaattagtccagaatgaagccaaatgtccggtcaagatgtcacacagctccagtggctcagccagtctgagtcaggtttctccagggaaagaaacagatcaaactgaaaccgtgtcagttcagtcttcggtattggggaagggtgtaaaacatcgacccccaccaatcaaacttccctcaagctcaggaaatagttcctcaggtaactattttacaccacaacagacaagcagctttctcaaatctccaactcctcctccttcttctaagccatcaagtattcctcggaaatcatctgtggatctcaatcaagttagcatgctttctccagctgccctatcacctgccagctcatcacaaagaaccacggccacccaggtcatggcaaactctgctggacttaacttcatcaatgtagtgggctctgtttgtggggcccaggctttgatgagtggttcaaaccccatgctgggctgtaacactggtgccataactcctgcaggaataaacctgagcggccttctaccctcaggaggtctgctaccaaatgcactgcccagtgcaatgcaggcagcttctcaagcaggtgttccatttggtttaaaaaatacttcaagtctcaggcccttaaatctactccagcttccaggtggttcacttatttttaacactctgcagcagcagcaacagcagctctcccagtttacaccacaacaacctcagcagcccacaacttgtagtcctcaacagccaggggagcagggttctgagcaaggttcaacccagtcaagaacaggccttatctgcctcagcaagctgcctgttattaaccttactggagtaggaagttttatgcagtcacaggcagctgcagttgcgattcttgcagcatcaaatggctatggcagcagcagcagcacaaacagctcagctacatcatcatcggcatacaggcagccagtcaaaaagtaaaatgaagagaggcatgccaaccactccaaaattttgagtcttgcattactttttgttccttttttaaaaacacaagagcactgaatcaaaagaattgagtttctactttttgttttttttaatgtgtcagtattttacattgctagatgtacaaactttatacagaagcacaaccttatcatttttaaataaaaacagggaaatggtttaacaaactagggttggtttgcctaagtcattgctttttaaaaatggtttcactatacataatatatatggaagtgacctaagaaataatagaaacatctttcagaagaatgtagtttgatatttatttagtataaaacgtttgtgcacagtgttaatataatacaatttttacaaatctgttttgaaaatgtggtggctgtttatttgggtttcatatctcttaattatcttcatccatcagttttttaacttctttgtgtcttgtaactgctcggctcatacagtcctgaagtttagctccagttagcccacttccacctggtttgtgaagacaacagagtttgccttcctcatccattactattgttaaggttcctgttgccagatgttcctcctctccaagtaaggggtcaacttataaagcaaaagttgtcatccaaaaccaccaggcaaaagggaaagtttggcaaacctggggatggaggttctaattattcaaataacttttccttcctttaaattaacttctgctaaaggcggtttcttcatttatagtaacttcaggcaactggtacattttttaaaagccgcctagcaaagcaaaatgtgcaggcatcccaaaatgtttcccatcgtagtcgaggcaaatgagatcacagtatagaacccagacaagctttcctggagaaatgcataaggtcctctttctgaattatctgtgaattttcaatgacatctgcaatgaactggctagccacttgggcctcttctccaggaggtccagaccggaatcaacgtatcctttatcaggggcatctgttgatggtgctgcaaattcctatagtagcaaagaaatgtttcctattgaaagaagctactgaaaaattatgaagacaatttagcaatcagttatggaaggctctatcaaatatcagcttagggaattgtgtcagggcctctacggacattggtgctgatcctcacaatagctctacaagataagaaggcactacagtacagtggactacactacagtgctgctcggcaagattacctggagatcttttaaaaaatagtaactgggtttgtgcccccaactactagccaagaatcttaatttgttctccagatgatagagcaagatttaggaactgctgctttagtggtaaagagcaaaagctcagctgggcgcggtggctcacaccggtaatcccagcactttgggacacagaggcgggcggatcacctgaggtcaggagtttgagaccagcctggccaagatggcaaaaccccgtctctactaaaaatacaaaaattagccaggcatggtggcgggcgcctgtaatcccagctacttgggaggccgaggcaggagaatcacttcaacccaggagacggaagttgcagtgagctgacatcgtgccactgcactccagcctgggcgacagagcaagactccgtctcaaaaaaaaaaaaaagcaaatgctctgcaattactaagccagttcaaatgtcagagccatacttactggctgagagacttcaggcaagttatttaacctcttaccttaaactcctcatcttgtcaaatgggaagaaaatagtgtctactcctagggactgttaataagggccaaatgagatagacctgttaaatcccaggcataaaacctgacaaggagcaagttctcaaatcttactgttatacatcactccaggtttacgaaagaagaatctcaactgaggttaaataacacagggtagactgtagtcaaagaagcacaggctttggagtcagatttatgtctaagttttacttatgagtcttatgtacctggacaggttactgaaagtcatctgtaaaacaggaggtgaagacaagtaacaaatgattgttataggcattaaagtggataattctgtaaagcacctaaaaaggtgtctggaacatagcaagtactcagtaaatggtagccagtattccctcaaatttttcttttcaacaatttcaattttctacacatttacacagattacatgtcatcactggctaaaaggatgtcaccaaaaatctgttaatgtctcaaatgatataacaatttttttaaaatggtgactcagattttaaaagttgtttcattttgctacatttgacaattgttcacttagtcattaaacttgggtcatattatctaacactcatagtgaaagctcttgggaaattaaacattaaaaattgacacccaactaccaaatcaagagtagaattacaggtgtatattacaatctaataaataaagctaactttgtaactcaaatctcaataggacatatttagacttactgctttaactccacagattactgtagtatttcccaacttcactaaagcagaaccatctgcggtactaattgaaccgatgttgacagttgtggttctgaattcaccaagttctcttccatcaggacggcagttctctttcagaaatctcctgtaatactccagaggttccacggttttgaacccagccgccatcttc

SEQ ID NO: 90128 - DNA, 960 bp, Homo sapiens
tgcgggagtgggggagggtgagccagagaaggggcggggccccgcgaaaaaggcaggaggccgaggacaggggtggggcctagaaatagagggcgttctgggccaaccgggagagctgactgcgggggggcggagccacgccgggtgactgacgttgaggcccaaccagggagaggcggggccaaggccagggcctgactaaacctggagactcgggtggccgaggggcttcataccagctgaagagcgacaagccgctggcagccgcggatctcaccgccgctcagggtttttagaacttcagccataaaaatgggcagaattttccttgatcatatcggtggtacccgtctgttttcttgtgcaaactgtgatacgatcctgaccaaccgctcagaactcatctccactcgtttcacaggcgccactggcagagcatttctttttaacaaggtagttaacctgcagtacagtgaagttcaagatcgggtcatgctcactggccgccacatggttcgagatgtgagctgcaaaaactgcaatagcaaactgggatggatctatgagtttgccactgaagacagccagcgatataaggaaggccgcgtgatcctggaacgtgctctagttcgagagagtgagggctttggaggagcatgtaccatcttgataactcttgaagatacagagagaaatccatcttttccccaggtctcctttcactgaaaacaaaaatctaccttacatacactgtgcaccttagcatcagagtccggattaatgaacctgcggaacaagaggtttgtgaagaatctaagatgggaacctttctttctttctttctttttttttaaattttgtattttccatccaacagcagtgtgtagagagaatattatgcagatgccgttaattttttaccctatggttacatcttgaggcagcagagtctgtctgcag

SEQ ID NO: 90129 - DNA, 2514 bp, Homo sapiens; identical to SEQ ID NO: 60860

SEQ ID NO: 90130 - DNA, 2528 bp, Homo sapiens
gaaacacaaattcatccagtgttacaaattctgcagcaggtgttgaagatcttaacatcgttcaagtgactgttccagataatgagaaggaaagattatcaagcattgaaaagattaaacagctaagagaacaagttaatgacctctttagccgaaaatttggtgaagcaattggcgtggatttccctgtgaaagttccctacaggaagatcacattcaaccctggctgtgtggtgattgatggcatgcccccgggggtggtattcaaggcccccggctatctggaaatcagttccatgaggaggatcttggaggcagctgagtttatcaaattcacagtcatcaggccgcttccagggcttgagctcagtaatggtgagtattctacagtgggaaaacgcaagatagaccaggagggccgtgtgtttcaagaaaagtgggagagagcgtatttcttcgtggaagtacagaatatttcaacatgtctcatatgcaaacgaagcatgtctgtgtccaaagaatataacctaagacgccactatcaaaccaatcacagcaagcattatgaccagtatatggaaagaatgcgtgacgagaagcttcacgagctgaaaaaagggctcaggaagtatctcttaggcttgtcagacaccgagtgtcccgagcaaaaacaagtgtttgcaaacccaagtccaacccagaaatcccccgtgcagcctgtagaggacctagctgggaacttatgggagaagttacgtgaaaaaatcaggtcttttgtggcatattctatcgcaatcgatgagatcacggatataaataataccacccagttggccatattcatccgtggtgtcgatgagaatttcgatgtgtccgaagaacttctggacacggtgcccatgacgggtacaaaatctggcaacgagatcttttcgcgtgttgagaaaagcctgaaaaacttctgtatcaactggtcgaaattagtaagcgtggcctccactggcaccccaccgatggtggatgccaataacgggcttgtcacaaaactgaagtccagggtggcgacgttctgcaagggtgcggaactgaagtccatctgttgtataattcatccggaatcactctgtgctcaagaagttgaagatggaccacgtcatggacgtggtagtgaagtccgtgaactggatatgctcccggggactgaaccacagcgagttcacaaccttgctctatgagctggacagccagtatggtagcctcctgtactacacggagattaagtggctcagtcgcgggctcgtgctaaagagatttttcgaatccttggaagaaatcgactccttcatgtcatccagagggaaacccctgcctcaactgagctccatagattggatccgagacctggccttcttggttgacatgacgatgcatctgaacgctttgaacatctctctccaaggacactcccaaatcgtcacgcagatgtatgacctgatccgggcgttcctagcaaaactgtgcctctgggagactcatttgacgaggaataatctggcccactttcccaccctgaaattggtttccagaaatgaaagcgatggcctgaactacattcccaaaatcgcggaactcaagaccgaattccagaaaaggctgtctgatttcaaactctacgaaagcgaactgactctgttcagctccccgttctccacgaagatcgacagtgtgcacgaggagctccagatggaggttatcgacctgcaatgcaacacggtcctgaagacgaaatacgacaaggtgggaataccagaattctacaagtacctctggggtagctacccgaaatacaagcaccattgcgcaaagattctttccatgttcgggagcacctacatctgcgaacagctgttctccattatgaaactgagcaaaacaaaatactgctcccagttaaaggattcccagtgggattctgtactccacatcgcaacgtgatggagagaaaactcctggcagggccctatggtgggaaaggctggagtcttctagtcccaagggattgggagatgacaaaatgaattttttttttcttttttgagatggagtcttgctctgtcgcccaggttggagtgcagtggcgtgatctcggcttactgcaacttccagctcctgggttcgaacgattctcctgcctcagcctcccgagcagctgggactacaggcatgcgccaccatgcccggctaatttttgtattagtagagatgaggtttcaccatgttggccaggctggtctccaactcctgacctcaggtgatccacctgcctcgacctcacaaagtgctgggattacaggcatgaaccactgtgcccagctgacaaaatgagttcttaaactttttttttttttcagttttttttccactttgaatcagaaatataatctgcagtatcatacttgtttatattacattgtatgcctcactattcattaaaaatcaagaaagttttattgtaaaaaaaaaaaaaa

SEQ ID NO: 90131 - DNA, 2787 bp, Homo sapiens
tttaaattgaaaggaaacttttattgagtcatgttttcaaagcaatctagttttaaaaaaagttgaagacaagacagaaaaaagaacatgacacctaagagaatcagacaggacagacagacgggagcagggaggcgggggacagcggctccgtggaggtccagatcttctccatcttggaagatgaggtcgtcgccagaatcctggtccagctcctcgttctctttaagtcttctgctccactgtcttctccagcgactggatgcgcatctgctccttcctcaggctggcctggagggccaacgcttccgcctgggccttgctccggacctgggcgatctcctcgtttgccagctgcagcttctcctccgcgtgggccttcagggcttggtacctctggccctcctgggtgatccttgccaggtaatcctccacgcacttcttcagtgactcttcgttcttgcggtagccctcgatcacctctttctgtttctcaaaacgcttgaagaggtcggagaaggacttctccatggagttcagatctgtggtaagttggtctttttcttttagaactttctggatttcagctttggaaagttccttctgcttctgaacttcctccatggcctggtacacaacctcttcgaacctgtccatgatcttccccagttccaggttcttcccgtggagctcctcacacctgctcctcagctcccggttctcctcctgtgtcgcctttaccactgcatccaggtccttctggctgtactggagcaggtccactataggtccggtggacaggggtgggcccccaggcgcgggaacacctgggggtgggcctggcacaggaatgtccagtgctcccaagaaatcgaactccacaagcttggcttcccgcggacgtcctgagggagtctcatttgcaccgtgcatgctgctggtctcggtggccacgggcactggtctaccaggactgtccctcaggagggggtcgaacttgaggtataaggactgcttcctcaaggccgactccttaaacgaggaagttccaaactgctccaggtaatccacctccgcgcccgtgcctagaacctcagcggggtctctgaagctctcctctttcagctccaaggcaggctgcccctgctgatgggtgggcactggctcactgcctggacagcttgtgggaagcgaggtgctggcagagttcaaggctctctccttgctctctgctgttggggtctcggctgccaactgcaccacaggcgtgtcctccgctgaggctgaatgcagctgctggctcagacagggacctggctcctccgtggcaggcccagcatgcaactgttcagccgctggctggcccagcctggtctcagggctttctgggggctgggcctcactgcaaccagacttggtgtcacctccgaacgggatgaagtttgggtcatccattttgtcccagtcgaggtggtaagagccccgagaagctggcatgggggggtcctctcccgctccgctcctaccgtcgtcctcctccacctcctgcggggccttttgctgcctcactgctgctttcctcaagggaggcttgaggccggacctctctcccagtctccttggtgggggtgcccttttgctggtggcgccatcagatacatcaaattctagttttcaggtccgctcctcgaggagctggccatttggcctgcagccacttcttcctgaggactcagggtcatggccctgccagccaccaggtggttggttggggctgtgctctcaggagcagaggtgtgtgcacaggtaagggtctgagtgccatctgctggcacgggggtgcccacacccgcagggcagcccagggcttcgccaggcagaccctgcaggggtgctcctccgcaggcttccttagggattgcaccaggaggcgaagtggccactgctgcgggagcacagaccccaccgtgccggcattcctcctcggctccgtgcggagtctccgctttgcattcttcctcggctccgtgcggagtctccgctttgtgctgggactctgtcctgcaagggtcttctagggtctcagaggcgggtgtcactcttctgtctaaggaataggaacttaaggttttcctccacggcttgctccaggactgcccagacacttttcctggagacaccatttggttctcagaacttcctgggctctgggaagagcttgagcagtccaggtcagccagggcacctgggccagactcgctggagctgccactcccaaaggctgggcttgcatcccccaggaggtcggtgtcagcctccactggtttctgtagaattccatgagtagttttggcatccacttccttgatgagctgttggttctctttctgtgtccagaccgggtgtgagttttccagtccaagggtgtcatcctgagtgaaaggagcctcaagtttgctggccatgctaggacttagaatcctgtgctgtctgtggatccccgcagaggtgtctgaaaagtcaccttcatagcttttggccaggttcttgggtggcacattttctttctgtgacacacgaagaacagacgatcttccggtaacttctggtggcgaaaacaggaagtcgcaattttctgtatttttttcattgctgacatttttgtcgtttaagacctgcagactcattctgcccgcccgcccgttgccgggctctgagcccgcgccgccgccgccaggaaggaggggtccgcgtctgctccacgccgggggccaagcctggctgcta

SEQ ID NO: 90132 - DNA, 2401 bp, Homo sapiens; identical to SEQ ID NO: 61015

SEQ ID NO: 90133 - DNA, 1835 bp, Homo sapiens
tttttttttttttagcatttaattctgattttaatttccataaaattaactctacaaagatttctcaaagaaatctgaccgccttcaaactacatgtttgttttgtattacatgtaatagatttccacatatgaaaaaatcataaaatgaaggctacgttttccaaccgctatttaagtactgtttagaaactatcgttgaatgaatgaacctgattttgcctcatcgtgtttatctaaaagagtctttgaaagatatttattttccattttctttacacggtccctctttttcaatctgtaaataaaaattaatgagcaatttaggacacaatatcacaacacaattattctgtaattgatctgataaccaaagacacataagaataggatgatctataggatagatgtttccacacagcatttgtctgaaatcagattattttaaatgatgccttgacttttgaattcaattctagaaccaattatcctaaactaaatcagagtattacaaatgaagatattccaacacaaagacttgtaggattttgtttagattgtcaatggttgattcatccaaattttcttcattgtcatccatggtgtgccagacttcagggaaaggagacggtatcagatgcagaactggaacacctcttcttaaaaatggaatatggtcatcctgaatcacacctccataactgtaattctggaaataccgcccctccaaagagtgatccttgagcaaacccaattcatgaagttcatgttcaattgcttgaagtctttcgaaccacctggctgagtttggaaaaaaattgggaaacgttgggtttggagctccaatcaaatccaataagaccaataaatccatgccatgcagttggctggtgcctctcgctccaggtgggtgcggggtcgatgccatctttgcagctaagtgtcgagacccatagagagaatcttgaggagaccagtgaagaaaagcctcttcaccatcaaagaagatcagctggagtgacaaatctggcttggagtctgaaacagtctttaaggaaaggagtttcttgtctaaggcacgagcaagttccaacatcattgcacatggcacggctgaatcagtggctcctacaaacactctgttgttcccagtgggaaaaatacttggagtcatagtggcaggcgaggaccaaatgtcgtttagcagtgggattgagggtgctgatgatatttgagaaagaccggtacccatagggtgtctgactcaagaaggtgtctatttccaagacccagtcagcctgaagcctctgaattcgctgcatgatgtgctgacgagcagcatagcttccaggggatcccgggtatcgctctatcagcaatggctgtaagtcattttgccacatttcagagatactggtgccttctgcaatttgccgaagagccgatgaattcaaaatggctggctggtggtaattcttctcctctggccaggctgaggcactcggactgacccccctggatgcccagggcagggcggccaccagcagcagcaggtggagggtgcccacgacgcgccggtgtcttccgcctgccatctctccgagtctgtctgggagcgggttccccgggccgctggcggtcacgagcccgggaacgcgcgtccttcgccttccctcttctccacccttgggtcgactgcgcccgccttcccatcgcccccggtgaggatcagggcttggcctgctctgagtcatctcccagtaacatctagttcccagaaaaatcagaacaaggatactgaagcagaaccatttcacagagagcaaagatttgaag

SEQ ID NO: 90134 - DNA, 3340 bp, Homo sapiens; identical to SEQ ID NO: 60535

SEQ ID NO: 90135 - DNA, 1023 bp, Homo sapiens
cttccggcttgctaagcagaggccggaagcggtggtttttagcggctctctgggtagcagggtggtgtgatagcggcagcgaggggctcggagaggtgctcggattctcgtagctgtgccgggacttaaccaccaccatgtcgagcaaaagaacaaagaccaagaccaagaagcgccctcagcgtgcaacatccaatgtgtttgctatgtttgaccagtcacagattcaggagttcaaagaggccttcaacatgattgatcagaacagagatggtttcatcgacaaggaagatttgcatgatatgcttgcttcattggggaagaatccaactgatgagtatctagatgccatgatgaatgaggctccaggccccatcaatttcaccatgttcctcaccatgtttggtgagaagttaaatggcacagatcctgaagatgtcatcagaaatgcctttgcttgctttgatgaagaagcaactggcaccatacaggaagattacttgagagagctgctgacaaccatcgggggatcggttttacagatgaaggaagtggatgagctgtacagagaagcacctatttgataaaaaagggggaattttcaattacatcggagttcacacggcatcttgaaacaggggggcccaaagacaaagatgaccggaaaataaccttccaaatccccagcccaaacgttccttggttggccacttttggggtattcctggagattttcctcttgcatggcccttaagctttagcagcttttgcatttccctgttggtatttattcctcagcccattttgggccaaatggatcctttaaaactcagctgggaaacgggcctttctattaatatccatttttcagaataaaaaatagggtaatttaacctaccagcccttctcccccaataactggtgggtctatacagagtcaatatattttttcagaggaaagttagttcggctcgattttttctggaatcctaatttaaactttatgataaaataaaaaaaaaa
